United States Patent Application Publication US 2022/0211838 A1 - sequence listing, part 13

SEQ ID NO: 24074 - RNA, 4035 nt, Artificial Sequence
  SARS-CoV-2/Wuhan/WIV05/2019__EPI_ISL_402128 spike protein mRNA gc (1-1273)(N501Y_D614G)
aggagaaagcuuaccauguucguguuccugguccuccugccccuggugagcucccagugcgugaaccucaccacccgcacgcagcugccgcccgccuacaccaacagcuucacccggggcgucuacuaccccgacaagguguuccgcuccagcgugcugcacuccacccaggaccucuuccugcccuucuucagcaacgucacgugguuccacgccauccacguguccgggaccaacggcaccaagcgguucgacaacccggugcugcccuucaacgacggggucuacuucgcgagcaccgagaaguccaacaucauccgcggcuggaucuucgggacgacccucgacagcaagacccagucccugcugaucgugaacaacgccaccaacguggucaucaaggugugcgaguuccaguucugcaacgaccccuuccucggcguguacuaccacaagaacaacaagagcuggauggaguccgaguuccgggucuacagcuccgccaacaacugcacguucgaguacgugagccagcccuuccugauggaccuggagggcaagcaggggaacuucaagaaccuccgcgaguucguguucaagaacaucgacggcuacuucaagaucuacuccaagcacaccccgaucaaccugguccgggaccugccccagggguucagcgcccucgagccccugguggaccugcccaucggcaucaacaucacccgcuuccagacccuccuggcccugcaccgguccuaccucacgccgggggacagcagcuccggcuggaccgcgggcgccgccgccuacuacgugggguaccugcagccccgcaccuuccugcucaaguacaacgagaacggcaccaucacggacgcggucgacugcgcccuggacccccugagcgagaccaagugcacccucaaguccuucaccguggagaaggggaucuaccagacgagcaacuuccgggugcagcccaccgaguccaucguccgcuucccgaacaucaccaaccugugccccuucggcgagguguucaacgccacccgguucgccagcgucuacgccuggaaccgcaagcggaucuccaacugcguggcggacuacagcgugcuguacaacuccgccagcuucuccacguucaagugcuacggcgucagccccaccaagcucaacgaccugugcuucaccaacguguacgccgacuccuucgugauccgcggggacgagguccggcagaucgcccccggccagaccgggaagaucgccgacuacaacuacaagcugccggacgacuucacgggcugcgugaucgcguggaacagcaacaaccucgacuccaaggucgggggcaacuacaacuaccuguaccgccuguuccgcaagagcaaccucaagcccuucgagcgggacaucuccaccgagaucuaccaggccggcagcacccccugcaacgggguggagggcuucaacugcuacuucccccugcaguccuacggguuccagccgaccuacggcgugggguaccagcccuaccggguggucgugcugagcuucgagcuccugcacgcccccgccacggugugcggccccaagaaguccaccaaccuggucaagaacaagugcgugaacuucaacuucaacggccucaccgggaccggcgugcugaccgagagcaacaagaaguuccugccguuccagcaguucgggcgcgacaucgccgacacgaccgacgcgguccgcgacccccagacccuggagauccucgacaucacccccugcagcuucggcgggguguccgugaucacgccgggcaccaacaccagcaaccaggucgccgugcuguaccagggcgugaacugcaccgagguccccguggccauccacgccgaccagcugacgcccaccuggcggguguacuccaccggcagcaacgucuuccagacccgcgccgggugccucaucggcgcggagcacgugaacaacuccuacgagugcgacauccccaucggggccggcaucugcgccagcuaccagacgcagaccaacuccccgcggcgcgcccggagcguggcgucccagagcaucaucgccuacaccaugucccugggcgccgagaacagcgucgccuacuccaacaacagcaucgccauccccaccaacuucacgaucuccgugaccaccgagauccugcccgugagcaugaccaagacgagcgucgacugcaccauguacaucugcggggacuccaccgagugcagcaaccuccugcugcaguacggcuccuucugcacccagcucaaccgcgcgcugacggggaucgccguggagcaggacaagaacacccaggagguguucgcccaggucaagcagaucuacaagacgcccccgaucaaggacuucggcggguucaacuucagccagauccugcccgaccccuccaagcccagcaagcgguccuucaucgaggaccuccuguucaacaaggugacccuggccgacgccggcuucaucaagcaguacggcgacugccucggggacaucgcggcccgcgaccugaucugcgcccagaaguucaacggccugaccgugcucccgccccugcugaccgacgagaugaucgcccaguacaccagcgcccuccuggcggggaccaucacguccggcuggaccuucggggccggcgccgcccugcagauccccuucgcgaugcagauggccuaccgguucaacggcaucggggucacccagaacgugcucuacgagaaccagaagcugaucgccaaccaguucaacagcgccaucggcaagauccaggacucccugagcuccaccgccagcgcgcucgggaagcugcaggacguggucaaccagaacgcccaggcccugaacacgcucgugaagcagcuguccagcaacuucggcgccaucuccagcgugcugaacgacauccucucccgccuggacaaggucgaggccgaggugcagaucgaccggcugaucaccgggcgccuccagagccugcagaccuacgugacccagcagcugauccgggcggccgagauccgcgccagcgccaaccucgccgcgaccaagauguccgagugcguccugggccagagcaagcggguggacuucugcggcaagggguaccaccugauguccuucccccagagcgccccgcacggcguggucuuccuccacgugacguacguccccgcccaggagaagaacuucaccaccgcccccgcgaucugccacgacgggaaggcccacuucccccgcgagggcguguucguguccaacgggacccacugguucgucacgcagcggaacuucuacgagccgcagaucaucaccaccgacaacaccuucgugagcggcaacugcgacguggucaucggcaucgugaacaacacgguguacgacccccugcagcccgagcuggacuccuucaaggaggagcucgacaaguacuucaagaaccacaccagccccgacgucgaccugggggacaucuccggcaucaacgccagcguggugaacauccagaaggagaucgaccgccugaacgaggucgccaagaaccucaacgagucccugaucgaccugcaggagcucgggaaguacgagcaguacaucaaguggccgugguacaucuggcugggcuucaucgccggccugaucgcgaucgugauggugaccaucaugcucugcugcaugaccagcugcugcuccugccugaaggggugcugcagcugcggcuccugcugcaaguucgacgaggacgacagcgagcccguccugaagggggugaagcuccacuacacgugaggacuaguuauaagacugacuagcccgaugggccucccaacgggcccuccuccccuccuugcaccgagauuaaucaaaggcucuuuucagagccaccaaaaaaaaaaaaaaaaaaaaaaaaaaaaaaaaaaaaaaaaaaaaaaaaaaaaaaaaaaaaaaaaaaaaaaaaaaaaaaaaaaaaaaaaaaaaaaaaaaaaa

SEQ ID NO: 24075 - RNA, 4029 nt, Artificial Sequence
  SARS-CoV-2/Wuhan/WIV05/2019__EPI_ISL_402128 spike protein mRNA gc (1-1273)(H69del_V70del_D614G)
aggagaaagcuuaccauguucguguuccugguccuccugccccuggugagcucccagugcgugaaccucaccacccgcacgcagcugccgcccgccuacaccaacagcuucacccggggcgucuacuaccccgacaagguguuccgcuccagcgugcugcacuccacccaggaccucuuccugcccuucuucagcaacgucacgugguuccacgccaucuccgggaccaacggcaccaagcgguucgacaacccggugcugcccuucaacgacggggucuacuucgcgagcaccgagaaguccaacaucauccgcggcuggaucuucgggacgacccucgacagcaagacccagucccugcugaucgugaacaacgccaccaacguggucaucaaggugugcgaguuccaguucugcaacgaccccuuccucggcguguacuaccacaagaacaacaagagcuggauggaguccgaguuccgggucuacagcuccgccaacaacugcacguucgaguacgugagccagcccuuccugauggaccuggagggcaagcaggggaacuucaagaaccuccgcgaguucguguucaagaacaucgacggcuacuucaagaucuacuccaagcacaccccgaucaaccugguccgggaccugccccagggguucagcgcccucgagccccugguggaccugcccaucggcaucaacaucacccgcuuccagacccuccuggcccugcaccgguccuaccucacgccgggggacagcagcuccggcuggaccgcgggcgccgccgccuacuacgugggguaccugcagccccgcaccuuccugcucaaguacaacgagaacggcaccaucacggacgcggucgacugcgcccuggacccccugagcgagaccaagugcacccucaaguccuucaccguggagaaggggaucuaccagacgagcaacuuccgggugcagcccaccgaguccaucguccgcuucccgaacaucaccaaccugugccccuucggcgagguguucaacgccacccgguucgccagcgucuacgccuggaaccgcaagcggaucuccaacugcguggcggacuacagcgugcuguacaacuccgccagcuucuccacguucaagugcuacggcgucagccccaccaagcucaacgaccugugcuucaccaacguguacgccgacuccuucgugauccgcggggacgagguccggcagaucgcccccggccagaccgggaagaucgccgacuacaacuacaagcugccggacgacuucacgggcugcgugaucgcguggaacagcaacaaccucgacuccaaggucgggggcaacuacaacuaccuguaccgccuguuccgcaagagcaaccucaagcccuucgagcgggacaucuccaccgagaucuaccaggccggcagcacccccugcaacgggguggagggcuucaacugcuacuucccccugcaguccuacggguuccagccgaccaacggcgugggguaccagcccuaccggguggucgugcugagcuucgagcuccugcacgcccccgccacggugugcggccccaagaaguccaccaaccuggucaagaacaagugcgugaacuucaacuucaacggccucaccgggaccggcgugcugaccgagagcaacaagaaguuccugccguuccagcaguucgggcgcgacaucgccgacacgaccgacgcgguccgcgacccccagacccuggagauccucgacaucacccccugcagcuucggcgggguguccgugaucacgccgggcaccaacaccagcaaccaggucgccgugcuguaccagggcgugaacugcaccgagguccccguggccauccacgccgaccagcugacgcccaccuggcggguguacuccaccggcagcaacgucuuccagacccgcgccgggugccucaucggcgcggagcacgugaacaacuccuacgagugcgacauccccaucggggccggcaucugcgccagcuaccagacgcagaccaacuccccgcggcgcgcccggagcguggcgucccagagcaucaucgccuacaccaugucccugggcgccgagaacagcgucgccuacuccaacaacagcaucgccauccccaccaacuucacgaucuccgugaccaccgagauccugcccgugagcaugaccaagacgagcgucgacugcaccauguacaucugcggggacuccaccgagugcagcaaccuccugcugcaguacggcuccuucugcacccagcucaaccgcgcgcugacggggaucgccguggagcaggacaagaacacccaggagguguucgcccaggucaagcagaucuacaagacgcccccgaucaaggacuucggcggguucaacuucagccagauccugcccgaccccuccaagcccagcaagcgguccuucaucgaggaccuccuguucaacaaggugacccuggccgacgccggcuucaucaagcaguacggcgacugccucggggacaucgcggcccgcgaccugaucugcgcccagaaguucaacggccugaccgugcucccgccccugcugaccgacgagaugaucgcccaguacaccagcgcccuccuggcggggaccaucacguccggcuggaccuucggggccggcgccgcccugcagauccccuucgcgaugcagauggccuaccgguucaacggcaucggggucacccagaacgugcucuacgagaaccagaagcugaucgccaaccaguucaacagcgccaucggcaagauccaggacucccugagcuccaccgccagcgcgcucgggaagcugcaggacguggucaaccagaacgcccaggcccugaacacgcucgugaagcagcuguccagcaacuucggcgccaucuccagcgugcugaacgacauccucucccgccuggacaaggucgaggccgaggugcagaucgaccggcugaucaccgggcgccuccagagccugcagaccuacgugacccagcagcugauccgggcggccgagauccgcgccagcgccaaccucgccgcgaccaagauguccgagugcguccugggccagagcaagcggguggacuucugcggcaagggguaccaccugauguccuucccccagagcgccccgcacggcguggucuuccuccacgugacguacguccccgcccaggagaagaacuucaccaccgcccccgcgaucugccacgacgggaaggcccacuucccccgcgagggcguguucguguccaacgggacccacugguucgucacgcagcggaacuucuacgagccgcagaucaucaccaccgacaacaccuucgugagcggcaacugcgacguggucaucggcaucgugaacaacacgguguacgacccccugcagcccgagcuggacuccuucaaggaggagcucgacaaguacuucaagaaccacaccagccccgacgucgaccugggggacaucuccggcaucaacgccagcguggugaacauccagaaggagaucgaccgccugaacgaggucgccaagaaccucaacgagucccugaucgaccugcaggagcucgggaaguacgagcaguacaucaaguggccgugguacaucuggcugggcuucaucgccggccugaucgcgaucgugauggugaccaucaugcucugcugcaugaccagcugcugcuccugccugaaggggugcugcagcugcggcuccugcugcaaguucgacgaggacgacagcgagcccguccugaagggggugaagcuccacuacacgugaggacuaguuauaagacugacuagcccgaugggccucccaacgggcccuccuccccuccuugcaccgagauuaaucaaaggcucuuuucagagccaccaaaaaaaaaaaaaaaaaaaaaaaaaaaaaaaaaaaaaaaaaaaaaaaaaaaaaaaaaaaaaaaaaaaaaaaaaaaaaaaaaaaaaaaaaaaaaaaaaaaaa

SEQ ID NO: 24076 - RNA, 4035 nt, Artificial Sequence
  SARS-CoV-2/Wuhan/WIV05/2019__EPI_ISL_402128 spike protein mRNA gc (1-1273)(Y453F_D614G)
aggagaaagcuuaccauguucguguuccugguccuccugccccuggugagcucccagugcgugaaccucaccacccgcacgcagcugccgcccgccuacaccaacagcuucacccggggcgucuacuaccccgacaagguguuccgcuccagcgugcugcacuccacccaggaccucuuccugcccuucuucagcaacgucacgugguuccacgccauccacguguccgggaccaacggcaccaagcgguucgacaacccggugcugcccuucaacgacggggucuacuucgcgagcaccgagaaguccaacaucauccgcggcuggaucuucgggacgacccucgacagcaagacccagucccugcugaucgugaacaacgccaccaacguggucaucaaggugugcgaguuccaguucugcaacgaccccuuccucggcguguacuaccacaagaacaacaagagcuggauggaguccgaguuccgggucuacagcuccgccaacaacugcacguucgaguacgugagccagcccuuccugauggaccuggagggcaagcaggggaacuucaagaaccuccgcgaguucguguucaagaacaucgacggcuacuucaagaucuacuccaagcacaccccgaucaaccugguccgggaccugccccagggguucagcgcccucgagccccugguggaccugcccaucggcaucaacaucacccgcuuccagacccuccuggcccugcaccgguccuaccucacgccgggggacagcagcuccggcuggaccgcgggcgccgccgccuacuacgugggguaccugcagccccgcaccuuccugcucaaguacaacgagaacggcaccaucacggacgcggucgacugcgcccuggacccccugagcgagaccaagugcacccucaaguccuucaccguggagaaggggaucuaccagacgagcaacuuccgggugcagcccaccgaguccaucguccgcuucccgaacaucaccaaccugugccccuucggcgagguguucaacgccacccgguucgccagcgucuacgccuggaaccgcaagcggaucuccaacugcguggcggacuacagcgugcuguacaacuccgccagcuucuccacguucaagugcuacggcgucagccccaccaagcucaacgaccugugcuucaccaacguguacgccgacuccuucgugauccgcggggacgagguccggcagaucgcccccggccagaccgggaagaucgccgacuacaacuacaagcugccggacgacuucacgggcugcgugaucgcguggaacagcaacaaccucgacuccaaggucgggggcaacuacaacuaccuguuccgccuguuccgcaagagcaaccucaagcccuucgagcgggacaucuccaccgagaucuaccaggccggcagcacccccugcaacgggguggagggcuucaacugcuacuucccccugcaguccuacggguuccagccgaccaacggcgugggguaccagcccuaccggguggucgugcugagcuucgagcuccugcacgcccccgccacggugugcggccccaagaaguccaccaaccuggucaagaacaagugcgugaacuucaacuucaacggccucaccgggaccggcgugcugaccgagagcaacaagaaguuccugccguuccagcaguucgggcgcgacaucgccgacacgaccgacgcgguccgcgacccccagacccuggagauccucgacaucacccccugcagcuucggcgggguguccgugaucacgccgggcaccaacaccagcaaccaggucgccgugcuguaccagggcgugaacugcaccgagguccccguggccauccacgccgaccagcugacgcccaccuggcggguguacuccaccggcagcaacgucuuccagacccgcgccgggugccucaucggcgcggagcacgugaacaacuccuacgagugcgacauccccaucggggccggcaucugcgccagcuaccagacgcagaccaacuccccgcggcgcgcccggagcguggcgucccagagcaucaucgccuacaccaugucccugggcgccgagaacagcgucgccuacuccaacaacagcaucgccauccccaccaacuucacgaucuccgugaccaccgagauccugcccgugagcaugaccaagacgagcgucgacugcaccauguacaucugcggggacuccaccgagugcagcaaccuccugcugcaguacggcuccuucugcacccagcucaaccgcgcgcugacggggaucgccguggagcaggacaagaacacccaggagguguucgcccaggucaagcagaucuacaagacgcccccgaucaaggacuucggcggguucaacuucagccagauccugcccgaccccuccaagcccagcaagcgguccuucaucgaggaccuccuguucaacaaggugacccuggccgacgccggcuucaucaagcaguacggcgacugccucggggacaucgcggcccgcgaccugaucugcgcccagaaguucaacggccugaccgugcucccgccccugcugaccgacgagaugaucgcccaguacaccagcgcccuccuggcggggaccaucacguccggcuggaccuucggggccggcgccgcccugcagauccccuucgcgaugcagauggccuaccgguucaacggcaucggggucacccagaacgugcucuacgagaaccagaagcugaucgccaaccaguucaacagcgccaucggcaagauccaggacucccugagcuccaccgccagcgcgcucgggaagcugcaggacguggucaaccagaacgcccaggcccugaacacgcucgugaagcagcuguccagcaacuucggcgccaucuccagcgugcugaacgacauccucucccgccuggacaaggucgaggccgaggugcagaucgaccggcugaucaccgggcgccuccagagccugcagaccuacgugacccagcagcugauccgggcggccgagauccgcgccagcgccaaccucgccgcgaccaagauguccgagugcguccugggccagagcaagcggguggacuucugcggcaagggguaccaccugauguccuucccccagagcgccccgcacggcguggucuuccuccacgugacguacguccccgcccaggagaagaacuucaccaccgcccccgcgaucugccacgacgggaaggcccacuucccccgcgagggcguguucguguccaacgggacccacugguucgucacgcagcggaacuucuacgagccgcagaucaucaccaccgacaacaccuucgugagcggcaacugcgacguggucaucggcaucgugaacaacacgguguacgacccccugcagcccgagcuggacuccuucaaggaggagcucgacaaguacuucaagaaccacaccagccccgacgucgaccugggggacaucuccggcaucaacgccagcguggugaacauccagaaggagaucgaccgccugaacgaggucgccaagaaccucaacgagucccugaucgaccugcaggagcucgggaaguacgagcaguacaucaaguggccgugguacaucuggcugggcuucaucgccggccugaucgcgaucgugauggugaccaucaugcucugcugcaugaccagcugcugcuccugccugaaggggugcugcagcugcggcuccugcugcaaguucgacgaggacgacagcgagcccguccugaagggggugaagcuccacuacacgugaggacuaguuauaagacugacuagcccgaugggccucccaacgggcccuccuccccuccuugcaccgagauuaaucaaaggcucuuuucagagccaccaaaaaaaaaaaaaaaaaaaaaaaaaaaaaaaaaaaaaaaaaaaaaaaaaaaaaaaaaaaaaaaaaaaaaaaaaaaaaaaaaaaaaaaaaaaaaaaaaaaaa

SEQ ID NO: 24077 - RNA, 4035 nt, Artificial Sequence
  SARS-CoV-2/Wuhan/WIV05/2019__EPI_ISL_402128 spike protein mRNA gc (1-1273)(D614G_I692V)
aggagaaagcuuaccauguucguguuccugguccuccugccccuggugagcucccagugcgugaaccucaccacccgcacgcagcugccgcccgccuacaccaacagcuucacccggggcgucuacuaccccgacaagguguuccgcuccagcgugcugcacuccacccaggaccucuuccugcccuucuucagcaacgucacgugguuccacgccauccacguguccgggaccaacggcaccaagcgguucgacaacccggugcugcccuucaacgacggggucuacuucgcgagcaccgagaaguccaacaucauccgcggcuggaucuucgggacgacccucgacagcaagacccagucccugcugaucgugaacaacgccaccaacguggucaucaaggugugcgaguuccaguucugcaacgaccccuuccucggcguguacuaccacaagaacaacaagagcuggauggaguccgaguuccgggucuacagcuccgccaacaacugcacguucgaguacgugagccagcccuuccugauggaccuggagggcaagcaggggaacuucaagaaccuccgcgaguucguguucaagaacaucgacggcuacuucaagaucuacuccaagcacaccccgaucaaccugguccgggaccugccccagggguucagcgcccucgagccccugguggaccugcccaucggcaucaacaucacccgcuuccagacccuccuggcccugcaccgguccuaccucacgccgggggacagcagcuccggcuggaccgcgggcgccgccgccuacuacgugggguaccugcagccccgcaccuuccugcucaaguacaacgagaacggcaccaucacggacgcggucgacugcgcccuggacccccugagcgagaccaagugcacccucaaguccuucaccguggagaaggggaucuaccagacgagcaacuuccgggugcagcccaccgaguccaucguccgcuucccgaacaucaccaaccugugccccuucggcgagguguucaacgccacccgguucgccagcgucuacgccuggaaccgcaagcggaucuccaacugcguggcggacuacagcgugcuguacaacuccgccagcuucuccacguucaagugcuacggcgucagccccaccaagcucaacgaccugugcuucaccaacguguacgccgacuccuucgugauccgcggggacgagguccggcagaucgcccccggccagaccgggaagaucgccgacuacaacuacaagcugccggacgacuucacgggcugcgugaucgcguggaacagcaacaaccucgacuccaaggucgggggcaacuacaacuaccuguaccgccuguuccgcaagagcaaccucaagcccuucgagcgggacaucuccaccgagaucuaccaggccggcagcacccccugcaacgggguggagggcuucaacugcuacuucccccugcaguccuacggguuccagccgaccaacggcgugggguaccagcccuaccggguggucgugcugagcuucgagcuccugcacgcccccgccacggugugcggccccaagaaguccaccaaccuggucaagaacaagugcgugaacuucaacuucaacggccucaccgggaccggcgugcugaccgagagcaacaagaaguuccugccguuccagcaguucgggcgcgacaucgccgacacgaccgacgcgguccgcgacccccagacccuggagauccucgacaucacccccugcagcuucggcgggguguccgugaucacgccgggcaccaacaccagcaaccaggucgccgugcuguaccagggcgugaacugcaccgagguccccguggccauccacgccgaccagcugacgcccaccuggcggguguacuccaccggcagcaacgucuuccagacccgcgccgggugccucaucggcgcggagcacgugaacaacuccuacgagugcgacauccccaucggggccggcaucugcgccagcuaccagacgcagaccaacuccccgcggcgcgcccggagcguggcgucccagagcgucaucgccuacaccaugucccugggcgccgagaacagcgucgccuacuccaacaacagcaucgccauccccaccaacuucacgaucuccgugaccaccgagauccugcccgugagcaugaccaagacgagcgucgacugcaccauguacaucugcggggacuccaccgagugcagcaaccuccugcugcaguacggcuccuucugcacccagcucaaccgcgcgcugacggggaucgccguggagcaggacaagaacacccaggagguguucgcccaggucaagcagaucuacaagacgcccccgaucaaggacuucggcggguucaacuucagccagauccugcccgaccccuccaagcccagcaagcgguccuucaucgaggaccuccuguucaacaaggugacccuggccgacgccggcuucaucaagcaguacggcgacugccucggggacaucgcggcccgcgaccugaucugcgcccagaaguucaacggccugaccgugcucccgccccugcugaccgacgagaugaucgcccaguacaccagcgcccuccuggcggggaccaucacguccggcuggaccuucggggccggcgccgcccugcagauccccuucgcgaugcagauggccuaccgguucaacggcaucggggucacccagaacgugcucuacgagaaccagaagcugaucgccaaccaguucaacagcgccaucggcaagauccaggacucccugagcuccaccgccagcgcgcucgggaagcugcaggacguggucaaccagaacgcccaggcccugaacacgcucgugaagcagcuguccagcaacuucggcgccaucuccagcgugcugaacgacauccucucccgccuggacaaggucgaggccgaggugcagaucgaccggcugaucaccgggcgccuccagagccugcagaccuacgugacccagcagcugauccgggcggccgagauccgcgccagcgccaaccucgccgcgaccaagauguccgagugcguccugggccagagcaagcggguggacuucugcggcaagggguaccaccugauguccuucccccagagcgccccgcacggcguggucuuccuccacgugacguacguccccgcccaggagaagaacuucaccaccgcccccgcgaucugccacgacgggaaggcccacuucccccgcgagggcguguucguguccaacgggacccacugguucgucacgcagcggaacuucuacgagccgcagaucaucaccaccgacaacaccuucgugagcggcaacugcgacguggucaucggcaucgugaacaacacgguguacgacccccugcagcccgagcuggacuccuucaaggaggagcucgacaaguacuucaagaaccacaccagccccgacgucgaccugggggacaucuccggcaucaacgccagcguggugaacauccagaaggagaucgaccgccugaacgaggucgccaagaaccucaacgagucccugaucgaccugcaggagcucgggaaguacgagcaguacaucaaguggccgugguacaucuggcugggcuucaucgccggccugaucgcgaucgugauggugaccaucaugcucugcugcaugaccagcugcugcuccugccugaaggggugcugcagcugcggcuccugcugcaaguucgacgaggacgacagcgagcccguccugaagggggugaagcuccacuacacgugaggacuaguuauaagacugacuagcccgaugggccucccaacgggcccuccuccccuccuugcaccgagauuaaucaaaggcucuuuucagagccaccaaaaaaaaaaaaaaaaaaaaaaaaaaaaaaaaaaaaaaaaaaaaaaaaaaaaaaaaaaaaaaaaaaaaaaaaaaaaaaaaaaaaaaaaaaaaaaaaaaaaa

SEQ ID NO: 24078 - RNA, 4035 nt, Artificial Sequence
  SARS-CoV-2/Wuhan/WIV05/2019__EPI_ISL_402128 spike protein mRNA gc (1-1273)(D614G_M1229I)
aggagaaagcuuaccauguucguguuccugguccuccugccccuggugagcucccagugcgugaaccucaccacccgcacgcagcugccgcccgccuacaccaacagcuucacccggggcgucuacuaccccgacaagguguuccgcuccagcgugcugcacuccacccaggaccucuuccugcccuucuucagcaacgucacgugguuccacgccauccacguguccgggaccaacggcaccaagcgguucgacaacccggugcugcccuucaacgacggggucuacuucgcgagcaccgagaaguccaacaucauccgcggcuggaucuucgggacgacccucgacagcaagacccagucccugcugaucgugaacaacgccaccaacguggucaucaaggugugcgaguuccaguucugcaacgaccccuuccucggcguguacuaccacaagaacaacaagagcuggauggaguccgaguuccgggucuacagcuccgccaacaacugcacguucgaguacgugagccagcccuuccugauggaccuggagggcaagcaggggaacuucaagaaccuccgcgaguucguguucaagaacaucgacggcuacuucaagaucuacuccaagcacaccccgaucaaccugguccgggaccugccccagggguucagcgcccucgagccccugguggaccugcccaucggcaucaacaucacccgcuuccagacccuccuggcccugcaccgguccuaccucacgccgggggacagcagcuccggcuggaccgcgggcgccgccgccuacuacgugggguaccugcagccccgcaccuuccugcucaaguacaacgagaacggcaccaucacggacgcggucgacugcgcccuggacccccugagcgagaccaagugcacccucaaguccuucaccguggagaaggggaucuaccagacgagcaacuuccgggugcagcccaccgaguccaucguccgcuucccgaacaucaccaaccugugccccuucggcgagguguucaacgccacccgguucgccagcgucuacgccuggaaccgcaagcggaucuccaacugcguggcggacuacagcgugcuguacaacuccgccagcuucuccacguucaagugcuacggcgucagccccaccaagcucaacgaccugugcuucaccaacguguacgccgacuccuucgugauccgcggggacgagguccggcagaucgcccccggccagaccgggaagaucgccgacuacaacuacaagcugccggacgacuucacgggcugcgugaucgcguggaacagcaacaaccucgacuccaaggucgggggcaacuacaacuaccuguaccgccuguuccgcaagagcaaccucaagcccuucgagcgggacaucuccaccgagaucuaccaggccggcagcacccccugcaacgggguggagggcuucaacugcuacuucccccugcaguccuacggguuccagccgaccaacggcgugggguaccagcccuaccggguggucgugcugagcuucgagcuccugcacgcccccgccacggugugcggccccaagaaguccaccaaccuggucaagaacaagugcgugaacuucaacuucaacggccucaccgggaccggcgugcugaccgagagcaacaagaaguuccugccguuccagcaguucgggcgcgacaucgccgacacgaccgacgcgguccgcgacccccagacccuggagauccucgacaucacccccugcagcuucggcgggguguccgugaucacgccgggcaccaacaccagcaaccaggucgccgugcuguaccagggcgugaacugcaccgagguccccguggccauccacgccgaccagcugacgcccaccuggcggguguacuccaccggcagcaacgucuuccagacccgcgccgggugccucaucggcgcggagcacgugaacaacuccuacgagugcgacauccccaucggggccggcaucugcgccagcuaccagacgcagaccaacuccccgcggcgcgcccggagcguggcgucccagagcaucaucgccuacaccaugucccugggcgccgagaacagcgucgccuacuccaacaacagcaucgccauccccaccaacuucacgaucuccgugaccaccgagauccugcccgugagcaugaccaagacgagcgucgacugcaccauguacaucugcggggacuccaccgagugcagcaaccuccugcugcaguacggcuccuucugcacccagcucaaccgcgcgcugacggggaucgccguggagcaggacaagaacacccaggagguguucgcccaggucaagcagaucuacaagacgcccccgaucaaggacuucggcggguucaacuucagccagauccugcccgaccccuccaagcccagcaagcgguccuucaucgaggaccuccuguucaacaaggugacccuggccgacgccggcuucaucaagcaguacggcgacugccucggggacaucgcggcccgcgaccugaucugcgcccagaaguucaacggccugaccgugcucccgccccugcugaccgacgagaugaucgcccaguacaccagcgcccuccuggcggggaccaucacguccggcuggaccuucggggccggcgccgcccugcagauccccuucgcgaugcagauggccuaccgguucaacggcaucggggucacccagaacgugcucuacgagaaccagaagcugaucgccaaccaguucaacagcgccaucggcaagauccaggacucccugagcuccaccgccagcgcgcucgggaagcugcaggacguggucaaccagaacgcccaggcccugaacacgcucgugaagcagcuguccagcaacuucggcgccaucuccagcgugcugaacgacauccucucccgccuggacaaggucgaggccgaggugcagaucgaccggcugaucaccgggcgccuccagagccugcagaccuacgugacccagcagcugauccgggcggccgagauccgcgccagcgccaaccucgccgcgaccaagauguccgagugcguccugggccagagcaagcggguggacuucugcggcaagggguaccaccugauguccuucccccagagcgccccgcacggcguggucuuccuccacgugacguacguccccgcccaggagaagaacuucaccaccgcccccgcgaucugccacgacgggaaggcccacuucccccgcgagggcguguucguguccaacgggacccacugguucgucacgcagcggaacuucuacgagccgcagaucaucaccaccgacaacaccuucgugagcggcaacugcgacguggucaucggcaucgugaacaacacgguguacgacccccugcagcccgagcuggacuccuucaaggaggagcucgacaaguacuucaagaaccacaccagccccgacgucgaccugggggacaucuccggcaucaacgccagcguggugaacauccagaaggagaucgaccgccugaacgaggucgccaagaaccucaacgagucccugaucgaccugcaggagcucgggaaguacgagcaguacaucaaguggccgugguacaucuggcugggcuucaucgccggccugaucgcgaucgugaucgugaccaucaugcucugcugcaugaccagcugcugcuccugccugaaggggugcugcagcugcggcuccugcugcaaguucgacgaggacgacagcgagcccguccugaagggggugaagcuccacuacacgugaggacuaguuauaagacugacuagcccgaugggccucccaacgggcccuccuccccuccuugcaccgagauuaaucaaaggcucuuuucagagccaccaaaaaaaaaaaaaaaaaaaaaaaaaaaaaaaaaaaaaaaaaaaaaaaaaaaaaaaaaaaaaaaaaaaaaaaaaaaaaaaaaaaaaaaaaaaaaaaaaaaaa

SEQ ID NO: 24079 - RNA, 4029 nt, Artificial Sequence
  SARS-CoV-2/Wuhan/WIV05/2019__EPI_ISL_402128 spike protein mRNA gc (1-1273)(H69del_V70del_A222V_Y453F_S477N_D614G_I692V)
aggagaaagcuuaccauguucguguuccugguccuccugccccuggugagcucccagugcgugaaccucaccacccgcacgcagcugccgcccgccuacaccaacagcuucacccggggcgucuacuaccccgacaagguguuccgcuccagcgugcugcacuccacccaggaccucuuccugcccuucuucagcaacgucacgugguuccacgccaucuccgggaccaacggcaccaagcgguucgacaacccggugcugcccuucaacgacggggucuacuucgcgagcaccgagaaguccaacaucauccgcggcuggaucuucgggacgacccucgacagcaagacccagucccugcugaucgugaacaacgccaccaacguggucaucaaggugugcgaguuccaguucugcaacgaccccuuccucggcguguacuaccacaagaacaacaagagcuggauggaguccgaguuccgggucuacagcuccgccaacaacugcacguucgaguacgugagccagcccuuccugauggaccuggagggcaagcaggggaacuucaagaaccuccgcgaguucguguucaagaacaucgacggcuacuucaagaucuacuccaagcacaccccgaucaaccugguccgggaccugccccagggguucagcguccucgagccccugguggaccugcccaucggcaucaacaucacccgcuuccagacccuccuggcccugcaccgguccuaccucacgccgggggacagcagcuccggcuggaccgcgggcgccgccgccuacuacgugggguaccugcagccccgcaccuuccugcucaaguacaacgagaacggcaccaucacggacgcggucgacugcgcccuggacccccugagcgagaccaagugcacccucaaguccuucaccguggagaaggggaucuaccagacgagcaacuuccgggugcagcccaccgaguccaucguccgcuucccgaacaucaccaaccugugccccuucggcgagguguucaacgccacccgguucgccagcgucuacgccuggaaccgcaagcggaucuccaacugcguggcggacuacagcgugcuguacaacuccgccagcuucuccacguucaagugcuacggcgucagccccaccaagcucaacgaccugugcuucaccaacguguacgccgacuccuucgugauccgcggggacgagguccggcagaucgcccccggccagaccgggaagaucgccgacuacaacuacaagcugccggacgacuucacgggcugcgugaucgcguggaacagcaacaaccucgacuccaaggucgggggcaacuacaacuaccuguuccgccuguuccgcaagagcaaccucaagcccuucgagcgggacaucuccaccgagaucuaccaggccggcaacacccccugcaacgggguggagggcuucaacugcuacuucccccugcaguccuacggguuccagccgaccaacggcgugggguaccagcccuaccggguggucgugcugagcuucgagcuccugcacgcccccgccacggugugcggccccaagaaguccaccaaccuggucaagaacaagugcgugaacuucaacuucaacggccucaccgggaccggcgugcugaccgagagcaacaagaaguuccugccguuccagcaguucgggcgcgacaucgccgacacgaccgacgcgguccgcgacccccagacccuggagauccucgacaucacccccugcagcuucggcgggguguccgugaucacgccgggcaccaacaccagcaaccaggucgccgugcuguaccagggcgugaacugcaccgagguccccguggccauccacgccgaccagcugacgcccaccuggcggguguacuccaccggcagcaacgucuuccagacccgcgccgggugccucaucggcgcggagcacgugaacaacuccuacgagugcgacauccccaucggggccggcaucugcgccagcuaccagacgcagaccaacuccccgcggcgcgcccggagcguggcgucccagagcgucaucgccuacaccaugucccugggcgccgagaacagcgucgccuacuccaacaacagcaucgccauccccaccaacuucacgaucuccgugaccaccgagauccugcccgugagcaugaccaagacgagcgucgacugcaccauguacaucugcggggacuccaccgagugcagcaaccuccugcugcaguacggcuccuucugcacccagcucaaccgcgcgcugacggggaucgccguggagcaggacaagaacacccaggagguguucgcccaggucaagcagaucuacaagacgcccccgaucaaggacuucggcggguucaacuucagccagauccugcccgaccccuccaagcccagcaagcgguccuucaucgaggaccuccuguucaacaaggugacccuggccgacgccggcuucaucaagcaguacggcgacugccucggggacaucgcggcccgcgaccugaucugcgcccagaaguucaacggccugaccgugcucccgccccugcugaccgacgagaugaucgcccaguacaccagcgcccuccuggcggggaccaucacguccggcuggaccuucggggccggcgccgcccugcagauccccuucgcgaugcagauggccuaccgguucaacggcaucggggucacccagaacgugcucuacgagaaccagaagcugaucgccaaccaguucaacagcgccaucggcaagauccaggacucccugagcuccaccgccagcgcgcucgggaagcugcaggacguggucaaccagaacgcccaggcccugaacacgcucgugaagcagcuguccagcaacuucggcgccaucuccagcgugcugaacgacauccucucccgccuggacaaggucgaggccgaggugcagaucgaccggcugaucaccgggcgccuccagagccugcagaccuacgugacccagcagcugauccgggcggccgagauccgcgccagcgccaaccucgccgcgaccaagauguccgagugcguccugggccagagcaagcggguggacuucugcggcaagggguaccaccugauguccuucccccagagcgccccgcacggcguggucuuccuccacgugacguacguccccgcccaggagaagaacuucaccaccgcccccgcgaucugccacgacgggaaggcccacuucccccgcgagggcguguucguguccaacgggacccacugguucgucacgcagcggaacuucuacgagccgcagaucaucaccaccgacaacaccuucgugagcggcaacugcgacguggucaucggcaucgugaacaacacgguguacgacccccugcagcccgagcuggacuccuucaaggaggagcucgacaaguacuucaagaaccacaccagccccgacgucgaccugggggacaucuccggcaucaacgccagcguggugaacauccagaaggagaucgaccgccugaacgaggucgccaagaaccucaacgagucccugaucgaccugcaggagcucgggaaguacgagcaguacaucaaguggccgugguacaucuggcugggcuucaucgccggccugaucgcgaucgugauggugaccaucaugcucugcugcaugaccagcugcugcuccugccugaaggggugcugcagcugcggcuccugcugcaaguucgacgaggacgacagcgagcccguccugaagggggugaagcuccacuacacgugaggacuaguuauaagacugacuagcccgaugggccucccaacgggcccuccuccccuccuugcaccgagauuaaucaaaggcucuuuucagagccaccaaaaaaaaaaaaaaaaaaaaaaaaaaaaaaaaaaaaaaaaaaaaaaaaaaaaaaaaaaaaaaaaaaaaaaaaaaaaaaaaaaaaaaaaaaaaaaaaaaaaa

SEQ ID NO: 24080 - RNA, 4029 nt, Artificial Sequence
  SARS-CoV-2/Wuhan/WIV05/2019__EPI_ISL_402128 spike protein mRNA gc (1-1273)(H69del_V70del_Y453F_D614G_I692V_M1229I)
aggagaaagcuuaccauguucguguuccugguccuccugccccuggugagcucccagugcgugaaccucaccacccgcacgcagcugccgcccgccuacaccaacagcuucacccggggcgucuacuaccccgacaagguguuccgcuccagcgugcugcacuccacccaggaccucuuccugcccuucuucagcaacgucacgugguuccacgccaucuccgggaccaacggcaccaagcgguucgacaacccggugcugcccuucaacgacggggucuacuucgcgagcaccgagaaguccaacaucauccgcggcuggaucuucgggacgacccucgacagcaagacccagucccugcugaucgugaacaacgccaccaacguggucaucaaggugugcgaguuccaguucugcaacgaccccuuccucggcguguacuaccacaagaacaacaagagcuggauggaguccgaguuccgggucuacagcuccgccaacaacugcacguucgaguacgugagccagcccuuccugauggaccuggagggcaagcaggggaacuucaagaaccuccgcgaguucguguucaagaacaucgacggcuacuucaagaucuacuccaagcacaccccgaucaaccugguccgggaccugccccagggguucagcgcccucgagccccugguggaccugcccaucggcaucaacaucacccgcuuccagacccuccuggcccugcaccgguccuaccucacgccgggggacagcagcuccggcuggaccgcgggcgccgccgccuacuacgugggguaccugcagccccgcaccuuccugcucaaguacaacgagaacggcaccaucacggacgcggucgacugcgcccuggacccccugagcgagaccaagugcacccucaaguccuucaccguggagaaggggaucuaccagacgagcaacuuccgggugcagcccaccgaguccaucguccgcuucccgaacaucaccaaccugugccccuucggcgagguguucaacgccacccgguucgccagcgucuacgccuggaaccgcaagcggaucuccaacugcguggcggacuacagcgugcuguacaacuccgccagcuucuccacguucaagugcuacggcgucagccccaccaagcucaacgaccugugcuucaccaacguguacgccgacuccuucgugauccgcggggacgagguccggcagaucgcccccggccagaccgggaagaucgccgacuacaacuacaagcugccggacgacuucacgggcugcgugaucgcguggaacagcaacaaccucgacuccaaggucgggggcaacuacaacuaccuguuccgccuguuccgcaagagcaaccucaagcccuucgagcgggacaucuccaccgagaucuaccaggccggcagcacccccugcaacgggguggagggcuucaacugcuacuucccccugcaguccuacggguuccagccgaccaacggcgugggguaccagcccuaccggguggucgugcugagcuucgagcuccugcacgcccccgccacggugugcggccccaagaaguccaccaaccuggucaagaacaagugcgugaacuucaacuucaacggccucaccgggaccggcgugcugaccgagagcaacaagaaguuccugccguuccagcaguucgggcgcgacaucgccgacacgaccgacgcgguccgcgacccccagacccuggagauccucgacaucacccccugcagcuucggcgggguguccgugaucacgccgggcaccaacaccagcaaccaggucgccgugcuguaccagggcgugaacugcaccgagguccccguggccauccacgccgaccagcugacgcccaccuggcggguguacuccaccggcagcaacgucuuccagacccgcgccgggugccucaucggcgcggagcacgugaacaacuccuacgagugcgacauccccaucggggccggcaucugcgccagcuaccagacgcagaccaacuccccgcggcgcgcccggagcguggcgucccagagcgugaucgccuacaccaugucccugggcgccgagaacagcgucgccuacuccaacaacagcaucgccauccccaccaacuucacgaucuccgugaccaccgagauccugcccgugagcaugaccaagacgagcgucgacugcaccauguacaucugcggggacuccaccgagugcagcaaccuccugcugcaguacggcuccuucugcacccagcucaaccgcgcgcugacggggaucgccguggagcaggacaagaacacccaggagguguucgcccaggucaagcagaucuacaagacgcccccgaucaaggacuucggcggguucaacuucagccagauccugcccgaccccuccaagcccagcaagcgguccuucaucgaggaccuccuguucaacaaggugacccuggccgacgccggcuucaucaagcaguacggcgacugccucggggacaucgcggcccgcgaccugaucugcgcccagaaguucaacggccugaccgugcucccgccccugcugaccgacgagaugaucgcccaguacaccagcgcccuccuggcggggaccaucacguccggcuggaccuucggggccggcgccgcccugcagauccccuucgcgaugcagauggccuaccgguucaacggcaucggggucacccagaacgugcucuacgagaaccagaagcugaucgccaaccaguucaacagcgccaucggcaagauccaggacucccugagcuccaccgccagcgcgcucgggaagcugcaggacguggucaaccagaacgcccaggcccugaacacgcucgugaagcagcuguccagcaacuucggcgccaucuccagcgugcugaacgacauccucucccgccuggacaaggucgaggccgaggugcagaucgaccggcugaucaccgggcgccuccagagccugcagaccuacgugacccagcagcugauccgggcggccgagauccgcgccagcgccaaccucgccgcgaccaagauguccgagugcguccugggccagagcaagcggguggacuucugcggcaagggguaccaccugauguccuucccccagagcgccccgcacggcguggucuuccuccacgugacguacguccccgcccaggagaagaacuucaccaccgcccccgcgaucugccacgacgggaaggcccacuucccccgcgagggcguguucguguccaacgggacccacugguucgucacgcagcggaacuucuacgagccgcagaucaucaccaccgacaacaccuucgugagcggcaacugcgacguggucaucggcaucgugaacaacacgguguacgacccccugcagcccgagcuggacuccuucaaggaggagcucgacaaguacuucaagaaccacaccagccccgacgucgaccugggggacaucuccggcaucaacgccagcguggugaacauccagaaggagaucgaccgccugaacgaggucgccaagaaccucaacgagucccugaucgaccugcaggagcucgggaaguacgagcaguacaucaaguggccgugguacaucuggcugggcuucaucgccggccugaucgcgaucgugaucgugaccaucaugcucugcugcaugaccagcugcugcuccugccugaaggggugcugcagcugcggcuccugcugcaaguucgacgaggacgacagcgagcccguccugaagggggugaagcuccacuacacgugaggacuaguuauaagacugacuagcccgaugggccucccaacgggcccuccuccccuccuugcaccgagauuaaucaaaggcucuuuucagagccaccaaaaaaaaaaaaaaaaaaaaaaaaaaaaaaaaaaaaaaaaaaaaaaaaaaaaaaaaaaaaaaaaaaaaaaaaaaaaaaaaaaaaaaaaaaaaaaaaaaaaa

SEQ ID NO: 24081 - RNA, 4026 nt, Artificial Sequence
  SARS-CoV-2/Wuhan/WIV05/2019__EPI_ISL_402128 spike protein mRNA gc (1-1273)(H69del_V70del_Y144del_N501Y_A570D_D614G_P681H_T716I_S982 A_D1118H)
aggagaaagcuuaccauguucguguuccugguccuccugccccuggugagcucccagugcgugaaccucaccacccgcacgcagcugccgcccgccuacaccaacagcuucacccggggcgucuacuaccccgacaagguguuccgcuccagcgugcugcacuccacccaggaccucuuccugcccuucuucagcaacgucacgugguuccacgccaucuccgggaccaacggcaccaagcgguucgacaacccggugcugcccuucaacgacggggucuacuucgcgagcaccgagaaguccaacaucauccgcggcuggaucuucgggacgacccucgacagcaagacccagucccugcugaucgugaacaacgccaccaacguggucaucaaggugugcgaguuccaguucugcaacgaccccuuccucggcguguaccacaagaacaacaagagcuggauggaguccgaguuccgggucuacagcuccgccaacaacugcacguucgaguacgugagccagcccuuccugauggaccuggagggcaagcaggggaacuucaagaaccuccgcgaguucguguucaagaacaucgacggcuacuucaagaucuacuccaagcacaccccgaucaaccugguccgggaccugccccagggguucagcgcccucgagccccugguggaccugcccaucggcaucaacaucacccgcuuccagacccuccuggcccugcaccgguccuaccucacgccgggggacagcagcuccggcuggaccgcgggcgccgccgccuacuacgugggguaccugcagccccgcaccuuccugcucaaguacaacgagaacggcaccaucacggacgcggucgacugcgcccuggacccccugagcgagaccaagugcacccucaaguccuucaccguggagaaggggaucuaccagacgagcaacuuccgggugcagcccaccgaguccaucguccgcuucccgaacaucaccaaccugugccccuucggcgagguguucaacgccacccgguucgccagcgucuacgccuggaaccgcaagcggaucuccaacugcguggcggacuacagcgugcuguacaacuccgccagcuucuccacguucaagugcuacggcgucagccccaccaagcucaacgaccugugcuucaccaacguguacgccgacuccuucgugauccgcggggacgagguccggcagaucgcccccggccagaccgggaagaucgccgacuacaacuacaagcugccggacgacuucacgggcugcgugaucgcguggaacagcaacaaccucgacuccaaggucgggggcaacuacaacuaccuguaccgccuguuccgcaagagcaaccucaagcccuucgagcgggacaucuccaccgagaucuaccaggccggcagcacccccugcaacgggguggagggcuucaacugcuacuucccccugcaguccuacggguuccagccgaccuacggcgugggguaccagcccuaccggguggucgugcugagcuucgagcuccugcacgcccccgccacggugugcggccccaagaaguccaccaaccuggucaagaacaagugcgugaacuucaacuucaacggccucaccgggaccggcgugcugaccgagagcaacaagaaguuccugccguuccagcaguucgggcgcgacaucgacgacacgaccgacgcgguccgcgacccccagacccuggagauccucgacaucacccccugcagcuucggcgggguguccgugaucacgccgggcaccaacaccagcaaccaggucgccgugcuguaccagggcgugaacugcaccgagguccccguggccauccacgccgaccagcugacgcccaccuggcggguguacuccaccggcagcaacgucuuccagacccgcgccgggugccucaucggcgcggagcacgugaacaacuccuacgagugcgacauccccaucggggccggcaucugcgccagcuaccagacgcagaccaacucccaccggcgcgcccggagcguggcgucccagagcaucaucgccuacaccaugucccugggcgccgagaacagcgucgccuacuccaacaacagcaucgccauccccaucaacuucacgaucuccgugaccaccgagauccugcccgugagcaugaccaagacgagcgucgacugcaccauguacaucugcggggacuccaccgagugcagcaaccuccugcugcaguacggcuccuucugcacccagcucaaccgcgcgcugacggggaucgccguggagcaggacaagaacacccaggagguguucgcccaggucaagcagaucuacaagacgcccccgaucaaggacuucggcggguucaacuucagccagauccugcccgaccccuccaagcccagcaagcgguccuucaucgaggaccuccuguucaacaaggugacccuggccgacgccggcuucaucaagcaguacggcgacugccucggggacaucgcggcccgcgaccugaucugcgcccagaaguucaacggccugaccgugcucccgccccugcugaccgacgagaugaucgcccaguacaccagcgcccuccuggcggggaccaucacguccggcuggaccuucggggccggcgccgcccugcagauccccuucgcgaugcagauggccuaccgguucaacggcaucggggucacccagaacgugcucuacgagaaccagaagcugaucgccaaccaguucaacagcgccaucggcaagauccaggacucccugagcuccaccgccagcgcgcucgggaagcugcaggacguggucaaccagaacgcccaggcccugaacacgcucgugaagcagcuguccagcaacuucggcgccaucuccagcgugcugaacgacauccucgcccgccuggacaaggucgaggccgaggugcagaucgaccggcugaucaccgggcgccuccagagccugcagaccuacgugacccagcagcugauccgggcggccgagauccgcgccagcgccaaccucgccgcgaccaagauguccgagugcguccugggccagagcaagcggguggacuucugcggcaagggguaccaccugauguccuucccccagagcgccccgcacggcguggucuuccuccacgugacguacguccccgcccaggagaagaacuucaccaccgcccccgcgaucugccacgacgggaaggcccacuucccccgcgagggcguguucguguccaacgggacccacugguucgucacgcagcggaacuucuacgagccgcagaucaucaccacccacaacaccuucgugagcggcaacugcgacguggucaucggcaucgugaacaacacgguguacgacccccugcagcccgagcuggacuccuucaaggaggagcucgacaaguacuucaagaaccacaccagccccgacgucgaccugggggacaucuccggcaucaacgccagcguggugaacauccagaaggagaucgaccgccugaacgaggucgccaagaaccucaacgagucccugaucgaccugcaggagcucgggaaguacgagcaguacaucaaguggccgugguacaucuggcugggcuucaucgccggccugaucgcgaucgugauggugaccaucaugcucugcugcaugaccagcugcugcuccugccugaaggggugcugcagcugcggcuccugcugcaaguucgacgaggacgacagcgagcccguccugaagggggugaagcuccacuacacgugaggacuaguuauaagacugacuagcccgaugggccucccaacgggcccuccuccccuccuugcaccgagauuaaucaaaggcucuuuucagagccaccaaaaaaaaaaaaaaaaaaaaaaaaaaaaaaaaaaaaaaaaaaaaaaaaaaaaaaaaaaaaaaaaaaaaaaaaaaaaaaaaaaaaaaaaaaaaaaaaaaaaa

SEQ ID NO: 24082 - RNA, 4035 nt, Artificial Sequence
  SARS-CoV-2/Wuhan/WIV05/2019__EPI_ISL_402128 spike protein mRNA gc (1-1273)(K417N_E484K_N501Y_D614G)
aggagaaagcuuaccauguucguguuccugguccuccugccccuggugagcucccagugcgugaaccucaccacccgcacgcagcugccgcccgccuacaccaacagcuucacccggggcgucuacuaccccgacaagguguuccgcuccagcgugcugcacuccacccaggaccucuuccugcccuucuucagcaacgucacgugguuccacgccauccacguguccgggaccaacggcaccaagcgguucgacaacccggugcugcccuucaacgacggggucuacuucgcgagcaccgagaaguccaacaucauccgcggcuggaucuucgggacgacccucgacagcaagacccagucccugcugaucgugaacaacgccaccaacguggucaucaaggugugcgaguuccaguucugcaacgaccccuuccucggcguguacuaccacaagaacaacaagagcuggauggaguccgaguuccgggucuacagcuccgccaacaacugcacguucgaguacgugagccagcccuuccugauggaccuggagggcaagcaggggaacuucaagaaccuccgcgaguucguguucaagaacaucgacggcuacuucaagaucuacuccaagcacaccccgaucaaccugguccgggaccugccccagggguucagcgcccucgagccccugguggaccugcccaucggcaucaacaucacccgcuuccagacccuccuggcccugcaccgguccuaccucacgccgggggacagcagcuccggcuggaccgcgggcgccgccgccuacuacgugggguaccugcagccccgcaccuuccugcucaaguacaacgagaacggcaccaucacggacgcggucgacugcgcccuggacccccugagcgagaccaagugcacccucaaguccuucaccguggagaaggggaucuaccagacgagcaacuuccgggugcagcccaccgaguccaucguccgcuucccgaacaucaccaaccugugccccuucggcgagguguucaacgccacccgguucgccagcgucuacgccuggaaccgcaagcggaucuccaacugcguggcggacuacagcgugcuguacaacuccgccagcuucuccacguucaagugcuacggcgucagccccaccaagcucaacgaccugugcuucaccaacguguacgccgacuccuucgugauccgcggggacgagguccggcagaucgcccccggccagaccgggaacaucgccgacuacaacuacaagcugccggacgacuucacgggcugcgugaucgcguggaacagcaacaaccucgacuccaaggucgggggcaacuacaacuaccuguaccgccuguuccgcaagagcaaccucaagcccuucgagcgggacaucuccaccgagaucuaccaggccggcagcacccccugcaacggggugaagggcuucaacugcuacuucccccugcaguccuacggguuccagccgaccuacggcgugggguaccagcccuaccggguggucgugcugagcuucgagcuccugcacgcccccgccacggugugcggccccaagaaguccaccaaccuggucaagaacaagugcgugaacuucaacuucaacggccucaccgggaccggcgugcugaccgagagcaacaagaaguuccugccguuccagcaguucgggcgcgacaucgccgacacgaccgacgcgguccgcgacccccagacccuggagauccucgacaucacccccugcagcuucggcgggguguccgugaucacgccgggcaccaacaccagcaaccaggucgccgugcuguaccagggcgugaacugcaccgagguccccguggccauccacgccgaccagcugacgcccaccuggcggguguacuccaccggcagcaacgucuuccagacccgcgccgggugccucaucggcgcggagcacgugaacaacuccuacgagugcgacauccccaucggggccggcaucugcgccagcuaccagacgcagaccaacuccccgcggcgcgcccggagcguggcgucccagagcaucaucgccuacaccaugucccugggcgccgagaacagcgucgccuacuccaacaacagcaucgccauccccaccaacuucacgaucuccgugaccaccgagauccugcccgugagcaugaccaagacgagcgucgacugcaccauguacaucugcggggacuccaccgagugcagcaaccuccugcugcaguacggcuccuucugcacccagcucaaccgcgcgcugacggggaucgccguggagcaggacaagaacacccaggagguguucgcccaggucaagcagaucuacaagacgcccccgaucaaggacuucggcggguucaacuucagccagauccugcccgaccccuccaagcccagcaagcgguccuucaucgaggaccuccuguucaacaaggugacccuggccgacgccggcuucaucaagcaguacggcgacugccucggggacaucgcggcccgcgaccugaucugcgcccagaaguucaacggccugaccgugcucccgccccugcugaccgacgagaugaucgcccaguacaccagcgcccuccuggcggggaccaucacguccggcuggaccuucggggccggcgccgcccugcagauccccuucgcgaugcagauggccuaccgguucaacggcaucggggucacccagaacgugcucuacgagaaccagaagcugaucgccaaccaguucaacagcgccaucggcaagauccaggacucccugagcuccaccgccagcgcgcucgggaagcugcaggacguggucaaccagaacgcccaggcccugaacacgcucgugaagcagcuguccagcaacuucggcgccaucuccagcgugcugaacgacauccucucccgccuggacaaggucgaggccgaggugcagaucgaccggcugaucaccgggcgccuccagagccugcagaccuacgugacccagcagcugauccgggcggccgagauccgcgccagcgccaaccucgccgcgaccaagauguccgagugcguccugggccagagcaagcggguggacuucugcggcaagggguaccaccugauguccuucccccagagcgccccgcacggcguggucuuccuccacgugacguacguccccgcccaggagaagaacuucaccaccgcccccgcgaucugccacgacgggaaggcccacuucccccgcgagggcguguucguguccaacgggacccacugguucgucacgcagcggaacuucuacgagccgcagaucaucaccaccgacaacaccuucgugagcggcaacugcgacguggucaucggcaucgugaacaacacgguguacgacccccugcagcccgagcuggacuccuucaaggaggagcucgacaaguacuucaagaaccacaccagccccgacgucgaccugggggacaucuccggcaucaacgccagcguggugaacauccagaaggagaucgaccgccugaacgaggucgccaagaaccucaacgagucccugaucgaccugcaggagcucgggaaguacgagcaguacaucaaguggccgugguacaucuggcugggcuucaucgccggccugaucgcgaucgugauggugaccaucaugcucugcugcaugaccagcugcugcuccugccugaaggggugcugcagcugcggcuccugcugcaaguucgacgaggacgacagcgagcccguccugaagggggugaagcuccacuacacgugaggacuaguuauaagacugacuagcccgaugggccucccaacgggcccuccuccccuccuugcaccgagauuaaucaaaggcucuuuucagagccaccaaaaaaaaaaaaaaaaaaaaaaaaaaaaaaaaaaaaaaaaaaaaaaaaaaaaaaaaaaaaaaaaaaaaaaaaaaaaaaaaaaaaaaaaaaaaaaaaaaaaa

SEQ ID NO: 24083 - RNA, 4026 nt, Artificial Sequence
  SARS-CoV-2/Wuhan/WIV05/2019__EPI_ISL_402128 spike protein mRNA gc (1-1273)(L18F_D80A_D215G_L242del_A243del_L244del_R246I_K417N_E484 K_N501Y_D614G_A701V)
aggagaaagcuuaccauguucguguuccugguccuccugccccuggugagcucccagugcgugaacuucaccacccgcacgcagcugccgcccgccuacaccaacagcuucacccggggcgucuacuaccccgacaagguguuccgcuccagcgugcugcacuccacccaggaccucuuccugcccuucuucagcaacgucacgugguuccacgccauccacguguccgggaccaacggcaccaagcgguucgccaacccggugcugcccuucaacgacggggucuacuucgcgagcaccgagaaguccaacaucauccgcggcuggaucuucgggacgacccucgacagcaagacccagucccugcugaucgugaacaacgccaccaacguggucaucaaggugugcgaguuccaguucugcaacgaccccuuccucggcguguacuaccacaagaacaacaagagcuggauggaguccgaguuccgggucuacagcuccgccaacaacugcacguucgaguacgugagccagcccuuccugauggaccuggagggcaagcaggggaacuucaagaaccuccgcgaguucguguucaagaacaucgacggcuacuucaagaucuacuccaagcacaccccgaucaaccugguccggggccugccccagggguucagcgcccucgagccccugguggaccugcccaucggcaucaacaucacccgcuuccagacccuccacaucuccuaccucacgccgggggacagcagcuccggcuggaccgcgggcgccgccgccuacuacgugggguaccugcagccccgcaccuuccugcucaaguacaacgagaacggcaccaucacggacgcggucgacugcgcccuggacccccugagcgagaccaagugcacccucaaguccuucaccguggagaaggggaucuaccagacgagcaacuuccgggugcagcccaccgaguccaucguccgcuucccgaacaucaccaaccugugccccuucggcgagguguucaacgccacccgguucgccagcgucuacgccuggaaccgcaagcggaucuccaacugcguggcggacuacagcgugcuguacaacuccgccagcuucuccacguucaagugcuacggcgucagccccaccaagcucaacgaccugugcuucaccaacguguacgccgacuccuucgugauccgcggggacgagguccggcagaucgcccccggccagaccgggaacaucgccgacuacaacuacaagcugccggacgacuucacgggcugcgugaucgcguggaacagcaacaaccucgacuccaaggucgggggcaacuacaacuaccuguaccgccuguuccgcaagagcaaccucaagcccuucgagcgggacaucuccaccgagaucuaccaggccggcagcacccccugcaacggggugaagggcuucaacugcuacuucccccugcaguccuacggguuccagccgaccuacggcgugggguaccagcccuaccggguggucgugcugagcuucgagcuccugcacgcccccgccacggugugcggccccaagaaguccaccaaccuggucaagaacaagugcgugaacuucaacuucaacggccucaccgggaccggcgugcugaccgagagcaacaagaaguuccugccguuccagcaguucgggcgcgacaucgccgacacgaccgacgcgguccgcgacccccagacccuggagauccucgacaucacccccugcagcuucggcgggguguccgugaucacgccgggcaccaacaccagcaaccaggucgccgugcuguaccagggcgugaacugcaccgagguccccguggccauccacgccgaccagcugacgcccaccuggcggguguacuccaccggcagcaacgucuuccagacccgcgccgggugccucaucggcgcggagcacgugaacaacuccuacgagugcgacauccccaucggggccggcaucugcgccagcuaccagacgcagaccaacuccccgcggcgcgcccggagcguggcgucccagagcaucaucgccuacaccaugucccugggcguggagaacagcgucgccuacuccaacaacagcaucgccauccccaccaacuucacgaucuccgugaccaccgagauccugcccgugagcaugaccaagacgagcgucgacugcaccauguacaucugcggggacuccaccgagugcagcaaccuccugcugcaguacggcuccuucugcacccagcucaaccgcgcgcugacggggaucgccguggagcaggacaagaacacccaggagguguucgcccaggucaagcagaucuacaagacgcccccgaucaaggacuucggcggguucaacuucagccagauccugcccgaccccuccaagcccagcaagcgguccuucaucgaggaccuccuguucaacaaggugacccuggccgacgccggcuucaucaagcaguacggcgacugccucggggacaucgcggcccgcgaccugaucugcgcccagaaguucaacggccugaccgugcucccgccccugcugaccgacgagaugaucgcccaguacaccagcgcccuccuggcggggaccaucacguccggcuggaccuucggggccggcgccgcccugcagauccccuucgcgaugcagauggccuaccgguucaacggcaucggggucacccagaacgugcucuacgagaaccagaagcugaucgccaaccaguucaacagcgccaucggcaagauccaggacucccugagcuccaccgccagcgcgcucgggaagcugcaggacguggucaaccagaacgcccaggcccugaacacgcucgugaagcagcuguccagcaacuucggcgccaucuccagcgugcugaacgacauccucucccgccuggacaaggucgaggccgaggugcagaucgaccggcugaucaccgggcgccuccagagccugcagaccuacgugacccagcagcugauccgggcggccgagauccgcgccagcgccaaccucgccgcgaccaagauguccgagugcguccugggccagagcaagcggguggacuucugcggcaagggguaccaccugauguccuucccccagagcgccccgcacggcguggucuuccuccacgugacguacguccccgcccaggagaagaacuucaccaccgcccccgcgaucugccacgacgggaaggcccacuucccccgcgagggcguguucguguccaacgggacccacugguucgucacgcagcggaacuucuacgagccgcagaucaucaccaccgacaacaccuucgugagcggcaacugcgacguggucaucggcaucgugaacaacacgguguacgacccccugcagcccgagcuggacuccuucaaggaggagcucgacaaguacuucaagaaccacaccagccccgacgucgaccugggggacaucuccggcaucaacgccagcguggugaacauccagaaggagaucgaccgccugaacgaggucgccaagaaccucaacgagucccugaucgaccugcaggagcucgggaaguacgagcaguacaucaaguggccgugguacaucuggcugggcuucaucgccggccugaucgcgaucgugauggugaccaucaugcucugcugcaugaccagcugcugcuccugccugaaggggugcugcagcugcggcuccugcugcaaguucgacgaggacgacagcgagcccguccugaagggggugaagcuccacuacacgugaggacuaguuauaagacugacuagcccgaugggccucccaacgggcccuccuccccuccuugcaccgagauuaaucaaaggcucuuuucagagccaccaaaaaaaaaaaaaaaaaaaaaaaaaaaaaaaaaaaaaaaaaaaaaaaaaaaaaaaaaaaaaaaaaaaaaaaaaaaaaaaaaaaaaaaaaaaaaaaaaaaaa

SEQ ID NO: 24084 - RNA, 4035 nt, Artificial Sequence
  SARS-CoV-2/Wuhan/WIV05/2019__EPI_ISL_402128 spike protein mRNA gc (1-1273)(E484K_D614G)
aggagaaagcuuaccauguucguguuccugguccuccugccccuggugagcucccagugcgugaaccucaccacccgcacgcagcugccgcccgccuacaccaacagcuucacccggggcgucuacuaccccgacaagguguuccgcuccagcgugcugcacuccacccaggaccucuuccugcccuucuucagcaacgucacgugguuccacgccauccacguguccgggaccaacggcaccaagcgguucgacaacccggugcugcccuucaacgacggggucuacuucgcgagcaccgagaaguccaacaucauccgcggcuggaucuucgggacgacccucgacagcaagacccagucccugcugaucgugaacaacgccaccaacguggucaucaaggugugcgaguuccaguucugcaacgaccccuuccucggcguguacuaccacaagaacaacaagagcuggauggaguccgaguuccgggucuacagcuccgccaacaacugcacguucgaguacgugagccagcccuuccugauggaccuggagggcaagcaggggaacuucaagaaccuccgcgaguucguguucaagaacaucgacggcuacuucaagaucuacuccaagcacaccccgaucaaccugguccgggaccugccccagggguucagcgcccucgagccccugguggaccugcccaucggcaucaacaucacccgcuuccagacccuccuggcccugcaccgguccuaccucacgccgggggacagcagcuccggcuggaccgcgggcgccgccgccuacuacgugggguaccugcagccccgcaccuuccugcucaaguacaacgagaacggcaccaucacggacgcggucgacugcgcccuggacccccugagcgagaccaagugcacccucaaguccuucaccguggagaaggggaucuaccagacgagcaacuuccgggugcagcccaccgaguccaucguccgcuucccgaacaucaccaaccugugccccuucggcgagguguucaacgccacccgguucgccagcgucuacgccuggaaccgcaagcggaucuccaacugcguggcggacuacagcgugcuguacaacuccgccagcuucuccacguucaagugcuacggcgucagccccaccaagcucaacgaccugugcuucaccaacguguacgccgacuccuucgugauccgcggggacgagguccggcagaucgcccccggccagaccgggaagaucgccgacuacaacuacaagcugccggacgacuucacgggcugcgugaucgcguggaacagcaacaaccucgacuccaaggucgggggcaacuacaacuaccuguaccgccuguuccgcaagagcaaccucaagcccuucgagcgggacaucuccaccgagaucuaccaggccggcagcacccccugcaacggggugaagggcuucaacugcuacuucccccugcaguccuacggguuccagccgaccaacggcgugggguaccagcccuaccggguggucgugcugagcuucgagcuccugcacgcccccgccacggugugcggccccaagaaguccaccaaccuggucaagaacaagugcgugaacuucaacuucaacggccucaccgggaccggcgugcugaccgagagcaacaagaaguuccugccguuccagcaguucgggcgcgacaucgccgacacgaccgacgcgguccgcgacccccagacccuggagauccucgacaucacccccugcagcuucggcgggguguccgugaucacgccgggcaccaacaccagcaaccaggucgccgugcuguaccagggcgugaacugcaccgagguccccguggccauccacgccgaccagcugacgcccaccuggcggguguacuccaccggcagcaacgucuuccagacccgcgccgggugccucaucggcgcggagcacgugaacaacuccuacgagugcgacauccccaucggggccggcaucugcgccagcuaccagacgcagaccaacuccccgcggcgcgcccggagcguggcgucccagagcaucaucgccuacaccaugucccugggcgccgagaacagcgucgccuacuccaacaacagcaucgccauccccaccaacuucacgaucuccgugaccaccgagauccugcccgugagcaugaccaagacgagcgucgacugcaccauguacaucugcggggacuccaccgagugcagcaaccuccugcugcaguacggcuccuucugcacccagcucaaccgcgcgcugacggggaucgccguggagcaggacaagaacacccaggagguguucgcccaggucaagcagaucuacaagacgcccccgaucaaggacuucggcggguucaacuucagccagauccugcccgaccccuccaagcccagcaagcgguccuucaucgaggaccuccuguucaacaaggugacccuggccgacgccggcuucaucaagcaguacggcgacugccucggggacaucgcggcccgcgaccugaucugcgcccagaaguucaacggccugaccgugcucccgccccugcugaccgacgagaugaucgcccaguacaccagcgcccuccuggcggggaccaucacguccggcuggaccuucggggccggcgccgcccugcagauccccuucgcgaugcagauggccuaccgguucaacggcaucggggucacccagaacgugcucuacgagaaccagaagcugaucgccaaccaguucaacagcgccaucggcaagauccaggacucccugagcuccaccgccagcgcgcucgggaagcugcaggacguggucaaccagaacgcccaggcccugaacacgcucgugaagcagcuguccagcaacuucggcgccaucuccagcgugcugaacgacauccucucccgccuggacaaggucgaggccgaggugcagaucgaccggcugaucaccgggcgccuccagagccugcagaccuacgugacccagcagcugauccgggcggccgagauccgcgccagcgccaaccucgccgcgaccaagauguccgagugcguccugggccagagcaagcggguggacuucugcggcaagggguaccaccugauguccuucccccagagcgccccgcacggcguggucuuccuccacgugacguacguccccgcccaggagaagaacuucaccaccgcccccgcgaucugccacgacgggaaggcccacuucccccgcgagggcguguucguguccaacgggacccacugguucgucacgcagcggaacuucuacgagccgcagaucaucaccaccgacaacaccuucgugagcggcaacugcgacguggucaucggcaucgugaacaacacgguguacgacccccugcagcccgagcuggacuccuucaaggaggagcucgacaaguacuucaagaaccacaccagccccgacgucgaccugggggacaucuccggcaucaacgccagcguggugaacauccagaaggagaucgaccgccugaacgaggucgccaagaaccucaacgagucccugaucgaccugcaggagcucgggaaguacgagcaguacaucaaguggccgugguacaucuggcugggcuucaucgccggccugaucgcgaucgugauggugaccaucaugcucugcugcaugaccagcugcugcuccugccugaaggggugcugcagcugcggcuccugcugcaaguucgacgaggacgacagcgagcccguccugaagggggugaagcuccacuacacgugaggacuaguuauaagacugacuagcccgaugggccucccaacgggcccuccuccccuccuugcaccgagauuaaucaaaggcucuuuucagagccaccaaaaaaaaaaaaaaaaaaaaaaaaaaaaaaaaaaaaaaaaaaaaaaaaaaaaaaaaaaaaaaaaaaaaaaaaaaaaaaaaaaaaaaaaaaaaaaaaaaaaa

SEQ ID NO: 24085 - RNA, 4035 nt, Artificial Sequence
  SARS-CoV-2/Wuhan/WIV05/2019__EPI_ISL_402128 spike protein mRNA gc (1-1273)(L18F_T20N_P26S_D138Y_R190S_K417T_E484K_N501Y_D614G_H655Y _T1027I)
aggagaaagcuuaccauguucguguuccugguccuccugccccuggugagcucccagugcgugaacuucaccaaccgcacgcagcugccgagcgccuacaccaacagcuucacccggggcgucuacuaccccgacaagguguuccgcuccagcgugcugcacuccacccaggaccucuuccugcccuucuucagcaacgucacgugguuccacgccauccacguguccgggaccaacggcaccaagcgguucgacaacccggugcugcccuucaacgacggggucuacuucgcgagcaccgagaaguccaacaucauccgcggcuggaucuucgggacgacccucgacagcaagacccagucccugcugaucgugaacaacgccaccaacguggucaucaaggugugcgaguuccaguucugcaacuaccccuuccucggcguguacuaccacaagaacaacaagagcuggauggaguccgaguuccgggucuacagcuccgccaacaacugcacguucgaguacgugagccagcccuuccugauggaccuggagggcaagcaggggaacuucaagaaccucagcgaguucguguucaagaacaucgacggcuacuucaagaucuacuccaagcacaccccgaucaaccugguccgggaccugccccagggguucagcgcccucgagccccugguggaccugcccaucggcaucaacaucacccgcuuccagacccuccuggcccugcaccgguccuaccucacgccgggggacagcagcuccggcuggaccgcgggcgccgccgccuacuacgugggguaccugcagccccgcaccuuccugcucaaguacaacgagaacggcaccaucacggacgcggucgacugcgcccuggacccccugagcgagaccaagugcacccucaaguccuucaccguggagaaggggaucuaccagacgagcaacuuccgggugcagcccaccgaguccaucguccgcuucccgaacaucaccaaccugugccccuucggcgagguguucaacgccacccgguucgccagcgucuacgccuggaaccgcaagcggaucuccaacugcguggcggacuacagcgugcuguacaacuccgccagcuucuccacguucaagugcuacggcgucagccccaccaagcucaacgaccugugcuucaccaacguguacgccgacuccuucgugauccgcggggacgagguccggcagaucgcccccggccagaccgggaccaucgccgacuacaacuacaagcugccggacgacuucacgggcugcgugaucgcguggaacagcaacaaccucgacuccaaggucgggggcaacuacaacuaccuguaccgccuguuccgcaagagcaaccucaagcccuucgagcgggacaucuccaccgagaucuaccaggccggcagcacccccugcaacggggugaagggcuucaacugcuacuucccccugcaguccuacggguuccagccgaccuacggcgugggguaccagcccuaccggguggucgugcugagcuucgagcuccugcacgcccccgccacggugugcggccccaagaaguccaccaaccuggucaagaacaagugcgugaacuucaacuucaacggccucaccgggaccggcgugcugaccgagagcaacaagaaguuccugccguuccagcaguucgggcgcgacaucgccgacacgaccgacgcgguccgcgacccccagacccuggagauccucgacaucacccccugcagcuucggcgggguguccgugaucacgccgggcaccaacaccagcaaccaggucgccgugcuguaccagggcgugaacugcaccgagguccccguggccauccacgccgaccagcugacgcccaccuggcggguguacuccaccggcagcaacgucuuccagacccgcgccgggugccucaucggcgcggaguacgugaacaacuccuacgagugcgacauccccaucggggccggcaucugcgccagcuaccagacgcagaccaacuccccgcggcgcgcccggagcguggcgucccagagcaucaucgccuacaccaugucccugggcgccgagaacagcgucgccuacuccaacaacagcaucgccauccccaccaacuucacgaucuccgugaccaccgagauccugcccgugagcaugaccaagacgagcgucgacugcaccauguacaucugcggggacuccaccgagugcagcaaccuccugcugcaguacggcuccuucugcacccagcucaaccgcgcgcugacggggaucgccguggagcaggacaagaacacccaggagguguucgcccaggucaagcagaucuacaagacgcccccgaucaaggacuucggcggguucaacuucagccagauccugcccgaccccuccaagcccagcaagcgguccuucaucgaggaccuccuguucaacaaggugacccuggccgacgccggcuucaucaagcaguacggcgacugccucggggacaucgcggcccgcgaccugaucugcgcccagaaguucaacggccugaccgugcucccgccccugcugaccgacgagaugaucgcccaguacaccagcgcccuccuggcggggaccaucacguccggcuggaccuucggggccggcgccgcccugcagauccccuucgcgaugcagauggccuaccgguucaacggcaucggggucacccagaacgugcucuacgagaaccagaagcugaucgccaaccaguucaacagcgccaucggcaagauccaggacucccugagcuccaccgccagcgcgcucgggaagcugcaggacguggucaaccagaacgcccaggcccugaacacgcucgugaagcagcuguccagcaacuucggcgccaucuccagcgugcugaacgacauccucucccgccuggacaaggucgaggccgaggugcagaucgaccggcugaucaccgggcgccuccagagccugcagaccuacgugacccagcagcugauccgggcggccgagauccgcgccagcgccaaccucgccgcgaucaagauguccgagugcguccugggccagagcaagcggguggacuucugcggcaagggguaccaccugauguccuucccccagagcgccccgcacggcguggucuuccuccacgugacguacguccccgcccaggagaagaacuucaccaccgcccccgcgaucugccacgacgggaaggcccacuucccccgcgagggcguguucguguccaacgggacccacugguucgucacgcagcggaacuucuacgagccgcagaucaucaccaccgacaacaccuucgugagcggcaacugcgacguggucaucggcaucgugaacaacacgguguacgacccccugcagcccgagcuggacuccuucaaggaggagcucgacaaguacuucaagaaccacaccagccccgacgucgaccugggggacaucuccggcaucaacgccagcguggugaacauccagaaggagaucgaccgccugaacgaggucgccaagaaccucaacgagucccugaucgaccugcaggagcucgggaaguacgagcaguacaucaaguggccgugguacaucuggcugggcuucaucgccggccugaucgcgaucgugauggugaccaucaugcucugcugcaugaccagcugcugcuccugccugaaggggugcugcagcugcggcuccugcugcaaguucgacgaggacgacagcgagcccguccugaagggggugaagcuccacuacacgugaggacuaguuauaagacugacuagcccgaugggccucccaacgggcccuccuccccuccuugcaccgagauuaaucaaaggcucuuuucagagccaccaaaaaaaaaaaaaaaaaaaaaaaaaaaaaaaaaaaaaaaaaaaaaaaaaaaaaaaaaaaaaaaaaaaaaaaaaaaaaaaaaaaaaaaaaaaaaaaaaaaaa

SEQ ID NO: 24086 - RNA, 4035 nt, Artificial Sequence
  SARS-CoV-2/Wuhan/WIV05/2019__EPI_ISL_402128 spike protein mRNA gc (1-1273)(S13I_W152C_L452R_D614G)
aggagaaagcuuaccauguucguguuccugguccuccugccccuggugagcauccagugcgugaaccucaccacccgcacgcagcugccgcccgccuacaccaacagcuucacccggggcgucuacuaccccgacaagguguuccgcuccagcgugcugcacuccacccaggaccucuuccugcccuucuucagcaacgucacgugguuccacgccauccacguguccgggaccaacggcaccaagcgguucgacaacccggugcugcccuucaacgacggggucuacuucgcgagcaccgagaaguccaacaucauccgcggcuggaucuucgggacgacccucgacagcaagacccagucccugcugaucgugaacaacgccaccaacguggucaucaaggugugcgaguuccaguucugcaacgaccccuuccucggcguguacuaccacaagaacaacaagagcugcauggaguccgaguuccgggucuacagcuccgccaacaacugcacguucgaguacgugagccagcccuuccugauggaccuggagggcaagcaggggaacuucaagaaccuccgcgaguucguguucaagaacaucgacggcuacuucaagaucuacuccaagcacaccccgaucaaccugguccgggaccugccccagggguucagcgcccucgagccccugguggaccugcccaucggcaucaacaucacccgcuuccagacccuccuggcccugcaccgguccuaccucacgccgggggacagcagcuccggcuggaccgcgggcgccgccgccuacuacgugggguaccugcagccccgcaccuuccugcucaaguacaacgagaacggcaccaucacggacgcggucgacugcgcccuggacccccugagcgagaccaagugcacccucaaguccuucaccguggagaaggggaucuaccagacgagcaacuuccgggugcagcccaccgaguccaucguccgcuucccgaacaucaccaaccugugccccuucggcgagguguucaacgccacccgguucgccagcgucuacgccuggaaccgcaagcggaucuccaacugcguggcggacuacagcgugcuguacaacuccgccagcuucuccacguucaagugcuacggcgucagccccaccaagcucaacgaccugugcuucaccaacguguacgccgacuccuucgugauccgcggggacgagguccggcagaucgcccccggccagaccgggaagaucgccgacuacaacuacaagcugccggacgacuucacgggcugcgugaucgcguggaacagcaacaaccucgacuccaaggucgggggcaacuacaacuaccgcuaccgccuguuccgcaagagcaaccucaagcccuucgagcgggacaucuccaccgagaucuaccaggccggcagcacccccugcaacgggguggagggcuucaacugcuacuucccccugcaguccuacggguuccagccgaccaacggcgugggguaccagcccuaccggguggucgugcugagcuucgagcuccugcacgcccccgccacggugugcggccccaagaaguccaccaaccuggucaagaacaagugcgugaacuucaacuucaacggccucaccgggaccggcgugcugaccgagagcaacaagaaguuccugccguuccagcaguucgggcgcgacaucgccgacacgaccgacgcgguccgcgacccccagacccuggagauccucgacaucacccccugcagcuucggcgggguguccgugaucacgccgggcaccaacaccagcaaccaggucgccgugcuguaccagggcgugaacugcaccgagguccccguggccauccacgccgaccagcugacgcccaccuggcggguguacuccaccggcagcaacgucuuccagacccgcgccgggugccucaucggcgcggagcacgugaacaacuccuacgagugcgacauccccaucggggccggcaucugcgccagcuaccagacgcagaccaacuccccgcggcgcgcccggagcguggcgucccagagcaucaucgccuacaccaugucccugggcgccgagaacagcgucgccuacuccaacaacagcaucgccauccccaccaacuucacgaucuccgugaccaccgagauccugcccgugagcaugaccaagacgagcgucgacugcaccauguacaucugcggggacuccaccgagugcagcaaccuccugcugcaguacggcuccuucugcacccagcucaaccgcgcgcugacggggaucgccguggagcaggacaagaacacccaggagguguucgcccaggucaagcagaucuacaagacgcccccgaucaaggacuucggcggguucaacuucagccagauccugcccgaccccuccaagcccagcaagcgguccuucaucgaggaccuccuguucaacaaggugacccuggccgacgccggcuucaucaagcaguacggcgacugccucggggacaucgcggcccgcgaccugaucugcgcccagaaguucaacggccugaccgugcucccgccccugcugaccgacgagaugaucgcccaguacaccagcgcccuccuggcggggaccaucacguccggcuggaccuucggggccggcgccgcccugcagauccccuucgcgaugcagauggccuaccgguucaacggcaucggggucacccagaacgugcucuacgagaaccagaagcugaucgccaaccaguucaacagcgccaucggcaagauccaggacucccugagcuccaccgccagcgcgcucgggaagcugcaggacguggucaaccagaacgcccaggcccugaacacgcucgugaagcagcuguccagcaacuucggcgccaucuccagcgugcugaacgacauccucucccgccuggacaaggucgaggccgaggugcagaucgaccggcugaucaccgggcgccuccagagccugcagaccuacgugacccagcagcugauccgggcggccgagauccgcgccagcgccaaccucgccgcgaccaagauguccgagugcguccugggccagagcaagcggguggacuucugcggcaagggguaccaccugauguccuucccccagagcgccccgcacggcguggucuuccuccacgugacguacguccccgcccaggagaagaacuucaccaccgcccccgcgaucugccacgacgggaaggcccacuucccccgcgagggcguguucguguccaacgggacccacugguucgucacgcagcggaacuucuacgagccgcagaucaucaccaccgacaacaccuucgugagcggcaacugcgacguggucaucggcaucgugaacaacacgguguacgacccccugcagcccgagcuggacuccuucaaggaggagcucgacaaguacuucaagaaccacaccagccccgacgucgaccugggggacaucuccggcaucaacgccagcguggugaacauccagaaggagaucgaccgccugaacgaggucgccaagaaccucaacgagucccugaucgaccugcaggagcucgggaaguacgagcaguacaucaaguggccgugguacaucuggcugggcuucaucgccggccugaucgcgaucgugauggugaccaucaugcucugcugcaugaccagcugcugcuccugccugaaggggugcugcagcugcggcuccugcugcaaguucgacgaggacgacagcgagcccguccugaagggggugaagcuccacuacacgugaggacuaguuauaagacugacuagcccgaugggccucccaacgggcccuccuccccuccuugcaccgagauuaaucaaaggcucuuuucagagccaccaaaaaaaaaaaaaaaaaaaaaaaaaaaaaaaaaaaaaaaaaaaaaaaaaaaaaaaaaaaaaaaaaaaaaaaaaaaaaaaaaaaaaaaaaaaaaaaaaaaaa

SEQ ID NO: 24087 - RNA, 4035 nt, Artificial Sequence; identical to SEQ ID NO: 24069
  SARS-CoV-2/Wuhan/WIV05/2019__EPI_ISL_402128 spike protein mRNA gc (1-1273)

SEQ ID NO: 24088 - RNA, 4035 nt, Artificial Sequence
  SARS-CoV-2/Wuhan/WIV05/2019__EPI_ISL_402128 spike protein mRNA gc (1-1273)(D614G)
aggagaaagcuuaccauguucguguuccugguccuccugccccuggugagcucccagugcgugaaccucaccacccgcacgcagcugccgcccgccuacaccaacagcuucacccggggcgucuacuaccccgacaagguguuccgcuccagcgugcugcacuccacccaggaccucuuccugcccuucuucagcaacgucacgugguuccacgccauccacguguccgggaccaacggcaccaagcgguucgacaacccggugcugcccuucaacgacggggucuacuucgcgagcaccgagaaguccaacaucauccgcggcuggaucuucgggacgacccucgacagcaagacccagucccugcugaucgugaacaacgccaccaacguggucaucaaggugugcgaguuccaguucugcaacgaccccuuccucggcguguacuaccacaagaacaacaagagcuggauggaguccgaguuccgggucuacagcuccgccaacaacugcacguucgaguacgugagccagcccuuccugauggaccuggagggcaagcaggggaacuucaagaaccuccgcgaguucguguucaagaacaucgacggcuacuucaagaucuacuccaagcacaccccgaucaaccugguccgggaccugccccagggguucagcgcccucgagccccugguggaccugcccaucggcaucaacaucacccgcuuccagacccuccuggcccugcaccgguccuaccucacgccgggggacagcagcuccggcuggaccgcgggcgccgccgccuacuacgugggguaccugcagccccgcaccuuccugcucaaguacaacgagaacggcaccaucacggacgcggucgacugcgcccuggacccccugagcgagaccaagugcacccucaaguccuucaccguggagaaggggaucuaccagacgagcaacuuccgggugcagcccaccgaguccaucguccgcuucccgaacaucaccaaccugugccccuucggcgagguguucaacgccacccgguucgccagcgucuacgccuggaaccgcaagcggaucuccaacugcguggcggacuacagcgugcuguacaacuccgccagcuucuccacguucaagugcuacggcgucagccccaccaagcucaacgaccugugcuucaccaacguguacgccgacuccuucgugauccgcggggacgagguccggcagaucgcccccggccagaccgggaagaucgccgacuacaacuacaagcugccggacgacuucacgggcugcgugaucgcguggaacagcaacaaccucgacuccaaggucgggggcaacuacaacuaccuguaccgccuguuccgcaagagcaaccucaagcccuucgagcgggacaucuccaccgagaucuaccaggccggcagcacccccugcaacgggguggagggcuucaacugcuacuucccccugcaguccuacggguuccagccgaccaacggcgugggguaccagcccuaccggguggucgugcugagcuucgagcuccugcacgcccccgccacggugugcggccccaagaaguccaccaaccuggucaagaacaagugcgugaacuucaacuucaacggccucaccgggaccggcgugcugaccgagagcaacaagaaguuccugccguuccagcaguucgggcgcgacaucgccgacacgaccgacgcgguccgcgacccccagacccuggagauccucgacaucacccccugcagcuucggcgggguguccgugaucacgccgggcaccaacaccagcaaccaggucgccgugcuguaccagggcgugaacugcaccgagguccccguggccauccacgccgaccagcugacgcccaccuggcggguguacuccaccgggagcaacgucuuccagacccgcgccggcugccucaucggggcggagcacgugaacaacuccuacgagugcgacauccccaucggcgccggcaucugcgccagcuaccagacgcagaccaacuccccgcggcgcgcccggagcguggcgucccagagcaucaucgccuacaccaugucccugggggccgagaacagcgucgccuacuccaacaacagcaucgccauccccaccaacuucacgaucuccgugaccaccgagauccugcccgugagcaugaccaagacgagcgucgacugcaccauguacaucugcggcgacuccaccgagugcagcaaccuccugcugcaguacggguccuucugcacccagcucaaccgcgcgcugacgggcaucgccguggagcaggacaagaacacccaggagguguucgcccaggucaagcagaucuacaagacgcccccgaucaaggacuucgggggcuucaacuucagccagauccugcccgaccccuccaagcccagcaagcgguccuucaucgaggaccuccuguucaacaaggugacccuggccgacgccggcuucaucaagcaguacggggacugccucggcgacaucgcggcccgcgaccugaucugcgcccagaaguucaacgggcugaccgugcucccgccccugcugaccgacgagaugaucgcccaguacaccagcgcccuccuggcgggcaccaucacguccggguggaccuucggcgccggcgccgcccugcagauccccuucgcgaugcagauggccuaccgguucaacgggaucggcgucacccagaacgugcucuacgagaaccagaagcugaucgccaaccaguucaacagcgccaucgggaagauccaggacucccugagcuccaccgccagcgcgcucggcaagcugcaggacguggucaaccagaacgcccaggcccugaacacgcucgugaagcagcuguccagcaacuucggggccaucuccagcgugcugaacgacauccucucccgccuggacaaggucgaggccgaggugcagaucgaccggcugaucaccggccgccuccagagccugcagaccuacgugacccagcagcugauccgggcggccgagauccgcgccagcgccaaccucgccgcgaccaagauguccgagugcguccugggccagagcaagcggguggacuucugcgggaagggcuaccaccugauguccuucccccagagcgccccgcacgggguggucuuccuccacgugacguacguccccgcccaggagaagaacuucaccaccgcccccgcgaucugccacgacggcaaggcccacuucccccgcgaggggguguucguguccaacggcacccacugguucgucacgcagcggaacuucuacgagccgcagaucaucaccaccgacaacaccuucgugagcggcaacugcgacguggucaucgggaucgugaacaacacgguguacgacccccugcagcccgagcuggacuccuucaaggaggagcucgacaaguacuucaagaaccacaccagccccgacgucgaccugggcgacaucuccgggaucaacgccagcguggugaacauccagaaggagaucgaccgccugaacgaggucgccaagaaccucaacgagucccugaucgaccugcaggagcucggcaaguacgagcaguacaucaaguggccgugguacaucuggcugggcuucaucgccgggcugaucgcgaucgugauggugaccaucaugcucugcugcaugaccagcugcugcuccugccugaagggcugcugcagcugcggguccugcugcaaguucgacgaggacgacagcgagcccguccugaagggcgugaagcuccacuacacgugaggacuaguuauaagacugacuagcccgaugggccucccaacgggcccuccuccccuccuugcaccgagauuaaucaaaggcucuuuucagagccaccaaaaaaaaaaaaaaaaaaaaaaaaaaaaaaaaaaaaaaaaaaaaaaaaaaaaaaaaaaaaaaaaaaaaaaaaaaaaaaaaaaaaaaaaaaaaaaaaaaaaa

SEQ ID NO: 24089 - RNA, 4035 nt, Artificial Sequence
  SARS-CoV-2/Wuhan/WIV05/2019__EPI_ISL_402128 spike protein mRNA gc (1-1273)(A222V_D614G)
aggagaaagcuuaccauguucguguuccugguccuccugccccuggugagcucccagugcgugaaccucaccacccgcacgcagcugccgcccgccuacaccaacagcuucacccggggcgucuacuaccccgacaagguguuccgcuccagcgugcugcacuccacccaggaccucuuccugcccuucuucagcaacgucacgugguuccacgccauccacguguccgggaccaacggcaccaagcgguucgacaacccggugcugcccuucaacgacggggucuacuucgcgagcaccgagaaguccaacaucauccgcggcuggaucuucgggacgacccucgacagcaagacccagucccugcugaucgugaacaacgccaccaacguggucaucaaggugugcgaguuccaguucugcaacgaccccuuccucggcguguacuaccacaagaacaacaagagcuggauggaguccgaguuccgggucuacagcuccgccaacaacugcacguucgaguacgugagccagcccuuccugauggaccuggagggcaagcaggggaacuucaagaaccuccgcgaguucguguucaagaacaucgacggcuacuucaagaucuacuccaagcacaccccgaucaaccugguccgggaccugccccagggguucagcgugcucgagccccugguggaccugcccaucggcaucaacaucacccgcuuccagacccuccuggcccugcaccgguccuaccucacgccgggggacagcagcuccggcuggaccgccggcgcggccgccuacuacgucggguaccugcagccccgcaccuuccugcucaaguacaacgagaacggcaccaucacggacgccguggacugcgcgcuggacccccugagcgagaccaagugcacccucaaguccuucaccguggagaaggggaucuaccagacgagcaacuuccggguccagcccaccgaguccaucgugcgcuucccgaacaucaccaaccugugccccuucggcgaggucuucaacgccacccgguucgccagcguguacgccuggaaccgcaagcggaucuccaacugcguggccgacuacagcguccuguacaacuccgcgagcuucuccacguucaagugcuacggcgugagccccaccaagcucaacgaccugugcuucaccaacguguacgccgacuccuucgucauccgcggggacgaggugcggcagaucgcccccggccagaccgggaagaucgccgacuacaacuacaagcugccggacgacuucacgggcugcgugaucgccuggaacagcaacaaccucgacuccaaggucgggggcaacuacaacuaccuguaccgccuguuccgcaagagcaaccucaagcccuucgagcgggacaucuccaccgagaucuaccaggcgggcagcacccccugcaacgggguggagggcuucaacugcuacuucccccugcaguccuacggguuccagccgaccaacggcgugggguaccagcccuaccgggucguggugcugagcuucgagcuccugcacgcccccgccacggucugcggccccaagaaguccaccaaccuggugaagaacaagugcgugaacuucaacuucaacggccucaccgggaccggcguccugaccgagagcaacaagaaguuccugccguuccagcaguucgggcgcgacaucgccgacacgaccgacgccgugcgcgacccccagacccuggagauccucgacaucacccccugcagcuucggcgggguguccgucaucacgccgggcaccaacaccagcaaccagguggcggugcuguaccagggcgucaacugcaccgaggugcccguggccauccacgccgaccagcugacgcccaccuggcgggucuacuccaccgggagcaacguguuccagacccgcgccggcugccucaucggggccgagcacgugaacaacuccuacgagugcgacauccccaucggcgcgggcaucugcgccagcuaccagacgcagaccaacuccccgcggcgcgcccggagcgucgccucccagagcaucaucgcguacaccaugucccugggggccgagaacagcguggccuacuccaacaacagcaucgccauccccaccaacuucacgaucuccgugaccaccgagauccugcccgucagcaugaccaagacgagcguggacugcaccauguacaucugcggcgacuccaccgagugcagcaaccuccugcugcaguacggguccuucugcacccagcucaaccgcgcccugacgggcaucgcgguggagcaggacaagaacacccaggaggucuucgcccaggugaagcagaucuacaagacgcccccgaucaaggacuucgggggcuucaacuucagccagauccugcccgaccccuccaagcccagcaagcgguccuucaucgaggaccuccuguucaacaaggugacccuggccgacgccggcuucaucaagcaguacggggacugccucggcgacaucgccgcgcgcgaccugaucugcgcccagaaguucaacgggcugaccguccucccgccccugcugaccgacgagaugaucgcccaguacaccagcgcccuccuggccggcaccaucacguccggguggaccuucggcgcgggcgccgcccugcagauccccuucgccaugcagauggcguaccgguucaacgggaucggcgugacccagaacgugcucuacgagaaccagaagcugaucgccaaccaguucaacagcgccaucgggaagauccaggacucccugagcuccaccgccagcgcccucggcaagcugcaggacgucgugaaccagaacgcgcaggcccugaacacgcucgugaagcagcuguccagcaacuucggggccaucuccagcguccugaacgacauccucucccgccuggacaagguggaggccgaggugcagaucgaccggcugaucaccggccgccuccagagccugcagaccuacgucacccagcagcugauccgggccgcggagauccgcgccagcgccaaccucgccgccaccaagauguccgagugcgugcugggccagagcaagcggguggacuucugcgggaagggcuaccaccugauguccuucccccagagcgcgccgcacggggucguguuccuccacgucacguacgugcccgcccaggagaagaacuucaccaccgcccccgccaucugccacgacggcaaggcgcacuucccccgcgaggggguguucgucuccaacggcacccacugguucgugacgcagcggaacuucuacgagccgcagaucaucaccaccgacaacaccuucgugagcggcaacugcgacgucgugaucgggaucgugaacaacacggucuacgacccccugcagcccgagcuggacuccuucaaggaggagcucgacaaguacuucaagaaccacaccagccccgacguggaccugggcgacaucuccgggaucaacgccagcguggucaacauccagaaggagaucgaccgccugaacgagguggccaagaaccucaacgagucccugaucgaccugcaggagcucggcaaguacgagcaguacaucaaguggccgugguacaucuggcugggcuucaucgccgggcugaucgccaucgugauggucaccaucaugcucugcugcaugaccagcugcugcuccugccugaagggcugcugcagcugcggguccugcugcaaguucgacgaggacgacagcgagcccgugcugaagggcgugaagcuccacuacacgugaggacuaguuauaagacugacuagcccgaugggccucccaacgggcccuccuccccuccuugcaccgagauuaaucaaaggcucuuuucagagccaccaaaaaaaaaaaaaaaaaaaaaaaaaaaaaaaaaaaaaaaaaaaaaaaaaaaaaaaaaaaaaaaaaaaaaaaaaaaaaaaaaaaaaaaaaaaaaaaaaaaaa

SEQ ID NO: 24090 - RNA, 4035 nt, Artificial Sequence
  SARS-CoV-2/Wuhan/WIV05/2019__EPI_ISL_402128 spike protein mRNA gc (1-1273)(N439K_D614G)
aggagaaagcuuaccauguucguguuccugguccuccugccccuggugagcucccagugcgugaaccucaccacccgcacgcagcugccgcccgccuacaccaacagcuucacccggggcgucuacuaccccgacaagguguuccgcuccagcgugcugcacuccacccaggaccucuuccugcccuucuucagcaacgucacgugguuccacgccauccacguguccgggaccaacggcaccaagcgguucgacaacccggugcugcccuucaacgacggggucuacuucgcgagcaccgagaaguccaacaucauccgcggcuggaucuucgggacgacccucgacagcaagacccagucccugcugaucgugaacaacgccaccaacguggucaucaaggugugcgaguuccaguucugcaacgaccccuuccucggcguguacuaccacaagaacaacaagagcuggauggaguccgaguuccgggucuacagcuccgccaacaacugcacguucgaguacgugagccagcccuuccugauggaccuggagggcaagcaggggaacuucaagaaccuccgcgaguucguguucaagaacaucgacggcuacuucaagaucuacuccaagcacaccccgaucaaccugguccgggaccugccccagggguucagcgcccucgagccccugguggaccugcccaucggcaucaacaucacccgcuuccagacccuccuggcccugcaccgguccuaccucacgccgggggacagcagcuccggcuggaccgcgggcgccgccgccuacuacgugggguaccugcagccccgcaccuuccugcucaaguacaacgagaacggcaccaucacggacgcggucgacugcgcccuggacccccugagcgagaccaagugcacccucaaguccuucaccguggagaaggggaucuaccagacgagcaacuuccgggugcagcccaccgaguccaucguccgcuucccgaacaucaccaaccugugccccuucggcgagguguucaacgccacccgguucgccagcgucuacgccuggaaccgcaagcggaucuccaacugcguggcggacuacagcgugcuguacaacuccgccagcuucuccacguucaagugcuacggcgucagccccaccaagcucaacgaccugugcuucaccaacguguacgccgacuccuucgugauccgcggggacgagguccggcagaucgcccccggccagaccgggaagaucgccgacuacaacuacaagcugccggacgacuucacgggcugcgugaucgcguggaacagcaagaaccucgacuccaaggucgggggcaacuacaacuaccuguaccgccuguuccgcaagagcaaccucaagcccuucgagcgggacaucuccaccgagaucuaccaggccggcagcacccccugcaacgggguggagggcuucaacugcuacuucccccugcaguccuacggguuccagccgaccaacggcgugggguaccagcccuaccggguggucgugcugagcuucgagcuccugcacgcccccgccacggugugcggccccaagaaguccaccaaccuggucaagaacaagugcgugaacuucaacuucaacggccucaccgggaccggcgugcugaccgagagcaacaagaaguuccugccguuccagcaguucgggcgcgacaucgccgacacgaccgacgcgguccgcgacccccagacccuggagauccucgacaucacccccugcagcuucggcgggguguccgugaucacgccgggcaccaacaccagcaaccaggucgccgugcuguaccagggcgugaacugcaccgagguccccguggccauccacgccgaccagcugacgcccaccuggcggguguacuccaccgggagcaacgucuuccagacccgcgccggcugccucaucggggcggagcacgugaacaacuccuacgagugcgacauccccaucggcgccggcaucugcgccagcuaccagacgcagaccaacuccccgcggcgcgcccggagcguggcgucccagagcaucaucgccuacaccaugucccugggggccgagaacagcgucgccuacuccaacaacagcaucgccauccccaccaacuucacgaucuccgugaccaccgagauccugcccgugagcaugaccaagacgagcgucgacugcaccauguacaucugcggcgacuccaccgagugcagcaaccuccugcugcaguacggguccuucugcacccagcucaaccgcgcgcugacgggcaucgccguggagcaggacaagaacacccaggagguguucgcccaggucaagcagaucuacaagacgcccccgaucaaggacuucgggggcuucaacuucagccagauccugcccgaccccuccaagcccagcaagcgguccuucaucgaggaccuccuguucaacaaggugacccuggccgacgccggcuucaucaagcaguacggggacugccucggcgacaucgcggcccgcgaccugaucugcgcccagaaguucaacgggcugaccgugcucccgccccugcugaccgacgagaugaucgcccaguacaccagcgcccuccuggcgggcaccaucacguccggguggaccuucggcgccggcgccgcccugcagauccccuucgcgaugcagauggccuaccgguucaacgggaucggcgucacccagaacgugcucuacgagaaccagaagcugaucgccaaccaguucaacagcgccaucgggaagauccaggacucccugagcuccaccgccagcgcgcucggcaagcugcaggacguggucaaccagaacgcccaggcccugaacacgcucgugaagcagcuguccagcaacuucggggccaucuccagcgugcugaacgacauccucucccgccuggacaaggucgaggccgaggugcagaucgaccggcugaucaccggccgccuccagagccugcagaccuacgugacccagcagcugauccgggcggccgagauccgcgccagcgccaaccucgccgcgaccaagauguccgagugcguccugggccagagcaagcggguggacuucugcgggaagggcuaccaccugauguccuucccccagagcgccccgcacgggguggucuuccuccacgugacguacguccccgcccaggagaagaacuucaccaccgcccccgcgaucugccacgacggcaaggcccacuucccccgcgaggggguguucguguccaacggcacccacugguucgucacgcagcggaacuucuacgagccgcagaucaucaccaccgacaacaccuucgugagcggcaacugcgacguggucaucgggaucgugaacaacacgguguacgacccccugcagcccgagcuggacuccuucaaggaggagcucgacaaguacuucaagaaccacaccagccccgacgucgaccugggcgacaucuccgggaucaacgccagcguggugaacauccagaaggagaucgaccgccugaacgaggucgccaagaaccucaacgagucccugaucgaccugcaggagcucggcaaguacgagcaguacaucaaguggccgugguacaucuggcugggcuucaucgccgggcugaucgcgaucgugauggugaccaucaugcucugcugcaugaccagcugcugcuccugccugaagggcugcugcagcugcggguccugcugcaaguucgacgaggacgacagcgagcccguccugaagggcgugaagcuccacuacacgugaggacuaguuauaagacugacuagcccgaugggccucccaacgggcccuccuccccuccuugcaccgagauuaaucaaaggcucuuuucagagccaccaaaaaaaaaaaaaaaaaaaaaaaaaaaaaaaaaaaaaaaaaaaaaaaaaaaaaaaaaaaaaaaaaaaaaaaaaaaaaaaaaaaaaaaaaaaaaaaaaaaaa

SEQ ID NO: 24091 - RNA, 4035 nt, Artificial Sequence
  SARS-CoV-2/Wuhan/WIV05/2019__EPI_ISL_402128 spike protein mRNA gc (1-1273)(S477N_D614G)
aggagaaagcuuaccauguucguguuccugguccuccugccccuggugagcucccagugcgugaaccucaccacccgcacgcagcugccgcccgccuacaccaacagcuucacccggggcgucuacuaccccgacaagguguuccgcuccagcgugcugcacuccacccaggaccucuuccugcccuucuucagcaacgucacgugguuccacgccauccacguguccgggaccaacggcaccaagcgguucgacaacccggugcugcccuucaacgacggggucuacuucgcgagcaccgagaaguccaacaucauccgcggcuggaucuucgggacgacccucgacagcaagacccagucccugcugaucgugaacaacgccaccaacguggucaucaaggugugcgaguuccaguucugcaacgaccccuuccucggcguguacuaccacaagaacaacaagagcuggauggaguccgaguuccgggucuacagcuccgccaacaacugcacguucgaguacgugagccagcccuuccugauggaccuggagggcaagcaggggaacuucaagaaccuccgcgaguucguguucaagaacaucgacggcuacuucaagaucuacuccaagcacaccccgaucaaccugguccgggaccugccccagggguucagcgcccucgagccccugguggaccugcccaucggcaucaacaucacccgcuuccagacccuccuggcccugcaccgguccuaccucacgccgggggacagcagcuccggcuggaccgcgggcgccgccgccuacuacgugggguaccugcagccccgcaccuuccugcucaaguacaacgagaacggcaccaucacggacgcggucgacugcgcccuggacccccugagcgagaccaagugcacccucaaguccuucaccguggagaaggggaucuaccagacgagcaacuuccgggugcagcccaccgaguccaucguccgcuucccgaacaucaccaaccugugccccuucggcgagguguucaacgccacccgguucgccagcgucuacgccuggaaccgcaagcggaucuccaacugcguggcggacuacagcgugcuguacaacuccgccagcuucuccacguucaagugcuacggcgucagccccaccaagcucaacgaccugugcuucaccaacguguacgccgacuccuucgugauccgcggggacgagguccggcagaucgcccccggccagaccgggaagaucgccgacuacaacuacaagcugccggacgacuucacgggcugcgugaucgcguggaacagcaacaaccucgacuccaaggucgggggcaacuacaacuaccuguaccgccuguuccgcaagagcaaccucaagcccuucgagcgggacaucuccaccgagaucuaccaggccggcaacacccccugcaacgggguggagggcuucaacugcuacuucccccugcagagcuacggguuccagccgaccaacggcgugggguaccagcccuaccggguggucgugcuguccuucgagcuccugcacgcccccgccacggugugcggccccaagaaguccaccaaccuggucaagaacaagugcgugaacuucaacuucaacggccucaccgggaccggcgugcugaccgagagcaacaagaaguuccugccguuccagcaguucgggcgcgacaucgccgacacgaccgacgcgguccgcgacccccagacccuggagauccucgacaucacccccugcagcuucggcggggugagcgugaucacgccgggcaccaacaccuccaaccaggucgccgugcuguaccagggcgugaacugcaccgagguccccguggccauccacgccgaccagcugacgcccaccuggcggguguacagcaccggguccaacgucuuccagacccgcgccggcugccucaucggggcggagcacgugaacaacagcuacgagugcgacauccccaucggcgccggcaucugcgccuccuaccagacgcagaccaacagcccgcggcgcgcccgguccguggcgagccaguccaucaucgccuacaccaugagccugggggccgagaacuccgucgccuacagcaacaacuccaucgccauccccaccaacuucacgaucagcgugaccaccgagauccugcccguguccaugaccaagacgagcgucgacugcaccauguacaucugcggcgacagcaccgagugcuccaaccuccugcugcaguacgggagcuucugcacccagcucaaccgcgcgcugacgggcaucgccguggagcaggacaagaacacccaggagguguucgcccaggucaagcagaucuacaagacgcccccgaucaaggacuucgggggcuucaacuucucccagauccugcccgaccccagcaagcccuccaagcggagcuucaucgaggaccuccuguucaacaaggugacccuggccgacgccggcuucaucaagcaguacggggacugccucggcgacaucgcggcccgcgaccugaucugcgcccagaaguucaacgggcugaccgugcucccgccccugcugaccgacgagaugaucgcccaguacaccuccgcccuccuggcgggcaccaucacgagcggguggaccuucggcgccggcgccgcccugcagauccccuucgcgaugcagauggccuaccgguucaacgggaucggcgucacccagaacgugcucuacgagaaccagaagcugaucgccaaccaguucaacuccgccaucgggaagauccaggacagccuguccagcaccgccuccgcgcucggcaagcugcaggacguggucaaccagaacgcccaggcccugaacacgcucgugaagcagcugagcuccaacuucggggccaucagcuccgugcugaacgacauccucagccgccuggacaaggucgaggccgaggugcagaucgaccggcugaucaccggccgccuccagucccugcagaccuacgugacccagcagcugauccgggcggccgagauccgcgccagcgccaaccucgccgcgaccaagaugagcgagugcguccugggccaguccaagcggguggacuucugcgggaagggcuaccaccugaugagcuucccccaguccgccccgcacgggguggucuuccuccacgugacguacguccccgcccaggagaagaacuucaccaccgcccccgcgaucugccacgacggcaaggcccacuucccccgcgaggggguguucgugagcaacggcacccacugguucgucacgcagcggaacuucuacgagccgcagaucaucaccaccgacaacaccuucguguccggcaacugcgacguggucaucgggaucgugaacaacacgguguacgacccccugcagcccgagcuggacagcuucaaggaggagcucgacaaguacuucaagaaccacaccucccccgacgucgaccugggcgacaucagcgggaucaacgccuccguggugaacauccagaaggagaucgaccgccugaacgaggucgccaagaaccucaacgagagccugaucgaccugcaggagcucggcaaguacgagcaguacaucaaguggccgugguacaucuggcugggcuucaucgccgggcugaucgcgaucgugauggugaccaucaugcucugcugcaugaccuccugcugcagcugccugaagggcugcugcuccugcgggagcugcugcaaguucgacgaggacgacuccgagcccguccugaagggcgugaagcuccacuacacgugaggacuaguuauaagacugacuagcccgaugggccucccaacgggcccuccuccccuccuugcaccgagauuaaucaaaggcucuuuucagagccaccaaaaaaaaaaaaaaaaaaaaaaaaaaaaaaaaaaaaaaaaaaaaaaaaaaaaaaaaaaaaaaaaaaaaaaaaaaaaaaaaaaaaaaaaaaaaaaaaaaaaa

SEQ ID NO: 24092 - RNA, 4035 nt, Artificial Sequence
  SARS-CoV-2/Wuhan/WIV05/2019__EPI_ISL_402128 spike protein mRNA gc (1-1273)(N501Y_D614G)
aggagaaagcuuaccauguucguguuccugguccuccugccccuggugagcucccagugcgugaaccucaccacccgcacgcagcugccgcccgccuacaccaacagcuucacccggggcgucuacuaccccgacaagguguuccgcuccagcgugcugcacuccacccaggaccucuuccugcccuucuucagcaacgucacgugguuccacgccauccacguguccgggaccaacggcaccaagcgguucgacaacccggugcugcccuucaacgacggggucuacuucgcgagcaccgagaaguccaacaucauccgcggcuggaucuucgggacgacccucgacagcaagacccagucccugcugaucgugaacaacgccaccaacguggucaucaaggugugcgaguuccaguucugcaacgaccccuuccucggcguguacuaccacaagaacaacaagagcuggauggaguccgaguuccgggucuacagcuccgccaacaacugcacguucgaguacgugagccagcccuuccugauggaccuggagggcaagcaggggaacuucaagaaccuccgcgaguucguguucaagaacaucgacggcuacuucaagaucuacuccaagcacaccccgaucaaccugguccgggaccugccccagggguucagcgcccucgagccccugguggaccugcccaucggcaucaacaucacccgcuuccagacccuccuggcccugcaccgguccuaccucacgccgggggacagcagcuccggcuggaccgcgggcgccgccgccuacuacgugggguaccugcagccccgcaccuuccugcucaaguacaacgagaacggcaccaucacggacgcggucgacugcgcccuggacccccugagcgagaccaagugcacccucaaguccuucaccguggagaaggggaucuaccagacgagcaacuuccgggugcagcccaccgaguccaucguccgcuucccgaacaucaccaaccugugccccuucggcgagguguucaacgccacccgguucgccagcgucuacgccuggaaccgcaagcggaucuccaacugcguggcggacuacagcgugcuguacaacuccgccagcuucuccacguucaagugcuacggcgucagccccaccaagcucaacgaccugugcuucaccaacguguacgccgacuccuucgugauccgcggggacgagguccggcagaucgcccccggccagaccgggaagaucgccgacuacaacuacaagcugccggacgacuucacgggcugcgugaucgcguggaacagcaacaaccucgacuccaaggucgggggcaacuacaacuaccuguaccgccuguuccgcaagagcaaccucaagcccuucgagcgggacaucuccaccgagaucuaccaggccggcagcacccccugcaacgggguggagggcuucaacugcuacuucccccugcaguccuacggguuccagccgaccuacggcgugggguaccagcccuaccggguggucgugcugagcuucgagcuccugcacgcccccgccacggugugcggccccaagaaguccaccaaccuggucaagaacaagugcgugaacuucaacuucaacggccucaccgggaccggcgugcugaccgagagcaacaagaaguuccugccguuccagcaguucgggcgcgacaucgccgacacgaccgacgcgguccgcgacccccagacccuggagauccucgacaucacccccugcagcuucggcgggguguccgugaucacgccgggcaccaacaccagcaaccaggucgccgugcuguaccagggcgugaacugcaccgagguccccguggccauccacgccgaccagcugacgcccaccuggcggguguacuccaccgggagcaacgucuuccagacccgcgccggcugccucaucggggcggagcacgugaacaacuccuacgagugcgacauccccaucggcgccggcaucugcgccagcuaccagacgcagaccaacuccccgcggcgcgcccggagcguggcgucccagagcaucaucgccuacaccaugucccugggggccgagaacagcgucgccuacuccaacaacagcaucgccauccccaccaacuucacgaucuccgugaccaccgagauccugcccgugagcaugaccaagacgagcgucgacugcaccauguacaucugcggcgacuccaccgagugcagcaaccuccugcugcaguacggguccuucugcacccagcucaaccgcgcgcugacgggcaucgccguggagcaggacaagaacacccaggagguguucgcccaggucaagcagaucuacaagacgcccccgaucaaggacuucgggggcuucaacuucagccagauccugcccgaccccuccaagcccagcaagcgguccuucaucgaggaccuccuguucaacaaggugacccuggccgacgccggcuucaucaagcaguacggggacugccucggcgacaucgcggcccgcgaccugaucugcgcccagaaguucaacgggcugaccgugcucccgccccugcugaccgacgagaugaucgcccaguacaccagcgcccuccuggcgggcaccaucacguccggguggaccuucggcgccggcgccgcccugcagauccccuucgcgaugcagauggccuaccgguucaacgggaucggcgucacccagaacgugcucuacgagaaccagaagcugaucgccaaccaguucaacagcgccaucgggaagauccaggacucccugagcuccaccgccagcgcgcucggcaagcugcaggacguggucaaccagaacgcccaggcccugaacacgcucgugaagcagcuguccagcaacuucggggccaucuccagcgugcugaacgacauccucucccgccuggacaaggucgaggccgaggugcagaucgaccggcugaucaccggccgccuccagagccugcagaccuacgugacccagcagcugauccgggcggccgagauccgcgccagcgccaaccucgccgcgaccaagauguccgagugcguccugggccagagcaagcggguggacuucugcgggaagggcuaccaccugauguccuucccccagagcgccccgcacgggguggucuuccuccacgugacguacguccccgcccaggagaagaacuucaccaccgcccccgcgaucugccacgacggcaaggcccacuucccccgcgaggggguguucguguccaacggcacccacugguucgucacgcagcggaacuucuacgagccgcagaucaucaccaccgacaacaccuucgugagcggcaacugcgacguggucaucgggaucgugaacaacacgguguacgacccccugcagcccgagcuggacuccuucaaggaggagcucgacaaguacuucaagaaccacaccagccccgacgucgaccugggcgacaucuccgggaucaacgccagcguggugaacauccagaaggagaucgaccgccugaacgaggucgccaagaaccucaacgagucccugaucgaccugcaggagcucggcaaguacgagcaguacaucaaguggccgugguacaucuggcugggcuucaucgccgggcugaucgcgaucgugauggugaccaucaugcucugcugcaugaccagcugcugcuccugccugaagggcugcugcagcugcggguccugcugcaaguucgacgaggacgacagcgagcccguccugaagggcgugaagcuccacuacacgugaggacuaguuauaagacugacuagcccgaugggccucccaacgggcccuccuccccuccuugcaccgagauuaaucaaaggcucuuuucagagccaccaaaaaaaaaaaaaaaaaaaaaaaaaaaaaaaaaaaaaaaaaaaaaaaaaaaaaaaaaaaaaaaaaaaaaaaaaaaaaaaaaaaaaaaaaaaaaaaaaaaaa

SEQ ID NO: 24093 - RNA, 4029 nt, Artificial Sequence
  SARS-CoV-2/Wuhan/WIV05/2019__EPI_ISL_402128 spike protein mRNA gc (1-1273)(H69del_V70del_D614G)
aggagaaagcuuaccauguucguguuccugguccuccugccccuggugagcucccagugcgugaaccucaccacccgcacgcagcugccgcccgccuacaccaacagcuucacccggggcgucuacuaccccgacaagguguuccgcuccagcgugcugcacuccacccaggaccucuuccugcccuucuucagcaacgucacgugguuccacgccaucuccgggaccaacggcaccaagcgguucgacaacccggugcugcccuucaacgacgggguguacuucgcgagcaccgagaaguccaacaucauccgcggcuggaucuucgggacgacccucgacagcaagacccagucccugcugaucgucaacaacgccaccaacguggugaucaaggucugcgaguuccaguucugcaacgaccccuuccucggcguguacuaccacaagaacaacaagagcuggauggaguccgaguuccggguguacagcuccgccaacaacugcacguucgaguacgucagccagcccuuccugauggaccuggagggcaagcaggggaacuucaagaaccuccgcgaguucguguucaagaacaucgacggcuacuucaagaucuacuccaagcacaccccgaucaaccuggugcgggaccugccccagggguucagcgcccucgagccccuggucgaccugcccaucggcaucaacaucacccgcuuccagacccuccuggcccugcaccgguccuaccucacgccgggggacagcagcuccggcuggaccgcgggcgccgccgccuacuacgugggguaccugcagccccgcaccuuccugcucaaguacaacgagaacggcaccaucacggacgcgguggacugcgcccuggacccccugagcgagaccaagugcacccucaaguccuucaccgucgagaaggggaucuaccagacgagcaacuuccgggugcagcccaccgaguccaucgugcgcuucccgaacaucaccaaccugugccccuucggcgaggucuucaacgccacccgguucgccagcguguacgccuggaaccgcaagcggaucuccaacugcgucgcggacuacagcgugcuguacaacuccgccagcuucuccacguucaagugcuacggcgugagccccaccaagcucaacgaccugugcuucaccaacgucuacgccgacuccuucgugauccgcggggacgaggugcggcagaucgcccccggccagaccgggaagaucgccgacuacaacuacaagcugccggacgacuucacgggcugcgucaucgcguggaacagcaacaaccucgacuccaaggucgggggcaacuacaacuaccuguaccgccuguuccgcaagagcaaccucaagcccuucgagcgggacaucuccaccgagaucuaccaggccggcagcacccccugcaacgggguggagggcuucaacugcuacuucccccugcaguccuacggguuccagccgaccaacggcgugggguaccagcccuaccggguggugguccugagcuucgagcuccugcacgcccccgccacggugugcggccccaagaaguccaccaaccuggugaagaacaagugcgucaacuucaacuucaacggccucaccgggaccggcgugcugaccgagagcaacaagaaguuccugccguuccagcaguucgggcgcgacaucgccgacacgaccgacgcggugcgcgacccccagacccuggagauccucgacaucacccccugcagcuucggcggggucuccgugaucacgccgggcaccaacaccagcaaccagguggccguccuguaccagggcgugaacugcaccgaggugcccgucgccauccacgccgaccagcugacgcccaccuggcggguguacuccaccgggagcaacguguuccagacccgcgccggcugccucaucggggcggagcacgucaacaacuccuacgagugcgacauccccaucggcgccggcaucugcgccagcuaccagacgcagaccaacuccccgcggcgcgcccggagcguggcgucccagagcaucaucgccuacaccaugucccugggggccgagaacagcguggccuacuccaacaacagcaucgccauccccaccaacuucacgaucuccgucaccaccgagauccugcccgugagcaugaccaagacgagcguggacugcaccauguacaucugcggcgacuccaccgagugcagcaaccuccugcugcaguacggguccuucugcacccagcucaaccgcgcgcugacgggcaucgccgucgagcaggacaagaacacccaggagguguucgcccaggugaagcagaucuacaagacgcccccgaucaaggacuucgggggcuucaacuucagccagauccugcccgaccccuccaagcccagcaagcgguccuucaucgaggaccuccuguucaacaaggucacccuggccgacgccggcuucaucaagcaguacggggacugccucggcgacaucgcggcccgcgaccugaucugcgcccagaaguucaacgggcugaccgugcucccgccccugcugaccgacgagaugaucgcccaguacaccagcgcccuccuggcgggcaccaucacguccggguggaccuucggcgccggcgccgcccugcagauccccuucgcgaugcagauggccuaccgguucaacgggaucggcgugacccagaacguccucuacgagaaccagaagcugaucgccaaccaguucaacagcgccaucgggaagauccaggacucccugagcuccaccgccagcgcgcucggcaagcugcaggacguggugaaccagaacgcccaggcccugaacacgcucgucaagcagcuguccagcaacuucggggccaucuccagcgugcugaacgacauccucucccgccuggacaagguggaggccgagguccagaucgaccggcugaucaccggccgccuccagagccugcagaccuacgugacccagcagcugauccgggcggccgagauccgcgccagcgccaaccucgccgcgaccaagauguccgagugcgugcugggccagagcaagcgggucgacuucugcgggaagggcuaccaccugauguccuucccccagagcgccccgcacggggugguguuccuccacgucacguacgugcccgcccaggagaagaacuucaccaccgcccccgcgaucugccacgacggcaaggcccacuucccccgcgagggggucuucguguccaacggcacccacugguucgugacgcagcggaacuucuacgagccgcagaucaucaccaccgacaacaccuucgucagcggcaacugcgacguggugaucgggaucgucaacaacacgguguacgacccccugcagcccgagcuggacuccuucaaggaggagcucgacaaguacuucaagaaccacaccagccccgacguggaccugggcgacaucuccgggaucaacgccagcgucgugaacauccagaaggagaucgaccgccugaacgagguggccaagaaccucaacgagucccugaucgaccugcaggagcucggcaaguacgagcaguacaucaaguggccgugguacaucuggcugggcuucaucgccgggcugaucgcgaucgucauggugaccaucaugcucugcugcaugaccagcugcugcuccugccugaagggcugcugcagcugcggguccugcugcaaguucgacgaggacgacagcgagcccgugcugaagggcgucaagcuccacuacacgugaggacuaguuauaagacugacuagcccgaugggccucccaacgggcccuccuccccuccuugcaccgagauuaaucaaaggcucuuuucagagccaccaaaaaaaaaaaaaaaaaaaaaaaaaaaaaaaaaaaaaaaaaaaaaaaaaaaaaaaaaaaaaaaaaaaaaaaaaaaaaaaaaaaaaaaaaaaaaaaaaaaaa

SEQ ID NO: 24094 - RNA, 4035 nt, Artificial Sequence
  SARS-CoV-2/Wuhan/WIV05/2019__EPI_ISL_402128 spike protein mRNA gc (1-1273)(Y453F_D614G)
aggagaaagcuuaccauguucguguuccugguccuccugccccuggugagcucccagugcgugaaccucaccacccgcacgcagcugccgcccgccuacaccaacagcuucacccggggcgucuacuaccccgacaagguguuccgcuccagcgugcugcacuccacccaggaccucuuccugcccuucuucagcaacgucacgugguuccacgccauccacguguccgggaccaacggcaccaagcgguucgacaacccggugcugcccuucaacgacggggucuacuucgcgagcaccgagaaguccaacaucauccgcggcuggaucuucgggacgacccucgacagcaagacccagucccugcugaucgugaacaacgccaccaacguggucaucaaggugugcgaguuccaguucugcaacgaccccuuccucggcguguacuaccacaagaacaacaagagcuggauggaguccgaguuccgggucuacagcuccgccaacaacugcacguucgaguacgugagccagcccuuccugauggaccuggagggcaagcaggggaacuucaagaaccuccgcgaguucguguucaagaacaucgacggcuacuucaagaucuacuccaagcacaccccgaucaaccugguccgggaccugccccagggguucagcgcccucgagccccugguggaccugcccaucggcaucaacaucacccgcuuccagacccuccuggcccugcaccgguccuaccucacgccgggggacagcagcuccggcuggaccgcgggcgccgccgccuacuacgugggguaccugcagccccgcaccuuccugcucaaguacaacgagaacggcaccaucacggacgcggucgacugcgcccuggacccccugagcgagaccaagugcacccucaaguccuucaccguggagaaggggaucuaccagacgagcaacuuccgggugcagcccaccgaguccaucguccgcuucccgaacaucaccaaccugugccccuucggcgagguguucaacgccacccgguucgccagcgucuacgccuggaaccgcaagcggaucuccaacugcguggcggacuacagcgugcuguacaacuccgccagcuucuccacguucaagugcuacggcgucagccccaccaagcucaacgaccugugcuucaccaacguguacgccgacuccuucgugauccgcggggacgagguccggcagaucgcccccggccagaccgggaagaucgccgacuacaacuacaagcugccggacgacuucacgggcugcgugaucgcguggaacagcaacaaccucgacuccaaggucgggggcaacuacaacuaccuguuccgccuguuccgcaagagcaaccucaagcccuucgagcgggacaucuccaccgagaucuaccaggccggcagcacccccugcaacgggguggagggcuucaacugcuacuucccccugcaguccuacggguuccagccgaccaacggcgugggguaccagcccuaccggguggucgugcugagcuucgagcuccugcacgcccccgccacggugugcggccccaagaaguccaccaaccuggucaagaacaagugcgugaacuucaacuucaacggccucaccgggaccggcgugcugaccgagagcaacaagaaguuccugccguuccagcaguucgggcgcgacaucgccgacacgaccgacgcgguccgcgacccccagacccuggagauccucgacaucacccccugcagcuucggcgggguguccgugaucacgccgggcaccaacaccagcaaccaggucgccgugcuguaccagggcgugaacugcaccgagguccccguggccauccacgccgaccagcugacgcccaccuggcggguguacuccaccgggagcaacgucuuccagacccgcgccggcugccucaucggggcggagcacgugaacaacuccuacgagugcgacauccccaucggcgccggcaucugcgccagcuaccagacgcagaccaacuccccgcggcgcgcccggagcguggcgucccagagcaucaucgccuacaccaugucccugggggccgagaacagcgucgccuacuccaacaacagcaucgccauccccaccaacuucacgaucuccgugaccaccgagauccugcccgugagcaugaccaagacgagcgucgacugcaccauguacaucugcggcgacuccaccgagugcagcaaccuccugcugcaguacggguccuucugcacccagcucaaccgcgcgcugacgggcaucgccguggagcaggacaagaacacccaggagguguucgcccaggucaagcagaucuacaagacgcccccgaucaaggacuucgggggcuucaacuucagccagauccugcccgaccccuccaagcccagcaagcgguccuucaucgaggaccuccuguucaacaaggugacccuggccgacgccggcuucaucaagcaguacggggacugccucggcgacaucgcggcccgcgaccugaucugcgcccagaaguucaacgggcugaccgugcucccgccccugcugaccgacgagaugaucgcccaguacaccagcgcccuccuggcgggcaccaucacguccggguggaccuucggcgccggcgccgcccugcagauccccuucgcgaugcagauggccuaccgguucaacgggaucggcgucacccagaacgugcucuacgagaaccagaagcugaucgccaaccaguucaacagcgccaucgggaagauccaggacucccugagcuccaccgccagcgcgcucggcaagcugcaggacguggucaaccagaacgcccaggcccugaacacgcucgugaagcagcuguccagcaacuucggggccaucuccagcgugcugaacgacauccucucccgccuggacaaggucgaggccgaggugcagaucgaccggcugaucaccggccgccuccagagccugcagaccuacgugacccagcagcugauccgggcggccgagauccgcgccagcgccaaccucgccgcgaccaagauguccgagugcguccugggccagagcaagcggguggacuucugcgggaagggcuaccaccugauguccuucccccagagcgccccgcacgggguggucuuccuccacgugacguacguccccgcccaggagaagaacuucaccaccgcccccgcgaucugccacgacggcaaggcccacuucccccgcgaggggguguucguguccaacggcacccacugguucgucacgcagcggaacuucuacgagccgcagaucaucaccaccgacaacaccuucgugagcggcaacugcgacguggucaucgggaucgugaacaacacgguguacgacccccugcagcccgagcuggacuccuucaaggaggagcucgacaaguacuucaagaaccacaccagccccgacgucgaccugggcgacaucuccgggaucaacgccagcguggugaacauccagaaggagaucgaccgccugaacgaggucgccaagaaccucaacgagucccugaucgaccugcaggagcucggcaaguacgagcaguacaucaaguggccgugguacaucuggcugggcuucaucgccgggcugaucgcgaucgugauggugaccaucaugcucugcugcaugaccagcugcugcuccugccugaagggcugcugcagcugcggguccugcugcaaguucgacgaggacgacagcgagcccguccugaagggcgugaagcuccacuacacgugaggacuaguuauaagacugacuagcccgaugggccucccaacgggcccuccuccccuccuugcaccgagauuaaucaaaggcucuuuucagagccaccaaaaaaaaaaaaaaaaaaaaaaaaaaaaaaaaaaaaaaaaaaaaaaaaaaaaaaaaaaaaaaaaaaaaaaaaaaaaaaaaaaaaaaaaaaaaaaaaaaaaa

SEQ ID NO: 24095 - RNA, 4035 nt, Artificial Sequence
  SARS-CoV-2/Wuhan/WIV05/2019__EPI_ISL_402128 spike protein mRNA gc (1-1273)(D614G_I692V)
aggagaaagcuuaccauguucguguuccugguccuccugccccuggugagcucccagugcgugaaccucaccacccgcacgcagcugccgcccgccuacaccaacagcuucacccggggcgucuacuaccccgacaagguguuccgcuccagcgugcugcacuccacccaggaccucuuccugcccuucuucagcaacgucacgugguuccacgccauccacguguccgggaccaacggcaccaagcgguucgacaacccggugcugcccuucaacgacggggucuacuucgcgagcaccgagaaguccaacaucauccgcggcuggaucuucgggacgacccucgacagcaagacccagucccugcugaucgugaacaacgccaccaacguggucaucaaggugugcgaguuccaguucugcaacgaccccuuccucggcguguacuaccacaagaacaacaagagcuggauggaguccgaguuccgggucuacagcuccgccaacaacugcacguucgaguacgugagccagcccuuccugauggaccuggagggcaagcaggggaacuucaagaaccuccgcgaguucguguucaagaacaucgacggcuacuucaagaucuacuccaagcacaccccgaucaaccugguccgggaccugccccagggguucagcgcccucgagccccugguggaccugcccaucggcaucaacaucacccgcuuccagacccuccuggcccugcaccgguccuaccucacgccgggggacagcagcuccggcuggaccgcgggcgccgccgccuacuacgugggguaccugcagccccgcaccuuccugcucaaguacaacgagaacggcaccaucacggacgcggucgacugcgcccuggacccccugagcgagaccaagugcacccucaaguccuucaccguggagaaggggaucuaccagacgagcaacuuccgggugcagcccaccgaguccaucguccgcuucccgaacaucaccaaccugugccccuucggcgagguguucaacgccacccgguucgccagcgucuacgccuggaaccgcaagcggaucuccaacugcguggcggacuacagcgugcuguacaacuccgccagcuucuccacguucaagugcuacggcgucagccccaccaagcucaacgaccugugcuucaccaacguguacgccgacuccuucgugauccgcggggacgagguccggcagaucgcccccggccagaccgggaagaucgccgacuacaacuacaagcugccggacgacuucacgggcugcgugaucgcguggaacagcaacaaccucgacuccaaggucgggggcaacuacaacuaccuguaccgccuguuccgcaagagcaaccucaagcccuucgagcgggacaucuccaccgagaucuaccaggccggcagcacccccugcaacgggguggagggcuucaacugcuacuucccccugcaguccuacggguuccagccgaccaacggcgugggguaccagcccuaccggguggucgugcugagcuucgagcuccugcacgcccccgccacggugugcggccccaagaaguccaccaaccuggucaagaacaagugcgugaacuucaacuucaacggccucaccgggaccggcgugcugaccgagagcaacaagaaguuccugccguuccagcaguucgggcgcgacaucgccgacacgaccgacgcgguccgcgacccccagacccuggagauccucgacaucacccccugcagcuucggcgggguguccgugaucacgccgggcaccaacaccagcaaccaggucgccgugcuguaccagggcgugaacugcaccgagguccccguggccauccacgccgaccagcugacgcccaccuggcggguguacuccaccgggagcaacgucuuccagacccgcgccggcugccucaucggggcggagcacgugaacaacuccuacgagugcgacauccccaucggcgccggcaucugcgccagcuaccagacgcagaccaacuccccgcggcgcgcccggagcguggcgucccagagcgucaucgccuacaccaugucccugggggccgagaacagcguggccuacuccaacaacagcaucgccauccccaccaacuucacgaucuccgugaccaccgagauccugcccgucagcaugaccaagacgagcguggacugcaccauguacaucugcggcgacuccaccgagugcagcaaccuccugcugcaguacggguccuucugcacccagcucaaccgcgcgcugacgggcaucgccguggagcaggacaagaacacccaggaggucuucgcccaggugaagcagaucuacaagacgcccccgaucaaggacuucgggggcuucaacuucagccagauccugcccgaccccuccaagcccagcaagcgguccuucaucgaggaccuccuguucaacaaggugacccuggccgacgccggcuucaucaagcaguacggggacugccucggcgacaucgcggcccgcgaccugaucugcgcccagaaguucaacgggcugaccguccucccgccccugcugaccgacgagaugaucgcccaguacaccagcgcccuccuggcgggcaccaucacguccggguggaccuucggcgccggcgccgcccugcagauccccuucgcgaugcagauggccuaccgguucaacgggaucggcgugacccagaacgugcucuacgagaaccagaagcugaucgccaaccaguucaacagcgccaucgggaagauccaggacucccugagcuccaccgccagcgcgcucggcaagcugcaggacgucgugaaccagaacgcccaggcccugaacacgcucgugaagcagcuguccagcaacuucggggccaucuccagcguccugaacgacauccucucccgccuggacaagguggaggccgaggugcagaucgaccggcugaucaccggccgccuccagagccugcagaccuacgucacccagcagcugauccgggcggccgagauccgcgccagcgccaaccucgccgcgaccaagauguccgagugcgugcugggccagagcaagcggguggacuucugcgggaagggcuaccaccugauguccuucccccagagcgccccgcacggggucguguuccuccacgucacguacgugcccgcccaggagaagaacuucaccaccgcccccgcgaucugccacgacggcaaggcccacuucccccgcgaggggguguucgucuccaacggcacccacugguucgugacgcagcggaacuucuacgagccgcagaucaucaccaccgacaacaccuucgugagcggcaacugcgacgucgugaucgggaucgugaacaacacggucuacgacccccugcagcccgagcuggacuccuucaaggaggagcucgacaaguacuucaagaaccacaccagccccgacguggaccugggcgacaucuccgggaucaacgccagcguggucaacauccagaaggagaucgaccgccugaacgagguggccaagaaccucaacgagucccugaucgaccugcaggagcucggcaaguacgagcaguacaucaaguggccgugguacaucuggcugggcuucaucgccgggcugaucgcgaucgugauggucaccaucaugcucugcugcaugaccagcugcugcuccugccugaagggcugcugcagcugcggguccugcugcaaguucgacgaggacgacagcgagcccgugcugaagggcgugaagcuccacuacacgugaggacuaguuauaagacugacuagcccgaugggccucccaacgggcccuccuccccuccuugcaccgagauuaaucaaaggcucuuuucagagccaccaaaaaaaaaaaaaaaaaaaaaaaaaaaaaaaaaaaaaaaaaaaaaaaaaaaaaaaaaaaaaaaaaaaaaaaaaaaaaaaaaaaaaaaaaaaaaaaaaaaaa

SEQ ID NO: 24096 - RNA, 4035 nt, Artificial Sequence
  SARS-CoV-2/Wuhan/WIV05/2019__EPI_ISL_402128 spike protein mRNA gc (1-1273)(D614G_M1229I)
aggagaaagcuuaccauguucguguuccugguccuccugccccuggugagcucccagugcgugaaccucaccacccgcacgcagcugccgcccgccuacaccaacagcuucacccggggcgucuacuaccccgacaagguguuccgcuccagcgugcugcacuccacccaggaccucuuccugcccuucuucagcaacgucacgugguuccacgccauccacguguccgggaccaacggcaccaagcgguucgacaacccggugcugcccuucaacgacggggucuacuucgcgagcaccgagaaguccaacaucauccgcggcuggaucuucgggacgacccucgacagcaagacccagucccugcugaucgugaacaacgccaccaacguggucaucaaggugugcgaguuccaguucugcaacgaccccuuccucggcguguacuaccacaagaacaacaagagcuggauggaguccgaguuccgggucuacagcuccgccaacaacugcacguucgaguacgugagccagcccuuccugauggaccuggagggcaagcaggggaacuucaagaaccuccgcgaguucguguucaagaacaucgacggcuacuucaagaucuacuccaagcacaccccgaucaaccugguccgggaccugccccagggguucagcgcccucgagccccugguggaccugcccaucggcaucaacaucacccgcuuccagacccuccuggcccugcaccgguccuaccucacgccgggggacagcagcuccggcuggaccgcgggcgccgccgccuacuacgugggguaccugcagccccgcaccuuccugcucaaguacaacgagaacggcaccaucacggacgcggucgacugcgcccuggacccccugagcgagaccaagugcacccucaaguccuucaccguggagaaggggaucuaccagacgagcaacuuccgggugcagcccaccgaguccaucguccgcuucccgaacaucaccaaccugugccccuucggcgagguguucaacgccacccgguucgccagcgucuacgccuggaaccgcaagcggaucuccaacugcguggcggacuacagcgugcuguacaacuccgccagcuucuccacguucaagugcuacggcgucagccccaccaagcucaacgaccugugcuucaccaacguguacgccgacuccuucgugauccgcggggacgagguccggcagaucgcccccggccagaccgggaagaucgccgacuacaacuacaagcugccggacgacuucacgggcugcgugaucgcguggaacagcaacaaccucgacuccaaggucgggggcaacuacaacuaccuguaccgccuguuccgcaagagcaaccucaagcccuucgagcgggacaucuccaccgagaucuaccaggccggcagcacccccugcaacgggguggagggcuucaacugcuacuucccccugcaguccuacggguuccagccgaccaacggcgugggguaccagcccuaccggguggucgugcugagcuucgagcuccugcacgcccccgccacggugugcggccccaagaaguccaccaaccuggucaagaacaagugcgugaacuucaacuucaacggccucaccgggaccggcgugcugaccgagagcaacaagaaguuccugccguuccagcaguucgggcgcgacaucgccgacacgaccgacgcgguccgcgacccccagacccuggagauccucgacaucacccccugcagcuucggcgggguguccgugaucacgccgggcaccaacaccagcaaccaggucgccgugcuguaccagggcgugaacugcaccgagguccccguggccauccacgccgaccagcugacgcccaccuggcggguguacuccaccgggagcaacgucuuccagacccgcgccggcugccucaucggggcggagcacgugaacaacuccuacgagugcgacauccccaucggcgccggcaucugcgccagcuaccagacgcagaccaacuccccgcggcgcgcccggagcguggcgucccagagcaucaucgccuacaccaugucccugggggccgagaacagcgucgccuacuccaacaacagcaucgccauccccaccaacuucacgaucuccgugaccaccgagauccugcccgugagcaugaccaagacgagcgucgacugcaccauguacaucugcggcgacuccaccgagugcagcaaccuccugcugcaguacggguccuucugcacccagcucaaccgcgcgcugacgggcaucgccguggagcaggacaagaacacccaggagguguucgcccaggucaagcagaucuacaagacgcccccgaucaaggacuucgggggcuucaacuucagccagauccugcccgaccccuccaagcccagcaagcgguccuucaucgaggaccuccuguucaacaaggugacccuggccgacgccggcuucaucaagcaguacggggacugccucggcgacaucgcggcccgcgaccugaucugcgcccagaaguucaacgggcugaccgugcucccgccccugcugaccgacgagaugaucgcccaguacaccagcgcccuccuggcgggcaccaucacguccggguggaccuucggcgccggcgccgcccugcagauccccuucgcgaugcagauggccuaccgguucaacgggaucggcgucacccagaacgugcucuacgagaaccagaagcugaucgccaaccaguucaacagcgccaucgggaagauccaggacucccugagcuccaccgccagcgcgcucggcaagcugcaggacguggucaaccagaacgcccaggcccugaacacgcucgugaagcagcuguccagcaacuucggggccaucuccagcgugcugaacgacauccucucccgccuggacaaggucgaggccgaggugcagaucgaccggcugaucaccggccgccuccagagccugcagaccuacgugacccagcagcugauccgggcggccgagauccgcgccagcgccaaccucgccgcgaccaagauguccgagugcguccugggccagagcaagcggguggacuucugcgggaagggcuaccaccugauguccuucccccagagcgccccgcacgggguggucuuccuccacgugacguacguccccgcccaggagaagaacuucaccaccgcccccgcgaucugccacgacggcaaggcccacuucccccgcgaggggguguucguguccaacggcacccacugguucgucacgcagcggaacuucuacgagccgcagaucaucaccaccgacaacaccuucgugagcggcaacugcgacguggucaucgggaucgugaacaacacgguguacgacccccugcagcccgagcuggacuccuucaaggaggagcucgacaaguacuucaagaaccacaccagccccgacgucgaccugggcgacaucuccgggaucaacgccagcguggugaacauccagaaggagaucgaccgccugaacgaggucgccaagaaccucaacgagucccugaucgaccugcaggagcucggcaaguacgagcaguacaucaaguggccgugguacaucuggcugggcuucaucgccgggcugaucgcgaucgugaucgugaccaucaugcucugcugcaugaccagcugcugcuccugccugaagggcugcugcagcugcggguccugcugcaaguucgacgaggacgacagcgagcccguccugaagggcgugaagcuccacuacacgugaggacuaguuauaagacugacuagcccgaugggccucccaacgggcccuccuccccuccuugcaccgagauuaaucaaaggcucuuuucagagccaccaaaaaaaaaaaaaaaaaaaaaaaaaaaaaaaaaaaaaaaaaaaaaaaaaaaaaaaaaaaaaaaaaaaaaaaaaaaaaaaaaaaaaaaaaaaaaaaaaaaaa

SEQ ID NO: 24097 - RNA, 4029 nt, Artificial Sequence
  SARS-CoV-2/Wuhan/WIV05/2019__EPI_ISL_402128 spike protein mRNA gc (1-1273)(H69del_V70del_A222V_Y453F_S477N_D614G_I692V)
aggagaaagcuuaccauguucguguuccugguccuccugccccuggugagcucccagugcgugaaccucaccacccgcacgcagcugccgcccgccuacaccaacagcuucacccggggcgucuacuaccccgacaagguguuccgcuccagcgugcugcacuccacccaggaccucuuccugcccuucuucagcaacgucacgugguuccacgccaucuccgggaccaacggcaccaagcgguucgacaacccggugcugcccuucaacgacgggguguacuucgcgagcaccgagaaguccaacaucauccgcggcuggaucuucgggacgacccucgacagcaagacccagucccugcugaucgucaacaacgccaccaacguggugaucaaggucugcgaguuccaguucugcaacgaccccuuccucggcguguacuaccacaagaacaacaagagcuggauggaguccgaguuccggguguacagcuccgccaacaacugcacguucgaguacgucagccagcccuuccugauggaccuggagggcaagcaggggaacuucaagaaccuccgcgaguucguguucaagaacaucgacggcuacuucaagaucuacuccaagcacaccccgaucaaccuggugcgggaccugccccagggguucagcguccucgagccccugguggaccugcccaucggcaucaacaucacccgcuuccagacccuccuggcccugcaccgguccuaccucacgccgggggacagcagcuccggcuggaccgccggcgcggccgccuacuacgugggguaccugcagccccgcaccuuccugcucaaguacaacgagaacggcaccaucacggacgccgucgacugcgcgcuggacccccugagcgagaccaagugcacccucaaguccuucaccguggagaaggggaucuaccagacgagcaacuuccgggugcagcccaccgaguccaucguccgcuucccgaacaucaccaaccugugccccuucggcgagguguucaacgccacccgguucgccagcgucuacgccuggaaccgcaagcggaucuccaacugcguggccgacuacagcgugcuguacaacuccgcgagcuucuccacguucaagugcuacggcgucagccccaccaagcucaacgaccugugcuucaccaacguguacgccgacuccuucgugauccgcggggacgagguccggcagaucgcccccggccagaccgggaagaucgccgacuacaacuacaagcugccggacgacuucacgggcugcgugaucgccuggaacagcaacaaccucgacuccaaggucgggggcaacuacaacuaccuguuccgccuguuccgcaagagcaaccucaagcccuucgagcgggacaucuccaccgagaucuaccaggcgggcaacacccccugcaacgggguggagggcuucaacugcuacuucccccugcagagcuacggguuccagccgaccaacggcgugggguaccagcccuaccggguggucgugcuguccuucgagcuccugcacgcccccgccacggugugcggccccaagaaguccaccaaccuggucaagaacaagugcgugaacuucaacuucaacggccucaccgggaccggcgugcugaccgagagcaacaagaaguuccugccguuccagcaguucgggcgcgacaucgccgacacgaccgacgccguccgcgacccccagacccuggagauccucgacaucacccccugcagcuucggcggggugagcgugaucacgccgggcaccaacaccuccaaccaggucgcggugcuguaccagggcgugaacugcaccgagguccccguggccauccacgccgaccagcugacgcccaccuggcggguguacagcaccggguccaacgucuuccagacccgcgccggcugccucaucggggccgagcacgugaacaacagcuacgagugcgacauccccaucggcgcgggcaucugcgccuccuaccagacgcagaccaacagcccgcggcgcgcccgguccguggccagccaguccgucaucgcguacaccaugagccugggggccgagaacuccguggccuacagcaacaacuccaucgccauccccaccaacuucacgaucagcgugaccaccgagauccugcccgucuccaugaccaagacgagcguggacugcaccauguacaucugcggcgacagcaccgagugcuccaaccuccugcugcaguacgggagcuucugcacccagcucaaccgcgcccugacgggcaucgcgguggagcaggacaagaacacccaggaggucuucgcccaggugaagcagaucuacaagacgcccccgaucaaggacuucgggggcuucaacuucucccagauccugcccgaccccagcaagcccuccaagcggagcuucaucgaggaccuccuguucaacaaggugacccuggccgacgccggcuucaucaagcaguacggggacugccucggcgacaucgccgcgcgcgaccugaucugcgcccagaaguucaacgggcugaccguccucccgccccugcugaccgacgagaugaucgcccaguacaccuccgcccuccuggccggcaccaucacgagcggguggaccuucggcgcgggcgccgcccugcagauccccuucgccaugcagauggcguaccgguucaacgggaucggcgugacccagaacgugcucuacgagaaccagaagcugaucgccaaccaguucaacuccgccaucgggaagauccaggacagccuguccagcaccgccuccgcccucggcaagcugcaggacgucgugaaccagaacgcgcaggcccugaacacgcucgugaagcagcugagcuccaacuucggggccaucagcuccguccugaacgacauccucagccgccuggacaagguggaggccgaggugcagaucgaccggcugaucaccggccgccuccagucccugcagaccuacgucacccagcagcugauccgggccgcggagauccgcgccagcgccaaccucgccgccaccaagaugagcgagugcgugcugggccaguccaagcggguggacuucugcgggaagggcuaccaccugaugagcuucccccaguccgcgccgcacggggucguguuccuccacgucacguacgugcccgcccaggagaagaacuucaccaccgcccccgccaucugccacgacggcaaggcgcacuucccccgcgaggggguguucgucagcaacggcacccacugguucgugacgcagcggaacuucuacgagccgcagaucaucaccaccgacaacaccuucguguccggcaacugcgacgucgugaucgggaucgugaacaacacggucuacgacccccugcagcccgagcuggacagcuucaaggaggagcucgacaaguacuucaagaaccacaccucccccgacguggaccugggcgacaucagcgggaucaacgccuccguggucaacauccagaaggagaucgaccgccugaacgagguggccaagaaccucaacgagagccugaucgaccugcaggagcucggcaaguacgagcaguacaucaaguggccgugguacaucuggcugggcuucaucgccgggcugaucgccaucgugauggucaccaucaugcucugcugcaugaccuccugcugcagcugccugaagggcugcugcuccugcgggagcugcugcaaguucgacgaggacgacuccgagcccgugcugaagggcgugaagcuccacuacacgugaggacuaguuauaagacugacuagcccgaugggccucccaacgggcccuccuccccuccuugcaccgagauuaaucaaaggcucuuuucagagccaccaaaaaaaaaaaaaaaaaaaaaaaaaaaaaaaaaaaaaaaaaaaaaaaaaaaaaaaaaaaaaaaaaaaaaaaaaaaaaaaaaaaaaaaaaaaaaaaaaaaaa

SEQ ID NO: 24098 - RNA, 4029 nt, Artificial Sequence
  SARS-CoV-2/Wuhan/WIV05/2019__EPI_ISL_402128 spike protein mRNA gc (1-1273)(H69del_V70del_Y453F_D614G_I692V_M1229I)
aggagaaagcuuaccauguucguguuccugguccuccugccccuggugagcucccagugcgugaaccucaccacccgcacgcagcugccgcccgccuacaccaacagcuucacccggggcgucuacuaccccgacaagguguuccgcuccagcgugcugcacuccacccaggaccucuuccugcccuucuucagcaacgucacgugguuccacgccaucuccgggaccaacggcaccaagcgguucgacaacccggugcugcccuucaacgacgggguguacuucgcgagcaccgagaaguccaacaucauccgcggcuggaucuucgggacgacccucgacagcaagacccagucccugcugaucgucaacaacgccaccaacguggugaucaaggucugcgaguuccaguucugcaacgaccccuuccucggcguguacuaccacaagaacaacaagagcuggauggaguccgaguuccggguguacagcuccgccaacaacugcacguucgaguacgucagccagcccuuccugauggaccuggagggcaagcaggggaacuucaagaaccuccgcgaguucguguucaagaacaucgacggcuacuucaagaucuacuccaagcacaccccgaucaaccuggugcgggaccugccccagggguucagcgcccucgagccccuggucgaccugcccaucggcaucaacaucacccgcuuccagacccuccuggcccugcaccgguccuaccucacgccgggggacagcagcuccggcuggaccgcgggcgccgccgccuacuacgugggguaccugcagccccgcaccuuccugcucaaguacaacgagaacggcaccaucacggacgcgguggacugcgcccuggacccccugagcgagaccaagugcacccucaaguccuucaccgucgagaaggggaucuaccagacgagcaacuuccgggugcagcccaccgaguccaucgugcgcuucccgaacaucaccaaccugugccccuucggcgaggucuucaacgccacccgguucgccagcguguacgccuggaaccgcaagcggaucuccaacugcgucgcggacuacagcgugcuguacaacuccgccagcuucuccacguucaagugcuacggcgugagccccaccaagcucaacgaccugugcuucaccaacgucuacgccgacuccuucgugauccgcggggacgaggugcggcagaucgcccccggccagaccgggaagaucgccgacuacaacuacaagcugccggacgacuucacgggcugcgucaucgcguggaacagcaacaaccucgacuccaaggucgggggcaacuacaacuaccuguuccgccuguuccgcaagagcaaccucaagcccuucgagcgggacaucuccaccgagaucuaccaggccggcagcacccccugcaacgggguggagggcuucaacugcuacuucccccugcaguccuacggguuccagccgaccaacggcgugggguaccagcccuaccggguggugguccugagcuucgagcuccugcacgcccccgccacggugugcggccccaagaaguccaccaaccuggugaagaacaagugcgucaacuucaacuucaacggccucaccgggaccggcgugcugaccgagagcaacaagaaguuccugccguuccagcaguucgggcgcgacaucgccgacacgaccgacgcggugcgcgacccccagacccuggagauccucgacaucacccccugcagcuucggcggggucuccgugaucacgccgggcaccaacaccagcaaccagguggccguccuguaccagggcgugaacugcaccgaggugcccgucgccauccacgccgaccagcugacgcccaccuggcggguguacuccaccgggagcaacguguuccagacccgcgccggcugccucaucggggcggagcacgucaacaacuccuacgagugcgacauccccaucggcgccggcaucugcgccagcuaccagacgcagaccaacuccccgcggcgcgcccggagcguggcgucccagagcgugaucgccuacaccaugucccugggggccgagaacagcgucgccuacuccaacaacagcaucgccauccccaccaacuucacgaucuccgugaccaccgagauccugcccgugagcaugaccaagacgagcgucgacugcaccauguacaucugcggcgacuccaccgagugcagcaaccuccugcugcaguacggguccuucugcacccagcucaaccgcgcgcugacgggcaucgccguggagcaggacaagaacacccaggagguguucgcccaggucaagcagaucuacaagacgcccccgaucaaggacuucgggggcuucaacuucagccagauccugcccgaccccuccaagcccagcaagcgguccuucaucgaggaccuccuguucaacaaggugacccuggccgacgccggcuucaucaagcaguacggggacugccucggcgacaucgcggcccgcgaccugaucugcgcccagaaguucaacgggcugaccgugcucccgccccugcugaccgacgagaugaucgcccaguacaccagcgcccuccuggcgggcaccaucacguccggguggaccuucggcgccggcgccgcccugcagauccccuucgcgaugcagauggccuaccgguucaacgggaucggcgucacccagaacgugcucuacgagaaccagaagcugaucgccaaccaguucaacagcgccaucgggaagauccaggacucccugagcuccaccgccagcgcgcucggcaagcugcaggacguggucaaccagaacgcccaggcccugaacacgcucgugaagcagcuguccagcaacuucggggccaucuccagcgugcugaacgacauccucucccgccuggacaaggucgaggccgaggugcagaucgaccggcugaucaccggccgccuccagagccugcagaccuacgugacccagcagcugauccgggcggccgagauccgcgccagcgccaaccucgccgcgaccaagauguccgagugcguccugggccagagcaagcggguggacuucugcgggaagggcuaccaccugauguccuucccccagagcgccccgcacgggguggucuuccuccacgugacguacguccccgcccaggagaagaacuucaccaccgcccccgcgaucugccacgacggcaaggcccacuucccccgcgaggggguguucguguccaacggcacccacugguucgucacgcagcggaacuucuacgagccgcagaucaucaccaccgacaacaccuucgugagcggcaacugcgacguggucaucgggaucgugaacaacacgguguacgacccccugcagcccgagcuggacuccuucaaggaggagcucgacaaguacuucaagaaccacaccagccccgacgucgaccugggcgacaucuccgggaucaacgccagcguggugaacauccagaaggagaucgaccgccugaacgaggucgccaagaaccucaacgagucccugaucgaccugcaggagcucggcaaguacgagcaguacaucaaguggccgugguacaucuggcugggcuucaucgccgggcugaucgcgaucgugaucgugaccaucaugcucugcugcaugaccagcugcugcuccugccugaagggcugcugcagcugcggguccugcugcaaguucgacgaggacgacagcgagcccguccugaagggcgugaagcuccacuacacgugaggacuaguuauaagacugacuagcccgaugggccucccaacgggcccuccuccccuccuugcaccgagauuaaucaaaggcucuuuucagagccaccaaaaaaaaaaaaaaaaaaaaaaaaaaaaaaaaaaaaaaaaaaaaaaaaaaaaaaaaaaaaaaaaaaaaaaaaaaaaaaaaaaaaaaaaaaaaaaaaaaaaa

SEQ ID NO: 24099 - RNA, 4026 nt, Artificial Sequence
  SARS-CoV-2/Wuhan/WIV05/2019__EPI_ISL_402128 spike protein mRNA gc (1-1273)(H69del_V70del_Y144del_N501Y_A570D_D614G_P681H_T716I_S982 A_D1118H)
aggagaaagcuuaccauguucguguuccugguccuccugccccuggugagcucccagugcgugaaccucaccacccgcacgcagcugccgcccgccuacaccaacagcuucacccggggcgucuacuaccccgacaagguguuccgcuccagcgugcugcacuccacccaggaccucuuccugcccuucuucagcaacgucacgugguuccacgccaucuccgggaccaacggcaccaagcgguucgacaacccggugcugcccuucaacgacgggguguacuucgcgagcaccgagaaguccaacaucauccgcggcuggaucuucgggacgacccucgacagcaagacccagucccugcugaucgucaacaacgccaccaacguggugaucaaggucugcgaguuccaguucugcaacgaccccuuccucggcguguaccacaagaacaacaagagcuggauggaguccgaguuccggguguacagcuccgccaacaacugcacguucgaguacgucagccagcccuuccugauggaccuggagggcaagcaggggaacuucaagaaccuccgcgaguucguguucaagaacaucgacggcuacuucaagaucuacuccaagcacaccccgaucaaccuggugcgggaccugccccagggguucagcgcccucgagccccuggucgaccugcccaucggcaucaacaucacccgcuuccagacccuccuggcccugcaccgguccuaccucacgccgggggacagcagcuccggcuggaccgcgggcgccgccgccuacuacgugggguaccugcagccccgcaccuuccugcucaaguacaacgagaacggcaccaucacggacgcgguggacugcgcccuggacccccugagcgagaccaagugcacccucaaguccuucaccgucgagaaggggaucuaccagacgagcaacuuccgggugcagcccaccgaguccaucgugcgcuucccgaacaucaccaaccugugccccuucggcgaggucuucaacgccacccgguucgccagcguguacgccuggaaccgcaagcggaucuccaacugcgucgcggacuacagcgugcuguacaacuccgccagcuucuccacguucaagugcuacggcgugagccccaccaagcucaacgaccugugcuucaccaacgucuacgccgacuccuucgugauccgcggggacgaggugcggcagaucgcccccggccagaccgggaagaucgccgacuacaacuacaagcugccggacgacuucacgggcugcgucaucgcguggaacagcaacaaccucgacuccaaggucgggggcaacuacaacuaccuguaccgccuguuccgcaagagcaaccucaagcccuucgagcgggacaucuccaccgagaucuaccaggccggcagcacccccugcaacgggguggagggcuucaacugcuacuucccccugcaguccuacggguuccagccgaccuacggcgugggguaccagcccuaccggguggugguccugagcuucgagcuccugcacgcccccgccacggugugcggccccaagaaguccaccaaccuggugaagaacaagugcgucaacuucaacuucaacggccucaccgggaccggcgugcugaccgagagcaacaagaaguuccugccguuccagcaguucgggcgcgacaucgacgacacgaccgacgccgugcgcgacccccagacccuggagauccucgacaucacccccugcagcuucggcggggucuccgugaucacgccgggcaccaacaccagcaaccagguggcgguccuguaccagggcgugaacugcaccgaggugcccgucgccauccacgccgaccagcugacgcccaccuggcggguguacuccaccgggagcaacguguuccagacccgcgccggcugccucaucggggccgagcacgucaacaacuccuacgagugcgacauccccaucggcgcgggcaucugcgccagcuaccagacgcagaccaacucccaccggcgcgcccggagcguggccucccagagcaucaucgcguacaccaugucccugggggccgagaacagcguggccuacuccaacaacagcaucgccaucccgaucaacuucaccaucuccgucacgaccgagauccugcccgugagcaugaccaagaccagcguggacugcacgauguacaucugcggcgacuccaccgagugcagcaaccuccugcugcaguacggguccuucugcacccagcucaaccgcgcccugaccggcaucgcggucgagcaggacaagaacacgcaggagguguucgcccaggugaagcagaucuacaagaccccgcccaucaaggacuucgggggcuucaacuucagccagauccugcccgaccccuccaagcccagcaagcgguccuucaucgaggaccuccuguucaacaaggucacccuggccgacgccggcuucaucaagcaguacggggacugccucggcgacaucgccgcgcgcgaccugaucugcgcccagaaguucaacgggcugaccgugcugcccccgcuccugacggacgagaugaucgcccaguacaccagcgcccuccuggccggcaccaucaccuccggguggacguucggcgcgggcgccgcccugcagauccccuucgccaugcagauggcguaccgguucaacgggaucggcgugacccagaacguccucuacgagaaccagaagcugaucgccaaccaguucaacagcgccaucgggaagauccaggacucccugagcuccaccgccagcgcccucggcaagcugcaggacguggugaaccagaacgcgcaggcccugaacacccucgucaagcagcuguccagcaacuucggggccaucuccagcgugcugaacgacauccucgcccgccuggacaagguggaggccgagguccagaucgaccggcugaucacgggccgccuccagucccugcagaccuacgugacccagcagcugauccgggcggccgagauccgcgccagcgccaaccucgccgcgaccaagaugagcgagugcgugcugggccaguccaagcgggucgacuucugcgggaagggcuaccaccugaugagcuucccccaguccgcgccccacggggugguguuccuccacgucaccuacgugccggcccaggagaagaacuucacgaccgcccccgccaucugccacgacggcaaggcccacuucccccgcgagggggucuucgugagcaacggcacccacugguucgugacccagcggaacuucuacgagccccagaucaucacgacccacaacaccuucgucuccggcaacugcgacguggugaucgggaucgucaacaacaccguguacgacccgcugcagcccgagcuggacagcuucaaggaggagcucgacaaguacuucaagaaccacacgucccccgacguggaccugggcgacaucagcgggaucaacgccuccgucgugaacauccagaaggagaucgaccgccugaacgagguggccaagaaccucaacgagagccugaucgaccugcaggagcucggcaaguacgagcaguacaucaaguggcccugguacaucuggcugggcuucaucgccgggcugaucgcgaucgucauggugaccaucaugcucugcugcaugaccuccugcugcagcugccugaagggcugcugcuccugcgggagcugcugcaaguucgacgaggacgacuccgagccggugcugaagggcgucaagcuccacuacaccugaggacuaguuauaagacugacuagcccgaugggccucccaacgggcccuccuccccuccuugcaccgagauuaaucaaaggcucuuuucagagccaccaaaaaaaaaaaaaaaaaaaaaaaaaaaaaaaaaaaaaaaaaaaaaaaaaaaaaaaaaaaaaaaaaaaaaaaaaaaaaaaaaaaaaaaaaaaaaaaaaaaaa

SEQ ID NO: 24100 - RNA, 4035 nt, Artificial Sequence
  SARS-CoV-2/Wuhan/WIV05/2019__EPI_ISL_402128 spike protein mRNA gc (1-1273)(K417N_E484K_N501Y_D614G)
aggagaaagcuuaccauguucguguuccugguccuccugccccuggugagcucccagugcgugaaccucaccacccgcacgcagcugccgcccgccuacaccaacagcuucacccggggcgucuacuaccccgacaagguguuccgcuccagcgugcugcacuccacccaggaccucuuccugcccuucuucagcaacgucacgugguuccacgccauccacguguccgggaccaacggcaccaagcgguucgacaacccggugcugcccuucaacgacggggucuacuucgcgagcaccgagaaguccaacaucauccgcggcuggaucuucgggacgacccucgacagcaagacccagucccugcugaucgugaacaacgccaccaacguggucaucaaggugugcgaguuccaguucugcaacgaccccuuccucggcguguacuaccacaagaacaacaagagcuggauggaguccgaguuccgggucuacagcuccgccaacaacugcacguucgaguacgugagccagcccuuccugauggaccuggagggcaagcaggggaacuucaagaaccuccgcgaguucguguucaagaacaucgacggcuacuucaagaucuacuccaagcacaccccgaucaaccugguccgggaccugccccagggguucagcgcccucgagccccugguggaccugcccaucggcaucaacaucacccgcuuccagacccuccuggcccugcaccgguccuaccucacgccgggggacagcagcuccggcuggaccgcgggcgccgccgccuacuacgugggguaccugcagccccgcaccuuccugcucaaguacaacgagaacggcaccaucacggacgcggucgacugcgcccuggacccccugagcgagaccaagugcacccucaaguccuucaccguggagaaggggaucuaccagacgagcaacuuccgggugcagcccaccgaguccaucguccgcuucccgaacaucaccaaccugugccccuucggcgagguguucaacgccacccgguucgccagcgucuacgccuggaaccgcaagcggaucuccaacugcguggcggacuacagcgugcuguacaacuccgccagcuucuccacguucaagugcuacggcgucagccccaccaagcucaacgaccugugcuucaccaacguguacgccgacuccuucgugauccgcggggacgagguccggcagaucgcccccggccagaccgggaacaucgccgacuacaacuacaagcugccggacgacuucacgggcugcgugaucgcguggaacagcaacaaccucgacuccaaggucgggggcaacuacaacuaccuguaccgccuguuccgcaagagcaaccucaagcccuucgagcgggacaucuccaccgagaucuaccaggccggcagcacccccugcaacggggugaagggcuucaacugcuacuucccccugcaguccuacggguuccagccgaccuacggcgugggguaccagcccuaccggguggucgugcugagcuucgagcuccugcacgcccccgccacggugugcggccccaagaaguccaccaaccuggucaagaacaagugcgugaacuucaacuucaacggccucaccgggaccggcgugcugaccgagagcaacaagaaguuccugccguuccagcaguucgggcgcgacaucgccgacacgaccgacgcgguccgcgacccccagacccuggagauccucgacaucacccccugcagcuucggcgggguguccgugaucacgccgggcaccaacaccagcaaccaggucgccgugcuguaccagggcgugaacugcaccgagguccccguggccauccacgccgaccagcugacgcccaccuggcggguguacuccaccgggagcaacgucuuccagacccgcgccggcugccucaucggggcggagcacgugaacaacuccuacgagugcgacauccccaucggcgccggcaucugcgccagcuaccagacgcagaccaacuccccgcggcgcgcccggagcguggcgucccagagcaucaucgccuacaccaugucccugggggccgagaacagcgucgccuacuccaacaacagcaucgccauccccaccaacuucacgaucuccgugaccaccgagauccugcccgugagcaugaccaagacgagcgucgacugcaccauguacaucugcggcgacuccaccgagugcagcaaccuccugcugcaguacggguccuucugcacccagcucaaccgcgcgcugacgggcaucgccguggagcaggacaagaacacccaggagguguucgcccaggucaagcagaucuacaagacgcccccgaucaaggacuucgggggcuucaacuucagccagauccugcccgaccccuccaagcccagcaagcgguccuucaucgaggaccuccuguucaacaaggugacccuggccgacgccggcuucaucaagcaguacggggacugccucggcgacaucgcggcccgcgaccugaucugcgcccagaaguucaacgggcugaccgugcucccgccccugcugaccgacgagaugaucgcccaguacaccagcgcccuccuggcgggcaccaucacguccggguggaccuucggcgccggcgccgcccugcagauccccuucgcgaugcagauggccuaccgguucaacgggaucggcgucacccagaacgugcucuacgagaaccagaagcugaucgccaaccaguucaacagcgccaucgggaagauccaggacucccugagcuccaccgccagcgcgcucggcaagcugcaggacguggucaaccagaacgcccaggcccugaacacgcucgugaagcagcuguccagcaacuucggggccaucuccagcgugcugaacgacauccucucccgccuggacaaggucgaggccgaggugcagaucgaccggcugaucaccggccgccuccagagccugcagaccuacgugacccagcagcugauccgggcggccgagauccgcgccagcgccaaccucgccgcgaccaagauguccgagugcguccugggccagagcaagcggguggacuucugcgggaagggcuaccaccugauguccuucccccagagcgccccgcacgggguggucuuccuccacgugacguacguccccgcccaggagaagaacuucaccaccgcccccgcgaucugccacgacggcaaggcccacuucccccgcgaggggguguucguguccaacggcacccacugguucgucacgcagcggaacuucuacgagccgcagaucaucaccaccgacaacaccuucgugagcggcaacugcgacguggucaucgggaucgugaacaacacgguguacgacccccugcagcccgagcuggacuccuucaaggaggagcucgacaaguacuucaagaaccacaccagccccgacgucgaccugggcgacaucuccgggaucaacgccagcguggugaacauccagaaggagaucgaccgccugaacgaggucgccaagaaccucaacgagucccugaucgaccugcaggagcucggcaaguacgagcaguacaucaaguggccgugguacaucuggcugggcuucaucgccgggcugaucgcgaucgugauggugaccaucaugcucugcugcaugaccagcugcugcuccugccugaagggcugcugcagcugcggguccugcugcaaguucgacgaggacgacagcgagcccguccugaagggcgugaagcuccacuacacgugaggacuaguuauaagacugacuagcccgaugggccucccaacgggcccuccuccccuccuugcaccgagauuaaucaaaggcucuuuucagagccaccaaaaaaaaaaaaaaaaaaaaaaaaaaaaaaaaaaaaaaaaaaaaaaaaaaaaaaaaaaaaaaaaaaaaaaaaaaaaaaaaaaaaaaaaaaaaaaaaaaaaa

SEQ ID NO: 24101 - RNA, 4026 nt, Artificial Sequence
  SARS-CoV-2/Wuhan/WIV05/2019__EPI_ISL_402128 spike protein mRNA gc (1-1273)(L18F_D80A_D215G_L242del_A243del_L244del_R246I_K417N_E484 K_N501Y_D614G_A701V)
aggagaaagcuuaccauguucguguuccugguccuccugccccuggugagcucccagugcgugaacuucaccacccgcacgcagcucccgcccgccuacaccaacagcuucacccggggcgucuacuaccccgacaagguguuccgcuccagcgugcugcacuccacccaggaccuguuccuccccuucuucagcaacgucacgugguuccacgccauccacguguccgggaccaacggcaccaagcgguucgcgaacccggugcugcccuucaacgacggggucuacuucgccagcaccgagaaguccaacaucauccgcggcuggaucuucgggacgacccuggacagcaagacccagucccuccugaucgugaacaacgccaccaacguggucaucaaggugugcgaguuccaguucugcaacgaccccuuccugggcguguacuaccacaagaacaacaagagcuggauggaguccgaguuccgggucuacagcuccgccaacaacugcacguucgaguacgugagccagcccuuccucauggaccuggagggcaagcaggggaacuucaagaaccugcgcgaguucguguucaagaacaucgacggcuacuucaagaucuacuccaagcacaccccgaucaaccucguccgggggcugccccagggcuucagcgcccuggagccccucguggaccugcccaucgggaucaacaucacccgcuuccagacccugcacaucuccuaccucacgccgggcgacagcagcuccggcuggaccgcgggggccgccgccuacuacgugggcuaccugcagccccggaccuuccugcucaaguacaacgagaacgggaccaucacggacgcggucgacugcgcccuggacccccugagcgagaccaagugcacccucaaguccuucaccguggagaagggcaucuaccagacgagcaacuuccgcgugcagcccaccgaguccaucguccgguucccgaacaucaccaaccugugccccuucggcgagguguucaacgccacccgcuucgccagcgucuacgccuggaaccggaagcgcaucuccaacugcguggcggacuacagcgugcuguacaacuccgccagcuucuccacguucaagugcuacggggucagccccaccaagcucaacgaccugugcuucaccaacguguacgccgacuccuucgugauccggggcgacgagguccgccagaucgcccccgggcagaccggcaacaucgccgacuacaacuacaagcugccggacgacuucacggggugcgugaucgcguggaacagcaacaaccucgacuccaaggugggcggcaacuacaacuaccuguaccggcuguuccgcaagagcaaccucaagcccuucgagcgggacaucuccaccgagaucuaccaggccgggagcacccccugcaacggcgucaagggguucaacugcuacuucccccugcaguccuacggcuuccagccgaccuacggggugggcuaccagcccuaccgcguggucgugcugagcuucgagcuccugcacgcccccgccacggugugcggccccaagaaguccaccaaccuggucaagaacaagugcgugaacuucaacuucaacgggcucaccggcaccggggugcugaccgagagcaacaagaaguuccugccguuccagcaguucggccgggacaucgccgacacgaccgacgcgguccgcgacccccagacccucgagauccuggacaucacccccugcagcuucgggggcguguccgugaucacgccgggcaccaacaccagcaaccaggucgccgugcuguaccagggggugaacugcaccgagguccccguggccauccacgccgaccagcugacgcccaccuggcgcguguacuccaccggcagcaacgucuuccagacccgggccgggugccucaucggcgcggagcacgugaacaacuccuacgagugcgacauccccaucggcgccgggaucugcgccagcuaccagacgcagaccaacuccccgcgccgggcccgcagcguggcgucccagagcaucaucgccuacaccaugucccugggcgucgagaacagcguggccuacuccaacaacagcaucgccauccccaccaacuucacgaucuccgugaccaccgagauccugcccgucagcaugaccaagacgagcguggacugcaccauguacaucugcggggacuccaccgagugcagcaaccuccugcugcaguacggcuccuucugcacccagcucaaccgggcccugacggggaucgcgguggagcaggacaagaacacccaggaggucuucgcccaggugaagcagaucuacaagacgcccccgaucaaggacuucggcggcuucaacuucagccagauccugcccgaccccuccaagcccagcaagcgcuccuucaucgaggaccuccuguucaacaaggugacccuggccgacgccggguucaucaagcaguacggcgacugccucggggacaucgccgcgcgggaccugaucugcgcccagaaguucaacggccugaccguccucccgccccugcugaccgacgagaugaucgcccaguacaccagcgcccuccuggccgggaccaucacguccggcuggaccuucggcgcgggggccgcccugcagauccccuucgccaugcagauggcguaccgcuucaacggcaucggggugacccagaacgugcucuacgagaaccagaagcugaucgccaaccaguucaacagcgccaucggcaagauccaggacucccugagcuccaccgccagcgcccucgggaagcugcaggacgucgugaaccagaacgcgcaggcccugaacacgcucgugaagcagcuguccagcaacuucggcgccaucuccagcguccugaacgacauccucucccggcuggacaagguggaggccgaggugcagaucgaccgccugaucaccggccggcuccagagccugcagaccuacgucacccagcagcugauccgcgccgcggagauccgggccagcgccaaccucgccgccaccaagauguccgagugcgugcuggggcagagcaagcgcguggacuucugcggcaagggguaccaccugauguccuucccccagagcgcgccgcacggcgucguguuccuccacgucacguacgugcccgcccaggagaagaacuucaccaccgcccccgccaucugccacgacgggaaggcgcacuucccccgggagggcguguucgucuccaacggcacccacugguucgugacgcagcgcaacuucuacgagccgcagaucaucaccaccgacaacaccuucgugagcgggaacugcgacgucgugaucggcaucgugaacaacacggucuacgacccccugcagcccgagcuggacuccuucaaggaggagcucgacaaguacuucaagaaccacaccagccccgacguggaccugggggacaucuccggcaucaacgccagcguggucaacauccagaaggagaucgaccggcugaacgagguggccaagaaccucaacgagucccugaucgaccugcaggagcucggcaaguacgagcaguacaucaaguggccgugguacaucuggcugggguucaucgccggccugaucgccaucgugauggucaccaucaugcucugcugcaugaccagcugcugcuccugccugaaggggugcugcagcugcggcuccugcugcaaguucgacgaggacgacagcgagcccgugcugaagggggugaagcuccacuacacgugaggacuaguuauaagacugacuagcccgaugggccucccaacgggcccuccuccccuccuugcaccgagauuaaucaaaggcucuuuucagagccaccaaaaaaaaaaaaaaaaaaaaaaaaaaaaaaaaaaaaaaaaaaaaaaaaaaaaaaaaaaaaaaaaaaaaaaaaaaaaaaaaaaaaaaaaaaaaaaaaaaaaa

SEQ ID NO: 24102 - RNA, 4035 nt, Artificial Sequence
  SARS-CoV-2/Wuhan/WIV05/2019__EPI_ISL_402128 spike protein mRNA gc (1-1273)(E484K_D614G)
aggagaaagcuuaccauguucguguuccugguccuccugccccuggugagcucccagugcgugaaccucaccacccgcacgcagcugccgcccgccuacaccaacagcuucacccggggcgucuacuaccccgacaagguguuccgcuccagcgugcugcacuccacccaggaccucuuccugcccuucuucagcaacgucacgugguuccacgccauccacguguccgggaccaacggcaccaagcgguucgacaacccggugcugcccuucaacgacggggucuacuucgcgagcaccgagaaguccaacaucauccgcggcuggaucuucgggacgacccucgacagcaagacccagucccugcugaucgugaacaacgccaccaacguggucaucaaggugugcgaguuccaguucugcaacgaccccuuccucggcguguacuaccacaagaacaacaagagcuggauggaguccgaguuccgggucuacagcuccgccaacaacugcacguucgaguacgugagccagcccuuccugauggaccuggagggcaagcaggggaacuucaagaaccuccgcgaguucguguucaagaacaucgacggcuacuucaagaucuacuccaagcacaccccgaucaaccugguccgggaccugccccagggguucagcgcccucgagccccugguggaccugcccaucggcaucaacaucacccgcuuccagacccuccuggcccugcaccgguccuaccucacgccgggggacagcagcuccggcuggaccgcgggcgccgccgccuacuacgugggguaccugcagccccgcaccuuccugcucaaguacaacgagaacggcaccaucacggacgcggucgacugcgcccuggacccccugagcgagaccaagugcacccucaaguccuucaccguggagaaggggaucuaccagacgagcaacuuccgggugcagcccaccgaguccaucguccgcuucccgaacaucaccaaccugugccccuucggcgagguguucaacgccacccgguucgccagcgucuacgccuggaaccgcaagcggaucuccaacugcguggcggacuacagcgugcuguacaacuccgccagcuucuccacguucaagugcuacggcgucagccccaccaagcucaacgaccugugcuucaccaacguguacgccgacuccuucgugauccgcggggacgagguccggcagaucgcccccggccagaccgggaagaucgccgacuacaacuacaagcugccggacgacuucacgggcugcgugaucgcguggaacagcaacaaccucgacuccaaggucgggggcaacuacaacuaccuguaccgccuguuccgcaagagcaaccucaagcccuucgagcgggacaucuccaccgagaucuaccaggccggcagcacccccugcaacggggugaagggcuucaacugcuacuucccccugcaguccuacggguuccagccgaccaacggcgugggguaccagcccuaccggguggucgugcugagcuucgagcuccugcacgcccccgccacggugugcggccccaagaaguccaccaaccuggucaagaacaagugcgugaacuucaacuucaacggccucaccgggaccggcgugcugaccgagagcaacaagaaguuccugccguuccagcaguucgggcgcgacaucgccgacacgaccgacgcgguccgcgacccccagacccuggagauccucgacaucacccccugcagcuucggcgggguguccgugaucacgccgggcaccaacaccagcaaccaggucgccgugcuguaccagggcgugaacugcaccgagguccccguggccauccacgccgaccagcugacgcccaccuggcggguguacuccaccgggagcaacgucuuccagacccgcgccggcugccucaucggggcggagcacgugaacaacuccuacgagugcgacauccccaucggcgccggcaucugcgccagcuaccagacgcagaccaacuccccgcggcgcgcccggagcguggcgucccagagcaucaucgccuacaccaugucccugggggccgagaacagcgucgccuacuccaacaacagcaucgccauccccaccaacuucacgaucuccgugaccaccgagauccugcccgugagcaugaccaagacgagcgucgacugcaccauguacaucugcggcgacuccaccgagugcagcaaccuccugcugcaguacggguccuucugcacccagcucaaccgcgcgcugacgggcaucgccguggagcaggacaagaacacccaggagguguucgcccaggucaagcagaucuacaagacgcccccgaucaaggacuucgggggcuucaacuucagccagauccugcccgaccccuccaagcccagcaagcgguccuucaucgaggaccuccuguucaacaaggugacccuggccgacgccggcuucaucaagcaguacggggacugccucggcgacaucgcggcccgcgaccugaucugcgcccagaaguucaacgggcugaccgugcucccgccccugcugaccgacgagaugaucgcccaguacaccagcgcccuccuggcgggcaccaucacguccggguggaccuucggcgccggcgccgcccugcagauccccuucgcgaugcagauggccuaccgguucaacgggaucggcgucacccagaacgugcucuacgagaaccagaagcugaucgccaaccaguucaacagcgccaucgggaagauccaggacucccugagcuccaccgccagcgcgcucggcaagcugcaggacguggucaaccagaacgcccaggcccugaacacgcucgugaagcagcuguccagcaacuucggggccaucuccagcgugcugaacgacauccucucccgccuggacaaggucgaggccgaggugcagaucgaccggcugaucaccggccgccuccagagccugcagaccuacgugacccagcagcugauccgggcggccgagauccgcgccagcgccaaccucgccgcgaccaagauguccgagugcguccugggccagagcaagcggguggacuucugcgggaagggcuaccaccugauguccuucccccagagcgccccgcacgggguggucuuccuccacgugacguacguccccgcccaggagaagaacuucaccaccgcccccgcgaucugccacgacggcaaggcccacuucccccgcgaggggguguucguguccaacggcacccacugguucgucacgcagcggaacuucuacgagccgcagaucaucaccaccgacaacaccuucgugagcggcaacugcgacguggucaucgggaucgugaacaacacgguguacgacccccugcagcccgagcuggacuccuucaaggaggagcucgacaaguacuucaagaaccacaccagccccgacgucgaccugggcgacaucuccgggaucaacgccagcguggugaacauccagaaggagaucgaccgccugaacgaggucgccaagaaccucaacgagucccugaucgaccugcaggagcucggcaaguacgagcaguacaucaaguggccgugguacaucuggcugggcuucaucgccgggcugaucgcgaucgugauggugaccaucaugcucugcugcaugaccagcugcugcuccugccugaagggcugcugcagcugcggguccugcugcaaguucgacgaggacgacagcgagcccguccugaagggcgugaagcuccacuacacgugaggacuaguuauaagacugacuagcccgaugggccucccaacgggcccuccuccccuccuugcaccgagauuaaucaaaggcucuuuucagagccaccaaaaaaaaaaaaaaaaaaaaaaaaaaaaaaaaaaaaaaaaaaaaaaaaaaaaaaaaaaaaaaaaaaaaaaaaaaaaaaaaaaaaaaaaaaaaaaaaaaaaa

SEQ ID NO: 24103 - RNA, 4035 nt, Artificial Sequence
  SARS-CoV-2/Wuhan/WIV05/2019__EPI_ISL_402128 spike protein mRNA gc (1-1273)(L18F_T20N_P26S_D138Y_R190S_K417T_E484K_N501Y_D614G_H655Y _T1027I)
aggagaaagcuuaccauguucguguuccugguccuccugccccuggugagcucccagugcgugaacuucaccaaccgcacccagcucccgagcgccuacacgaacuccuucacccggggcgucuacuaccccgacaagguguuccgcagcuccgugcugcacagcacccaggaccuguuccuccccuucuucuccaacgucaccugguuccacgccauccacgugagcgggacgaacggcaccaagcgguucgacaaccccgugcugccguucaacgacggggucuacuucgcguccaccgagaaguccaacaucauccgcggcuggaucuucgggaccacgcuggacuccaagacccagagccuccugaucgugaacaacgccaccaacguggucaucaaggugugcgaguuccaguucugcaacuaccccuuccugggcguguacuaccacaagaacaacaaguccuggauggagagcgaguuccgggucuacuccagcgccaacaacugcaccuucgaguacgugucccagcccuuccucauggaccuggagggcaagcaggggaacuucaagaaccugagcgaguucguguucaagaacaucgacggcuacuucaagaucuacuccaagcacacgcccaucaaccucguccgcgaccugccgcagggguucagcgcccuggagccccucguggaccugcccaucggcaucaacaucacccgguuccagacccugcucgcccugcaccgcagcuaccugacccccggggacuccagcuccggcuggacggcgggcgccgccgccuacuacgugggguaccuccagccgcggaccuuccugcugaaguacaacgagaacggcaccaucaccgacgcggucgacugcgcccucgacccccugagcgagacgaagugcacccugaaguccuucaccguggagaaggggaucuaccagaccagcaacuuccgcgugcagcccacggaguccaucguccgguuccccaacaucaccaaccucugcccguucggcgagguguucaacgccacccgcuucgccagcgucuacgccuggaaccggaagcgcaucuccaacugcguggcggacuacagcgugcuguacaacuccgccagcuucuccaccuucaagugcuacggcgucagccccacgaagcugaacgaccucugcuucaccaacguguacgccgacuccuucgugauccgcggggacgagguccggcagaucgcccccggccagaccgggaccaucgccgacuacaacuacaagcugcccgacgacuucacgggcugcgugaucgcguggaacagcaacaaccuggacuccaaggucgggggcaacuacaacuaccucuaccggcuguuccgcaagagcaaccugaagccguucgagcgggacaucuccaccgagaucuaccaggccggcagcacccccugcaacggggugaagggcuucaacugcuacuucccccuccagagcuacggguuccagcccaccuacggcgugggguaccagccguaccgcguggucgugcuguccuucgagcugcuccacgcccccgccacggugugcggccccaagaaguccaccaaccuggucaagaacaagugcgugaacuucaacuucaacggccugaccgggaccggcgugcucaccgagagcaacaagaaguuccugcccuuccagcaguucgggcgggacaucgccgacacgaccgacgcgguccgcgacccgcagacccuggagauccuggacaucacccccugcagcuucggcgggguguccgugaucacgcccggcaccaacaccagcaaccaggucgccgugcucuaccagggcgugaacugcaccgaggucccgguggccauccacgccgaccagcugacgcccaccuggcgcguguacuccaccgggagcaacgucuuccagacccgggccggcugccugaucggggcggaguacgugaacaacuccuacgagugcgacauccccaucggcgccggcaucugcgccagcuaccagacgcagaccaacagcccccgccgggcccgcagcguggcgucccagagcaucaucgccuacaccaugucccucggggccgagaacagcgucgccuacuccaacaacagcaucgccaucccgaccaacuucacgaucagcgugaccaccgagauccugcccguguccaugaccaagacgagcgucgacugcaccauguacaucugcggcgacuccaccgagugcagcaaccugcuccugcaguacggguccuucugcacccagcugaaccgggcgcucacgggcaucgccguggagcaggacaagaacacccaggagguguucgcccaggucaagcagaucuacaagaccccgcccaucaaggacuucgggggcuucaacuucagccagauccugcccgaccccuccaagcccagcaagcgcuccuucaucgaggaccuccuguucaacaaggugacccuggccgacgccggcuucaucaagcaguacggggacugccugggcgacaucgcggcccgggaccucaucugcgcccagaaguucaacgggcugacggugcugcccccgcuccugaccgacgagaugaucgcccaguacaccagcgcccugcucgcgggcaccaucacguccggguggaccuucggcgccggcgccgcccugcagauccccuucgcgaugcagauggccuaccgcuucaacgggaucggcgucacccagaacgugcuguacgagaaccagaagcucaucgccaaccaguucaacagcgccaucgggaagauccaggacucccugagcuccaccgccagcgcgcugggcaagcuccaggacguggucaaccagaacgcccaggcccugaacacgcuggugaagcagcucuccagcaacuucggggccaucuccagcgugcugaacgacauccugagccggcucgacaaggucgaggccgaggugcagaucgaccgccugaucaccggccggcugcagucccuccagaccuacgugacccagcagcugauccgcgcggccgagauccgggccagcgccaaccuggccgcgaucaagauguccgagugcguccucggccagagcaagcgcguggacuucugcgggaagggcuaccaccugauguccuucccccagagcgcgccccacgggguggucuuccugcacgugaccuacgucccggcccaggagaagaacuucacgaccgcccccgccaucugccacgacggcaaggcccacuucccccgggaggggguguucguguccaacggcacccacugguucgucacccagcgcaacuucuacgagccccagaucaucacgaccgacaacaccuucgugagcggcaacugcgacguggucaucgggaucgugaacaacaccguguacgacccgcuccagcccgagcuggacuccuucaaggaggagcuggacaaguacuucaagaaccacacgagccccgacgucgaccucggcgacaucuccgggaucaacgccagcguggugaacauccagaaggagaucgaccggcugaacgaggucgccaagaaccugaacgagucccucaucgaccugcaggagcugggcaaguacgagcaguacaucaaguggcccugguacaucuggcucggcuucaucgccgggcugaucgcgaucgugauggugaccaucaugcugugcugcaugaccagcugcugcuccugccucaagggcugcugcagcugcggguccugcugcaaguucgacgaggacgacagcgagccgguccugaagggcgugaagcugcacuacaccugaggacuaguuauaagacugacuagcccgaugggccucccaacgggcccuccuccccuccuugcaccgagauuaaucaaaggcucuuuucagagccaccaaaaaaaaaaaaaaaaaaaaaaaaaaaaaaaaaaaaaaaaaaaaaaaaaaaaaaaaaaaaaaaaaaaaaaaaaaaaaaaaaaaaaaaaaaaaaaaaaaaaa

SEQ ID NO: 24104 - RNA, 4035 nt, Artificial Sequence
  SARS-CoV-2/Wuhan/WIV05/2019__EPI_ISL_402128 spike protein mRNA gc (1-1273)(S13I_W152C_L452R_D614G)
aggagaaagcuuaccauguucguguuccugguccuccugccccuggugagcauccagugcgugaaccucaccacccgcacgcagcugccgcccgccuacaccaacuccuucacccggggcgucuacuaccccgacaagguguuccgcagcuccgugcugcacagcacccaggaccucuuccugcccuucuucuccaacgucacgugguuccacgccauccacgugagcgggaccaacggcaccaagcgguucgacaacccggugcugcccuucaacgacggggucuacuucgcguccaccgagaaguccaacaucauccgcggcuggaucuucgggacgacccucgacagcaagacccagagccugcugaucgugaacaacgccaccaacguggucaucaaggugugcgaguuccaguucugcaacgaccccuuccucggcguguacuaccacaagaacaacaaguccugcauggagagcgaguuccgggucuacuccagcgccaacaacugcacguucgaguacgugucccagcccuuccugauggaccuggagggcaagcaggggaacuucaagaaccuccgcgaguucguguucaagaacaucgacggcuacuucaagaucuacagcaagcacaccccgaucaaccugguccgggaccugccccagggguucuccgcccucgagccccugguggaccugcccaucggcaucaacaucacccgcuuccagacccuccuggcccugcaccggagcuaccucacgccgggggacuccagcagcggcuggaccgcgggcgccgccgccuacuacgugggguaccugcagccccgcaccuuccugcucaaguacaacgagaacggcaccaucacggacgcggucgacugcgcccuggacccccuguccgagaccaagugcacccucaagagcuucaccguggagaaggggaucuaccagacguccaacuuccgggugcagcccaccgagagcaucguccgcuucccgaacaucaccaaccugugccccuucggcgagguguucaacgccacccgguucgccuccgucuacgccuggaaccgcaagcggaucagcaacugcguggcggacuacuccgugcuguacaacagcgccuccuucagcacguucaagugcuacggcgucucccccaccaagcucaacgaccugugcuucaccaacguguacgccgacagcuucgugauccgcggggacgagguccggcagaucgcccccggccagaccgggaagaucgccgacuacaacuacaagcugccggacgacuucacgggcugcgugaucgcguggaacuccaacaaccucgacagcaaggucgggggcaacuacaacuaccgcuaccggcuguuccgcaaguccaaccugaagcccuucgagcgggacaucagcaccgagaucuaccaggccggcuccacccccugcaacgggguggagggcuucaacugcuacuucccccuccagagcuacggguuccagccgaccaacggcgugggguaccagcccuaccgcguggucgugcuguccuucgagcugcuccacgcccccgccacggugugcggccccaagaaguccaccaaccuggucaagaacaagugcgugaacuucaacuucaacggccugaccgggaccggcgugcucaccgagagcaacaagaaguuccugccguuccagcaguucgggcgcgacaucgccgacacgaccgacgcgguccgggacccccagacccuggagauccuggacaucacccccugcagcuucggcggggugagcgugaucacgccgggcaccaacaccuccaaccaggucgccgugcucuaccagggcgugaacugcaccgagguccccguggccauccacgccgaccagcugacgcccaccuggcgcguguacagcaccggguccaacgucuuccagacccgggccggcugccugaucggggcggagcacgugaacaacagcuacgagugcgacauccccaucggcgccggcaucugcgccuccuaccagacgcagaccaacagcccgcgccgggcccgcuccguggcgagccaguccaucaucgccuacaccaugagccucggggccgagaacuccgucgccuacagcaacaacuccaucgccauccccaccaacuucacgaucagcgugaccaccgagauccugcccguguccaugaccaagacgagcgucgacugcaccauguacaucugcggcgacagcaccgagugcuccaaccugcuccugcaguacgggagcuucugcacccagcugaaccgggcgcucacgggcaucgccguggagcaggacaagaacacccaggagguguucgcccaggucaagcagaucuacaagacgcccccgaucaaggacuucgggggcuucaacuucucccagauccugcccgaccccagcaagcccuccaagcgcagcuucaucgaggaccuccuguucaacaaggugacccuggccgacgccggcuucaucaagcaguacggggacugccugggcgacaucgcggcccgggaccucaucugcgcccagaaguucaacgggcugaccgugcugccgccccuccugaccgacgagaugaucgcccaguacaccuccgcccugcucgcgggcaccaucacgagcggguggaccuucggcgccggcgccgcccugcagauccccuucgcgaugcagauggccuaccgcuucaacgggaucggcgucacccagaacgugcuguacgagaaccagaagcucaucgccaaccaguucaacuccgccaucgggaagauccaggacagccuguccagcaccgccuccgcgcugggcaagcuccaggacguggucaaccagaacgcccaggcccugaacacgcuggugaagcagcucagcuccaacuucggggccaucagcuccgugcugaacgacauccugagccggcucgacaaggucgaggccgaggugcagaucgaccgccugaucaccggccggcugcagucccuccagaccuacgugacccagcagcugauccgcgcggccgagauccgggccagcgccaaccuggccgcgaccaagaugagcgagugcguccucggccaguccaagcgcguggacuucugcgggaagggcuaccaccugaugagcuucccccaguccgccccgcacgggguggucuuccugcacgugacguacguccccgcccaggagaagaacuucaccaccgcccccgcgaucugccacgacggcaaggcccacuucccccgggaggggguguucgugagcaacggcacccacugguucgucacgcagcgcaacuucuacgagccgcagaucaucaccaccgacaacaccuucguguccggcaacugcgacguggucaucgggaucgugaacaacacgguguacgacccccuccagcccgagcuggacagcuucaaggaggagcuggacaaguacuucaagaaccacaccucccccgacgucgaccucggcgacaucagcgggaucaacgccuccguggugaacauccagaaggagaucgaccggcugaacgaggucgccaagaaccugaacgagagccucaucgaccugcaggagcugggcaaguacgagcaguacaucaaguggccgugguacaucuggcucggcuucaucgccgggcugaucgcgaucgugauggugaccaucaugcugugcugcaugaccuccugcugcagcugccucaagggcugcugcuccugcgggagcugcugcaaguucgacgaggacgacuccgagcccguccugaagggcgugaagcugcacuacacgugaggacuaguuauaagacugacuagcccgaugggccucccaacgggcccuccuccccuccuugcaccgagauuaaucaaaggcucuuuucagagccaccaaaaaaaaaaaaaaaaaaaaaaaaaaaaaaaaaaaaaaaaaaaaaaaaaaaaaaaaaaaaaaaaaaaaaaaaaaaaaaaaaaaaaaaaaaaaaaaaaaaaa

SEQ ID NO: 24105 - RNA, 4035 nt, Artificial Sequence
  SARS-CoV-2/Wuhan/WIV05/2019__EPI_ISL_402128 spike protein mRNA gc (1-1273)
aggagaaagcuuaccauguucguguuccuggugcugcugccccuggugagcagccagugcgugaaccugaccacccggacccagcugccaccagccuacaccaacagcuucacccggggcgucuacuaccccgacaagguguuccggagcagcguccugcacagcacccaggaccuguuccugcccuucuucagcaacgugaccugguuccacgccauccacgugagcggcaccaacggcaccaagcgguucgacaaccccgugcugcccuucaacgacggcguguacuucgccagcaccgagaagagcaacaucauccggggcuggaucuucggcaccacccuggacagcaagacccagagccugcugaucgugaauaacgccaccaacguggugaucaaggugugcgaguuccaguucugcaacgaccccuuccugggcguguacuaccacaagaacaacaagagcuggauggagagcgaguuccggguguacagcagcgccaacaacugcaccuucgaguacgugagccagcccuuccugauggaccuggagggcaagcagggcaacuucaagaaccugcgggaguucguguucaagaacaucgacggcuacuucaagaucuacagcaagcacaccccaaucaaccuggugcgggaucugccccagggcuucucagcccuggagccccugguggaccugcccaucggcaucaacaucacccgguuccagacccugcuggcccugcaccggagcuaccugaccccaggcgacagcagcagcggguggacagcaggcgcggcugcuuacuacgugggcuaccugcagccccggaccuuccugcugaaguacaacgagaacggcaccaucaccgacgccguggacugcgcccuggacccucugagcgagaccaagugcacccugaagagcuucaccguggagaagggcaucuaccagaccagcaacuuccgggugcagcccaccgagagcaucgugcgguuccccaacaucaccaaccugugccccuucggcgagguguucaacgccacccgguucgccagcguguacgccuggaaccggaagcggaucagcaacugcguggccgacuacagcgugcuguacaacagcgccagcuucagcaccuucaagugcuacggcgugagccccaccaagcugaacgaccugugcuucaccaacguguacgccgacagcuucgugauccguggcgacgaggugcggcagaucgcacccggccagacaggcaagaucgccgacuacaacuacaagcugcccgacgacuucaccggcugcgugaucgccuggaacagcaacaaccucgacagcaaggugggcggcaacuacaacuaccuguaccggcuguuccggaagagcaaccugaagcccuucgagcgggacaucagcaccgagaucuaccaagccggcuccaccccuugcaacggcguggagggcuucaacugcuacuucccucugcagagcuacggcuuccagcccaccaacggcgugggcuaccagcccuaccgggugguggugcugagcuucgagcugcugcacgccccagccaccguguguggccccaagaagagcaccaaccuggugaagaacaagugcgugaacuucaacuucaacggccuuaccggcaccggcgugcugaccgagagcaacaagaaauuccugcccuuucagcaguucggccgggacaucgccgacaccaccgacgcugugcgggauccccagacccuggagauccuggacaucaccccuugcagcuucggcggcgugagcgugaucaccccaggcaccaacaccagcaaccagguggccgugcuguaccaggacgugaacugcaccgaggugcccguggccauccacgccgaccagcugacacccaccuggcgggucuacagcaccggcagcaacguguuccagacccgggccgguugccugaucggcgccgagcacgugaacaacagcuacgagugcgacauccccaucggcgccggcaucugugccagcuaccagacccagaccaauucaccccggagggcaaggagcguggccagccagagcaucaucgccuacaccaugagccugggcgccgagaacagcguggccuacagcaacaacagcaucgccauccccaccaacuucaccaucagcgugaccaccgagauucugcccgugagcaugaccaagaccagcguggacugcaccauguacaucugcggcgacagcaccgagugcagcaaccugcugcugcaguacggcagcuucugcacccagcugaaccgggcccugaccggcaucgccguggagcaggacaagaacacccaggagguguucgcccaggugaagcagaucuacaagaccccucccaucaaggacuucggcggcuucaacuucagccagauccugcccgaccccagcaagcccagcaagcggagcuucaucgaggaccugcuguucaacaaggugacccuagccgacgccggcuucaucaagcaguacggcgacugccucggcgacauagccgcccgggaccugaucugcgcccagaaguucaacggccugaccgugcugccuccccugcugaccgacgagaugaucgcccaguacaccagcgcccuguuagccggaaccaucaccagcggcuggacuuucggcgcuggagccgcucugcagauccccuucgccaugcagauggccuaccgguucaacggcaucggcgugacccagaacgugcuguacgagaaccagaagcugaucgccaaccaguucaacagcgccaucggcaagauccaggacagccugagcagcaccgcuagcgcccugggcaagcugcaggacguggugaaccagaacgcccaggcccugaacacccuggugaagcagcugagcagcaacuucggcgccaucagcagcgugcugaacgacauccugagccggcuggacaaggucgaggccgaggugcagaucgaccggcugaucacuggccggcugcagagccugcagaccuacgugacccagcagcugauccgggccgccgagauucgggccagcgccaaccuggccgccaccaagaugagcgagugcgugcugggccagagcaagcggguggacuucugcggcaagggcuaccaccugaugagcuuuccccagagcgcaccccacggagugguguuccugcacgugaccuacgugcccgcccaggagaagaacuucaccaccgccccagccaucugccacgacggcaaggcccacuuuccccgggagggcguguucgugagcaacggcacccacugguucgugacccagcggaacuucuacgagccccagaucaucaccaccgacaacaccuucgugagcggcaacugcgacguggugaucggcaucgugaacaacaccguguacgauccccugcagcccgagcuggacagcuucaaggaggagcuggacaaguacuucaagaaucacaccagccccgacguggaccugggcgacaucagcggcaucaacgccagcguggugaacauccagaaggagaucgaucggcugaacgagguggccaagaaccugaacgagagccugaucgaccugcaggagcugggcaaguacgagcaguacaucaaguggcccugguacaucuggcugggcuucaucgccggccugaucgccaucgugauggugaccaucaugcugugcugcaugaccagcugcugcagcugccugaagggcuguugcagcugcggcagcugcugcaaguucgacgaggacgacagcgagcccgugcugaagggcgugaagcugcacuacaccugaggacuaguuauaagacugacuagcccgaugggccucccaacgggcccuccuccccuccuugcaccgagauuaaucaaaggcucuuuucagagccaccaaaaaaaaaaaaaaaaaaaaaaaaaaaaaaaaaaaaaaaaaaaaaaaaaaaaaaaaaaaaaaaaaaaaaaaaaaaaaaaaaaaaaaaaaaaaaaaaaaaaa

SEQ ID NO: 24106 - RNA, 4035 nt, Artificial Sequence
  SARS-CoV-2/Wuhan/WIV05/2019__EPI_ISL_402128 spike protein mRNA gc (1-1273)(D614G)
aggagaaagcuuaccauguucguguuccuggugcugcugccccuggugagcagccagugcgugaaccugaccacccggacccagcugccaccagccuacaccaacagcuucacccggggcgucuacuaccccgacaagguguuccggagcagcguccugcacagcacccaggaccuguuccugcccuucuucagcaacgugaccugguuccacgccauccacgugagcggcaccaacggcaccaagcgguucgacaaccccgugcugcccuucaacgacggcguguacuucgccagcaccgagaagagcaacaucauccggggcuggaucuucggcaccacccuggacagcaagacccagagccugcugaucgugaauaacgccaccaacguggugaucaaggugugcgaguuccaguucugcaacgaccccuuccugggcguguacuaccacaagaacaacaagagcuggauggagagcgaguuccggguguacagcagcgccaacaacugcaccuucgaguacgugagccagcccuuccugauggaccuggagggcaagcagggcaacuucaagaaccugcgggaguucguguucaagaacaucgacggcuacuucaagaucuacagcaagcacaccccaaucaaccuggugcgggaucugccccagggcuucucagcccuggagccccugguggaccugcccaucggcaucaacaucacccgguuccagacccugcuggcccugcaccggagcuaccugaccccaggcgacagcagcagcggguggacagcaggcgcggcugcuuacuacgugggcuaccugcagccccggaccuuccugcugaaguacaacgagaacggcaccaucaccgacgccguggacugcgcccuggacccucugagcgagaccaagugcacccugaagagcuucaccguggagaagggcaucuaccagaccagcaacuuccgggugcagcccaccgagagcaucgugcgguuccccaacaucaccaaccugugccccuucggcgagguguucaacgccacccgguucgccagcguguacgccuggaaccggaagcggaucagcaacugcguggccgacuacagcgugcuguacaacagcgccagcuucagcaccuucaagugcuacggcgugagccccaccaagcugaacgaccugugcuucaccaacguguacgccgacagcuucgugauccguggcgacgaggugcggcagaucgcacccggccagacaggcaagaucgccgacuacaacuacaagcugcccgacgacuucaccggcugcgugaucgccuggaacagcaacaaccucgacagcaaggugggcggcaacuacaacuaccuguaccggcuguuccggaagagcaaccugaagcccuucgagcgggacaucagcaccgagaucuaccaagccggcuccaccccuugcaacggcguggagggcuucaacugcuacuucccucugcagagcuacggcuuccagcccaccaacggcgugggcuaccagcccuaccgggugguggugcugagcuucgagcugcugcacgccccagccaccguguguggccccaagaagagcaccaaccuggugaagaacaagugcgugaacuucaacuucaacggccuuaccggcaccggcgugcugaccgagagcaacaagaaauuccugcccuuucagcaguucggccgggacaucgccgacaccaccgacgcugugcgggauccccagacccuggagauccuggacaucaccccuugcagcuucggcggcgugagcgugaucaccccaggcaccaacaccagcaaccagguggccgugcuguaccagggcgugaacugcaccgaggugcccguggccauccacgccgaccagcugacacccaccuggcgggucuacagcaccggcagcaacguguuccagacccgggccgguugccugaucggcgccgagcacgugaacaacagcuacgagugcgacauccccaucggcgccggcaucugugccagcuaccagacccagaccaauucaccccggagggcaaggagcguggccagccagagcaucaucgccuacaccaugagccugggcgccgagaacagcguggccuacagcaacaacagcaucgccauccccaccaacuucaccaucagcgugaccaccgagauucugcccgugagcaugaccaagaccagcguggacugcaccauguacaucugcggcgacagcaccgagugcagcaaccugcugcugcaguacggcagcuucugcacccagcugaaccgggcccugaccggcaucgccguggagcaggacaagaacacccaggagguguucgcccaggugaagcagaucuacaagaccccucccaucaaggacuucggcggcuucaacuucagccagauccugcccgaccccagcaagcccagcaagcggagcuucaucgaggaccugcuguucaacaaggugacccuagccgacgccggcuucaucaagcaguacggcgacugccucggcgacauagccgcccgggaccugaucugcgcccagaaguucaacggccugaccgugcugccuccccugcugaccgacgagaugaucgcccaguacaccagcgcccuguuagccggaaccaucaccagcggcuggacuuucggcgcuggagccgcucugcagauccccuucgccaugcagauggccuaccgguucaacggcaucggcgugacccagaacgugcuguacgagaaccagaagcugaucgccaaccaguucaacagcgccaucggcaagauccaggacagccugagcagcaccgcuagcgcccugggcaagcugcaggacguggugaaccagaacgcccaggcccugaacacccuggugaagcagcugagcagcaacuucggcgccaucagcagcgugcugaacgacauccugagccggcuggacaaggucgaggccgaggugcagaucgaccggcugaucacuggccggcugcagagccugcagaccuacgugacccagcagcugauccgggccgccgagauucgggccagcgccaaccuggccgccaccaagaugagcgagugcgugcugggccagagcaagcggguggacuucugcggcaagggcuaccaccugaugagcuuuccccagagcgcaccccacggagugguguuccugcacgugaccuacgugcccgcccaggagaagaacuucaccaccgccccagccaucugccacgacggcaaggcccacuuuccccgggagggcguguucgugagcaacggcacccacugguucgugacccagcggaacuucuacgagccccagaucaucaccaccgacaacaccuucgugagcggcaacugcgacguggugaucggcaucgugaacaacaccguguacgauccccugcagcccgagcuggacagcuucaaggaggagcuggacaaguacuucaagaaucacaccagccccgacguggaccugggcgacaucagcggcaucaacgccagcguggugaacauccagaaggagaucgaucggcugaacgagguggccaagaaccugaacgagagccugaucgaccugcaggagcugggcaaguacgagcaguacaucaaguggcccugguacaucuggcugggcuucaucgccggccugaucgccaucgugauggugaccaucaugcugugcugcaugaccagcugcugcagcugccugaagggcuguugcagcugcggcagcugcugcaaguucgacgaggacgacagcgagcccgugcugaagggcgugaagcugcacuacaccugaggacuaguuauaagacugacuagcccgaugggccucccaacgggcccuccuccccuccuugcaccgagauuaaucaaaggcucuuuucagagccaccaaaaaaaaaaaaaaaaaaaaaaaaaaaaaaaaaaaaaaaaaaaaaaaaaaaaaaaaaaaaaaaaaaaaaaaaaaaaaaaaaaaaaaaaaaaaaaaaaaaaa

SEQ ID NO: 24107 - RNA, 4035 nt, Artificial Sequence
  SARS-CoV-2/Wuhan/WIV05/2019__EPI_ISL_402128 spike protein mRNA gc (1-1273)(A222V_D614G)
aggagaaagcuuaccauguucguguuccuggugcugcugccccuggugagcagccagugcgugaaccugaccacccggacccagcugccaccagccuacaccaacagcuucacccggggcgucuacuaccccgacaagguguuccggagcagcguccugcacagcacccaggaccuguuccugcccuucuucagcaacgugaccugguuccacgccauccacgugagcggcaccaacggcaccaagcgguucgacaaccccgugcugcccuucaacgacggcguguacuucgccagcaccgagaagagcaacaucauccggggcuggaucuucggcaccacccuggacagcaagacccagagccugcugaucgugaauaacgccaccaacguggugaucaaggugugcgaguuccaguucugcaacgaccccuuccugggcguguacuaccacaagaacaacaagagcuggauggagagcgaguuccggguguacagcagcgccaacaacugcaccuucgaguacgugagccagcccuuccugauggaccuggagggcaagcagggcaacuucaagaaccugcgggaguucguguucaagaacaucgacggcuacuucaagaucuacagcaagcacaccccaaucaaccuggugcgggaucugccccagggcuucucagugcuggagccccugguggaccugcccaucggcaucaacaucacccgguuccagacccugcuggcccugcaccggagcuaccugaccccaggcgacagcagcagcggguggacagcaggcgcggcugcuuacuacgugggcuaccugcagccccggaccuuccugcugaaguacaacgagaacggcaccaucaccgacgccguggacugcgcccuggacccucugagcgagaccaagugcacccugaagagcuucaccguggagaagggcaucuaccagaccagcaacuuccgggugcagcccaccgagagcaucgugcgguuccccaacaucaccaaccugugccccuucggcgagguguucaacgccacccgguucgccagcguguacgccuggaaccggaagcggaucagcaacugcguggccgacuacagcgugcuguacaacagcgccagcuucagcaccuucaagugcuacggcgugagccccaccaagcugaacgaccugugcuucaccaacguguacgccgacagcuucgugauccguggcgacgaggugcggcagaucgcacccggccagacaggcaagaucgccgacuacaacuacaagcugcccgacgacuucaccggcugcgugaucgccuggaacagcaacaaccucgacagcaaggugggcggcaacuacaacuaccuguaccggcuguuccggaagagcaaccugaagcccuucgagcgggacaucagcaccgagaucuaccaagccggcuccaccccuugcaacggcguggagggcuucaacugcuacuucccucugcagagcuacggcuuccagcccaccaacggcgugggcuaccagcccuaccgggugguggugcugagcuucgagcugcugcacgccccagccaccguguguggccccaagaagagcaccaaccuggugaagaacaagugcgugaacuucaacuucaacggccuuaccggcaccggcgugcugaccgagagcaacaagaaauuccugcccuuucagcaguucggccgggacaucgccgacaccaccgacgcugugcgggauccccagacccuggagauccuggacaucaccccuugcagcuucggcggcgugagcgugaucaccccaggcaccaacaccagcaaccagguggccgugcuguaccagggcgugaacugcaccgaggugcccguggccauccacgccgaccagcugacacccaccuggcgggucuacagcaccggcagcaacguguuccagacccgggccgguugccugaucggcgccgagcacgugaacaacagcuacgagugcgacauccccaucggcgccggcaucugugccagcuaccagacccagaccaauucaccccggagggcaaggagcguggccagccagagcaucaucgccuacaccaugagccugggcgccgagaacagcguggccuacagcaacaacagcaucgccauccccaccaacuucaccaucagcgugaccaccgagauucugcccgugagcaugaccaagaccagcguggacugcaccauguacaucugcggcgacagcaccgagugcagcaaccugcugcugcaguacggcagcuucugcacccagcugaaccgggcccugaccggcaucgccguggagcaggacaagaacacccaggagguguucgcccaggugaagcagaucuacaagaccccucccaucaaggacuucggcggcuucaacuucagccagauccugcccgaccccagcaagcccagcaagcggagcuucaucgaggaccugcuguucaacaaggugacccuagccgacgccggcuucaucaagcaguacggcgacugccucggcgacauagccgcccgggaccugaucugcgcccagaaguucaacggccugaccgugcugccuccccugcugaccgacgagaugaucgcccaguacaccagcgcccuguuagccggaaccaucaccagcggcuggacuuucggcgcuggagccgcucugcagauccccuucgccaugcagauggccuaccgguucaacggcaucggcgugacccagaacgugcuguacgagaaccagaagcugaucgccaaccaguucaacagcgccaucggcaagauccaggacagccugagcagcaccgcuagcgcccugggcaagcugcaggacguggugaaccagaacgcccaggcccugaacacccuggugaagcagcugagcagcaacuucggcgccaucagcagcgugcugaacgacauccugagccggcuggacaaggucgaggccgaggugcagaucgaccggcugaucacuggccggcugcagagccugcagaccuacgugacccagcagcugauccgggccgccgagauucgggccagcgccaaccuggccgccaccaagaugagcgagugcgugcugggccagagcaagcggguggacuucugcggcaagggcuaccaccugaugagcuuuccccagagcgcaccccacggagugguguuccugcacgugaccuacgugcccgcccaggagaagaacuucaccaccgccccagccaucugccacgacggcaaggcccacuuuccccgggagggcguguucgugagcaacggcacccacugguucgugacccagcggaacuucuacgagccccagaucaucaccaccgacaacaccuucgugagcggcaacugcgacguggugaucggcaucgugaacaacaccguguacgauccccugcagcccgagcuggacagcuucaaggaggagcuggacaaguacuucaagaaucacaccagccccgacguggaccugggcgacaucagcggcaucaacgccagcguggugaacauccagaaggagaucgaucggcugaacgagguggccaagaaccugaacgagagccugaucgaccugcaggagcugggcaaguacgagcaguacaucaaguggcccugguacaucuggcugggcuucaucgccggccugaucgccaucgugauggugaccaucaugcugugcugcaugaccagcugcugcagcugccugaagggcuguugcagcugcggcagcugcugcaaguucgacgaggacgacagcgagcccgugcugaagggcgugaagcugcacuacaccugaggacuaguuauaagacugacuagcccgaugggccucccaacgggcccuccuccccuccuugcaccgagauuaaucaaaggcucuuuucagagccaccaaaaaaaaaaaaaaaaaaaaaaaaaaaaaaaaaaaaaaaaaaaaaaaaaaaaaaaaaaaaaaaaaaaaaaaaaaaaaaaaaaaaaaaaaaaaaaaaaaaaa

SEQ ID NO: 24108 - RNA, 4035 nt, Artificial Sequence
  SARS-CoV-2/Wuhan/WIV05/2019__EPI_ISL_402128 spike protein mRNA gc (1-1273)(N439K_D614G)
aggagaaagcuuaccauguucguguuccuggugcugcugccccuggugagcagccagugcgugaaccugaccacccggacccagcugccaccagccuacaccaacagcuucacccggggcgucuacuaccccgacaagguguuccggagcagcguccugcacagcacccaggaccuguuccugcccuucuucagcaacgugaccugguuccacgccauccacgugagcggcaccaacggcaccaagcgguucgacaaccccgugcugcccuucaacgacggcguguacuucgccagcaccgagaagagcaacaucauccggggcuggaucuucggcaccacccuggacagcaagacccagagccugcugaucgugaauaacgccaccaacguggugaucaaggugugcgaguuccaguucugcaacgaccccuuccugggcguguacuaccacaagaacaacaagagcuggauggagagcgaguuccggguguacagcagcgccaacaacugcaccuucgaguacgugagccagcccuuccugauggaccuggagggcaagcagggcaacuucaagaaccugcgggaguucguguucaagaacaucgacggcuacuucaagaucuacagcaagcacaccccaaucaaccuggugcgggaucugccccagggcuucucagcccuggagccccugguggaccugcccaucggcaucaacaucacccgguuccagacccugcuggcccugcaccggagcuaccugaccccaggcgacagcagcagcggguggacagcaggcgcggcugcuuacuacgugggcuaccugcagccccggaccuuccugcugaaguacaacgagaacggcaccaucaccgacgccguggacugcgcccuggacccucugagcgagaccaagugcacccugaagagcuucaccguggagaagggcaucuaccagaccagcaacuuccgggugcagcccaccgagagcaucgugcgguuccccaacaucaccaaccugugccccuucggcgagguguucaacgccacccgguucgccagcguguacgccuggaaccggaagcggaucagcaacugcguggccgacuacagcgugcuguacaacagcgccagcuucagcaccuucaagugcuacggcgugagccccaccaagcugaacgaccugugcuucaccaacguguacgccgacagcuucgugauccguggcgacgaggugcggcagaucgcacccggccagacaggcaagaucgccgacuacaacuacaagcugcccgacgacuucaccggcugcgugaucgccuggaacagcaagaaccucgacagcaaggugggcggcaacuacaacuaccuguaccggcuguuccggaagagcaaccugaagcccuucgagcgggacaucagcaccgagaucuaccaagccggcuccaccccuugcaacggcguggagggcuucaacugcuacuucccucugcagagcuacggcuuccagcccaccaacggcgugggcuaccagcccuaccgggugguggugcugagcuucgagcugcugcacgccccagccaccguguguggccccaagaagagcaccaaccuggugaagaacaagugcgugaacuucaacuucaacggccuuaccggcaccggcgugcugaccgagagcaacaagaaauuccugcccuuucagcaguucggccgggacaucgccgacaccaccgacgcugugcgggauccccagacccuggagauccuggacaucaccccuugcagcuucggcggcgugagcgugaucaccccaggcaccaacaccagcaaccagguggccgugcuguaccagggcgugaacugcaccgaggugcccguggccauccacgccgaccagcugacacccaccuggcgggucuacagcaccggcagcaacguguuccagacccgggccgguugccugaucggcgccgagcacgugaacaacagcuacgagugcgacauccccaucggcgccggcaucugugccagcuaccagacccagaccaauucaccccggagggcaaggagcguggccagccagagcaucaucgccuacaccaugagccugggcgccgagaacagcguggccuacagcaacaacagcaucgccauccccaccaacuucaccaucagcgugaccaccgagauucugcccgugagcaugaccaagaccagcguggacugcaccauguacaucugcggcgacagcaccgagugcagcaaccugcugcugcaguacggcagcuucugcacccagcugaaccgggcccugaccggcaucgccguggagcaggacaagaacacccaggagguguucgcccaggugaagcagaucuacaagaccccucccaucaaggacuucggcggcuucaacuucagccagauccugcccgaccccagcaagcccagcaagcggagcuucaucgaggaccugcuguucaacaaggugacccuagccgacgccggcuucaucaagcaguacggcgacugccucggcgacauagccgcccgggaccugaucugcgcccagaaguucaacggccugaccgugcugccuccccugcugaccgacgagaugaucgcccaguacaccagcgcccuguuagccggaaccaucaccagcggcuggacuuucggcgcuggagccgcucugcagauccccuucgccaugcagauggccuaccgguucaacggcaucggcgugacccagaacgugcuguacgagaaccagaagcugaucgccaaccaguucaacagcgccaucggcaagauccaggacagccugagcagcaccgcuagcgcccugggcaagcugcaggacguggugaaccagaacgcccaggcccugaacacccuggugaagcagcugagcagcaacuucggcgccaucagcagcgugcugaacgacauccugagccggcuggacaaggucgaggccgaggugcagaucgaccggcugaucacuggccggcugcagagccugcagaccuacgugacccagcagcugauccgggccgccgagauucgggccagcgccaaccuggccgccaccaagaugagcgagugcgugcugggccagagcaagcggguggacuucugcggcaagggcuaccaccugaugagcuuuccccagagcgcaccccacggagugguguuccugcacgugaccuacgugcccgcccaggagaagaacuucaccaccgccccagccaucugccacgacggcaaggcccacuuuccccgggagggcguguucgugagcaacggcacccacugguucgugacccagcggaacuucuacgagccccagaucaucaccaccgacaacaccuucgugagcggcaacugcgacguggugaucggcaucgugaacaacaccguguacgauccccugcagcccgagcuggacagcuucaaggaggagcuggacaaguacuucaagaaucacaccagccccgacguggaccugggcgacaucagcggcaucaacgccagcguggugaacauccagaaggagaucgaucggcugaacgagguggccaagaaccugaacgagagccugaucgaccugcaggagcugggcaaguacgagcaguacaucaaguggcccugguacaucuggcugggcuucaucgccggccugaucgccaucgugauggugaccaucaugcugugcugcaugaccagcugcugcagcugccugaagggcuguugcagcugcggcagcugcugcaaguucgacgaggacgacagcgagcccgugcugaagggcgugaagcugcacuacaccugaggacuaguuauaagacugacuagcccgaugggccucccaacgggcccuccuccccuccuugcaccgagauuaaucaaaggcucuuuucagagccaccaaaaaaaaaaaaaaaaaaaaaaaaaaaaaaaaaaaaaaaaaaaaaaaaaaaaaaaaaaaaaaaaaaaaaaaaaaaaaaaaaaaaaaaaaaaaaaaaaaaaa

SEQ ID NO: 24109 - RNA, 4035 nt, Artificial Sequence
  SARS-CoV-2/Wuhan/WIV05/2019__EPI_ISL_402128 spike protein mRNA gc (1-1273)(S477N_D614G)
aggagaaagcuuaccauguucguguuccuggugcugcugccccuggugagcagccagugcgugaaccugaccacccggacccagcugccaccagccuacaccaacagcuucacccggggcgucuacuaccccgacaagguguuccggagcagcguccugcacagcacccaggaccuguuccugcccuucuucagcaacgugaccugguuccacgccauccacgugagcggcaccaacggcaccaagcgguucgacaaccccgugcugcccuucaacgacggcguguacuucgccagcaccgagaagagcaacaucauccggggcuggaucuucggcaccacccuggacagcaagacccagagccugcugaucgugaauaacgccaccaacguggugaucaaggugugcgaguuccaguucugcaacgaccccuuccugggcguguacuaccacaagaacaacaagagcuggauggagagcgaguuccggguguacagcagcgccaacaacugcaccuucgaguacgugagccagcccuuccugauggaccuggagggcaagcagggcaacuucaagaaccugcgggaguucguguucaagaacaucgacggcuacuucaagaucuacagcaagcacaccccaaucaaccuggugcgggaucugccccagggcuucucagcccuggagccccugguggaccugcccaucggcaucaacaucacccgguuccagacccugcuggcccugcaccggagcuaccugaccccaggcgacagcagcagcggguggacagcaggcgcggcugcuuacuacgugggcuaccugcagccccggaccuuccugcugaaguacaacgagaacggcaccaucaccgacgccguggacugcgcccuggacccucugagcgagaccaagugcacccugaagagcuucaccguggagaagggcaucuaccagaccagcaacuuccgggugcagcccaccgagagcaucgugcgguuccccaacaucaccaaccugugccccuucggcgagguguucaacgccacccgguucgccagcguguacgccuggaaccggaagcggaucagcaacugcguggccgacuacagcgugcuguacaacagcgccagcuucagcaccuucaagugcuacggcgugagccccaccaagcugaacgaccugugcuucaccaacguguacgccgacagcuucgugauccguggcgacgaggugcggcagaucgcacccggccagacaggcaagaucgccgacuacaacuacaagcugcccgacgacuucaccggcugcgugaucgccuggaacagcaacaaccucgacagcaaggugggcggcaacuacaacuaccuguaccggcuguuccggaagagcaaccugaagcccuucgagcgggacaucagcaccgagaucuaccaagccggcaacaccccuugcaacggcguggagggcuucaacugcuacuucccucugcagagcuacggcuuccagcccaccaacggcgugggcuaccagcccuaccgggugguggugcugagcuucgagcugcugcacgccccagccaccguguguggccccaagaagagcaccaaccuggugaagaacaagugcgugaacuucaacuucaacggccuuaccggcaccggcgugcugaccgagagcaacaagaaauuccugcccuuucagcaguucggccgggacaucgccgacaccaccgacgcugugcgggauccccagacccuggagauccuggacaucaccccuugcagcuucggcggcgugagcgugaucaccccaggcaccaacaccagcaaccagguggccgugcuguaccagggcgugaacugcaccgaggugcccguggccauccacgccgaccagcugacacccaccuggcgggucuacagcaccggcagcaacguguuccagacccgggccgguugccugaucggcgccgagcacgugaacaacagcuacgagugcgacauccccaucggcgccggcaucugugccagcuaccagacccagaccaauucaccccggagggcaaggagcguggccagccagagcaucaucgccuacaccaugagccugggcgccgagaacagcguggccuacagcaacaacagcaucgccauccccaccaacuucaccaucagcgugaccaccgagauucugcccgugagcaugaccaagaccagcguggacugcaccauguacaucugcggcgacagcaccgagugcagcaaccugcugcugcaguacggcagcuucugcacccagcugaaccgggcccugaccggcaucgccguggagcaggacaagaacacccaggagguguucgcccaggugaagcagaucuacaagaccccucccaucaaggacuucggcggcuucaacuucagccagauccugcccgaccccagcaagcccagcaagcggagcuucaucgaggaccugcuguucaacaaggugacccuagccgacgccggcuucaucaagcaguacggcgacugccucggcgacauagccgcccgggaccugaucugcgcccagaaguucaacggccugaccgugcugccuccccugcugaccgacgagaugaucgcccaguacaccagcgcccuguuagccggaaccaucaccagcggcuggacuuucggcgcuggagccgcucugcagauccccuucgccaugcagauggccuaccgguucaacggcaucggcgugacccagaacgugcuguacgagaaccagaagcugaucgccaaccaguucaacagcgccaucggcaagauccaggacagccugagcagcaccgcuagcgcccugggcaagcugcaggacguggugaaccagaacgcccaggcccugaacacccuggugaagcagcugagcagcaacuucggcgccaucagcagcgugcugaacgacauccugagccggcuggacaaggucgaggccgaggugcagaucgaccggcugaucacuggccggcugcagagccugcagaccuacgugacccagcagcugauccgggccgccgagauucgggccagcgccaaccuggccgccaccaagaugagcgagugcgugcugggccagagcaagcggguggacuucugcggcaagggcuaccaccugaugagcuuuccccagagcgcaccccacggagugguguuccugcacgugaccuacgugcccgcccaggagaagaacuucaccaccgccccagccaucugccacgacggcaaggcccacuuuccccgggagggcguguucgugagcaacggcacccacugguucgugacccagcggaacuucuacgagccccagaucaucaccaccgacaacaccuucgugagcggcaacugcgacguggugaucggcaucgugaacaacaccguguacgauccccugcagcccgagcuggacagcuucaaggaggagcuggacaaguacuucaagaaucacaccagccccgacguggaccugggcgacaucagcggcaucaacgccagcguggugaacauccagaaggagaucgaucggcugaacgagguggccaagaaccugaacgagagccugaucgaccugcaggagcugggcaaguacgagcaguacaucaaguggcccugguacaucuggcugggcuucaucgccggccugaucgccaucgugauggugaccaucaugcugugcugcaugaccagcugcugcagcugccugaagggcuguugcagcugcggcagcugcugcaaguucgacgaggacgacagcgagcccgugcugaagggcgugaagcugcacuacaccugaggacuaguuauaagacugacuagcccgaugggccucccaacgggcccuccuccccuccuugcaccgagauuaaucaaaggcucuuuucagagccaccaaaaaaaaaaaaaaaaaaaaaaaaaaaaaaaaaaaaaaaaaaaaaaaaaaaaaaaaaaaaaaaaaaaaaaaaaaaaaaaaaaaaaaaaaaaaaaaaaaaaa

SEQ ID NO: 24110 - RNA, 4035 nt, Artificial Sequence
  SARS-CoV-2/Wuhan/WIV05/2019__EPI_ISL_402128 spike protein mRNA gc (1-1273)(N501Y_D614G)
aggagaaagcuuaccauguucguguuccuggugcugcugccccuggugagcagccagugcgugaaccugaccacccggacccagcugccaccagccuacaccaacagcuucacccggggcgucuacuaccccgacaagguguuccggagcagcguccugcacagcacccaggaccuguuccugcccuucuucagcaacgugaccugguuccacgccauccacgugagcggcaccaacggcaccaagcgguucgacaaccccgugcugcccuucaacgacggcguguacuucgccagcaccgagaagagcaacaucauccggggcuggaucuucggcaccacccuggacagcaagacccagagccugcugaucgugaauaacgccaccaacguggugaucaaggugugcgaguuccaguucugcaacgaccccuuccugggcguguacuaccacaagaacaacaagagcuggauggagagcgaguuccggguguacagcagcgccaacaacugcaccuucgaguacgugagccagcccuuccugauggaccuggagggcaagcagggcaacuucaagaaccugcgggaguucguguucaagaacaucgacggcuacuucaagaucuacagcaagcacaccccaaucaaccuggugcgggaucugccccagggcuucucagcccuggagccccugguggaccugcccaucggcaucaacaucacccgguuccagacccugcuggcccugcaccggagcuaccugaccccaggcgacagcagcagcggguggacagcaggcgcggcugcuuacuacgugggcuaccugcagccccggaccuuccugcugaaguacaacgagaacggcaccaucaccgacgccguggacugcgcccuggacccucugagcgagaccaagugcacccugaagagcuucaccguggagaagggcaucuaccagaccagcaacuuccgggugcagcccaccgagagcaucgugcgguuccccaacaucaccaaccugugccccuucggcgagguguucaacgccacccgguucgccagcguguacgccuggaaccggaagcggaucagcaacugcguggccgacuacagcgugcuguacaacagcgccagcuucagcaccuucaagugcuacggcgugagccccaccaagcugaacgaccugugcuucaccaacguguacgccgacagcuucgugauccguggcgacgaggugcggcagaucgcacccggccagacaggcaagaucgccgacuacaacuacaagcugcccgacgacuucaccggcugcgugaucgccuggaacagcaacaaccucgacagcaaggugggcggcaacuacaacuaccuguaccggcuguuccggaagagcaaccugaagcccuucgagcgggacaucagcaccgagaucuaccaagccggcuccaccccuugcaacggcguggagggcuucaacugcuacuucccucugcagagcuacggcuuccagcccaccuacggcgugggcuaccagcccuaccgggugguggugcugagcuucgagcugcugcacgccccagccaccguguguggccccaagaagagcaccaaccuggugaagaacaagugcgugaacuucaacuucaacggccuuaccggcaccggcgugcugaccgagagcaacaagaaauuccugcccuuucagcaguucggccgggacaucgccgacaccaccgacgcugugcgggauccccagacccuggagauccuggacaucaccccuugcagcuucggcggcgugagcgugaucaccccaggcaccaacaccagcaaccagguggccgugcuguaccagggcgugaacugcaccgaggugcccguggccauccacgccgaccagcugacacccaccuggcgggucuacagcaccggcagcaacguguuccagacccgggccgguugccugaucggcgccgagcacgugaacaacagcuacgagugcgacauccccaucggcgccggcaucugugccagcuaccagacccagaccaauucaccccggagggcaaggagcguggccagccagagcaucaucgccuacaccaugagccugggcgccgagaacagcguggccuacagcaacaacagcaucgccauccccaccaacuucaccaucagcgugaccaccgagauucugcccgugagcaugaccaagaccagcguggacugcaccauguacaucugcggcgacagcaccgagugcagcaaccugcugcugcaguacggcagcuucugcacccagcugaaccgggcccugaccggcaucgccguggagcaggacaagaacacccaggagguguucgcccaggugaagcagaucuacaagaccccucccaucaaggacuucggcggcuucaacuucagccagauccugcccgaccccagcaagcccagcaagcggagcuucaucgaggaccugcuguucaacaaggugacccuagccgacgccggcuucaucaagcaguacggcgacugccucggcgacauagccgcccgggaccugaucugcgcccagaaguucaacggccugaccgugcugccuccccugcugaccgacgagaugaucgcccaguacaccagcgcccuguuagccggaaccaucaccagcggcuggacuuucggcgcuggagccgcucugcagauccccuucgccaugcagauggccuaccgguucaacggcaucggcgugacccagaacgugcuguacgagaaccagaagcugaucgccaaccaguucaacagcgccaucggcaagauccaggacagccugagcagcaccgcuagcgcccugggcaagcugcaggacguggugaaccagaacgcccaggcccugaacacccuggugaagcagcugagcagcaacuucggcgccaucagcagcgugcugaacgacauccugagccggcuggacaaggucgaggccgaggugcagaucgaccggcugaucacuggccggcugcagagccugcagaccuacgugacccagcagcugauccgggccgccgagauucgggccagcgccaaccuggccgccaccaagaugagcgagugcgugcugggccagagcaagcggguggacuucugcggcaagggcuaccaccugaugagcuuuccccagagcgcaccccacggagugguguuccugcacgugaccuacgugcccgcccaggagaagaacuucaccaccgccccagccaucugccacgacggcaaggcccacuuuccccgggagggcguguucgugagcaacggcacccacugguucgugacccagcggaacuucuacgagccccagaucaucaccaccgacaacaccuucgugagcggcaacugcgacguggugaucggcaucgugaacaacaccguguacgauccccugcagcccgagcuggacagcuucaaggaggagcuggacaaguacuucaagaaucacaccagccccgacguggaccugggcgacaucagcggcaucaacgccagcguggugaacauccagaaggagaucgaucggcugaacgagguggccaagaaccugaacgagagccugaucgaccugcaggagcugggcaaguacgagcaguacaucaaguggcccugguacaucuggcugggcuucaucgccggccugaucgccaucgugauggugaccaucaugcugugcugcaugaccagcugcugcagcugccugaagggcuguugcagcugcggcagcugcugcaaguucgacgaggacgacagcgagcccgugcugaagggcgugaagcugcacuacaccugaggacuaguuauaagacugacuagcccgaugggccucccaacgggcccuccuccccuccuugcaccgagauuaaucaaaggcucuuuucagagccaccaaaaaaaaaaaaaaaaaaaaaaaaaaaaaaaaaaaaaaaaaaaaaaaaaaaaaaaaaaaaaaaaaaaaaaaaaaaaaaaaaaaaaaaaaaaaaaaaaaaaa

SEQ ID NO: 24111 - RNA, 4029 nt, Artificial Sequence
  SARS-CoV-2/Wuhan/WIV05/2019__EPI_ISL_402128 spike protein mRNA gc (1-1273)(H69del_V70del_D614G)
aggagaaagcuuaccauguucguguuccuggugcugcugccccuggugagcagccagugcgugaaccugaccacccggacccagcugccaccagccuacaccaacagcuucacccggggcgucuacuaccccgacaagguguuccggagcagcguccugcacagcacccaggaccuguuccugcccuucuucagcaacgugaccugguuccacgccaucagcggcaccaacggcaccaagcgguucgacaaccccgugcugcccuucaacgacggcguguacuucgccagcaccgagaagagcaacaucauccggggcuggaucuucggcaccacccuggacagcaagacccagagccugcugaucgugaauaacgccaccaacguggugaucaaggugugcgaguuccaguucugcaacgaccccuuccugggcguguacuaccacaagaacaacaagagcuggauggagagcgaguuccggguguacagcagcgccaacaacugcaccuucgaguacgugagccagcccuuccugauggaccuggagggcaagcagggcaacuucaagaaccugcgggaguucguguucaagaacaucgacggcuacuucaagaucuacagcaagcacaccccaaucaaccuggugcgggaucugccccagggcuucucagcccuggagccccugguggaccugcccaucggcaucaacaucacccgguuccagacccugcuggcccugcaccggagcuaccugaccccaggcgacagcagcagcggguggacagcaggcgcggcugcuuacuacgugggcuaccugcagccccggaccuuccugcugaaguacaacgagaacggcaccaucaccgacgccguggacugcgcccuggacccucugagcgagaccaagugcacccugaagagcuucaccguggagaagggcaucuaccagaccagcaacuuccgggugcagcccaccgagagcaucgugcgguuccccaacaucaccaaccugugccccuucggcgagguguucaacgccacccgguucgccagcguguacgccuggaaccggaagcggaucagcaacugcguggccgacuacagcgugcuguacaacagcgccagcuucagcaccuucaagugcuacggcgugagccccaccaagcugaacgaccugugcuucaccaacguguacgccgacagcuucgugauccguggcgacgaggugcggcagaucgcacccggccagacaggcaagaucgccgacuacaacuacaagcugcccgacgacuucaccggcugcgugaucgccuggaacagcaacaaccucgacagcaaggugggcggcaacuacaacuaccuguaccggcuguuccggaagagcaaccugaagcccuucgagcgggacaucagcaccgagaucuaccaagccggcuccaccccuugcaacggcguggagggcuucaacugcuacuucccucugcagagcuacggcuuccagcccaccaacggcgugggcuaccagcccuaccgggugguggugcugagcuucgagcugcugcacgccccagccaccguguguggccccaagaagagcaccaaccuggugaagaacaagugcgugaacuucaacuucaacggccuuaccggcaccggcgugcugaccgagagcaacaagaaauuccugcccuuucagcaguucggccgggacaucgccgacaccaccgacgcugugcgggauccccagacccuggagauccuggacaucaccccuugcagcuucggcggcgugagcgugaucaccccaggcaccaacaccagcaaccagguggccgugcuguaccagggcgugaacugcaccgaggugcccguggccauccacgccgaccagcugacacccaccuggcgggucuacagcaccggcagcaacguguuccagacccgggccgguugccugaucggcgccgagcacgugaacaacagcuacgagugcgacauccccaucggcgccggcaucugugccagcuaccagacccagaccaauucaccccggagggcaaggagcguggccagccagagcaucaucgccuacaccaugagccugggcgccgagaacagcguggccuacagcaacaacagcaucgccauccccaccaacuucaccaucagcgugaccaccgagauucugcccgugagcaugaccaagaccagcguggacugcaccauguacaucugcggcgacagcaccgagugcagcaaccugcugcugcaguacggcagcuucugcacccagcugaaccgggcccugaccggcaucgccguggagcaggacaagaacacccaggagguguucgcccaggugaagcagaucuacaagaccccucccaucaaggacuucggcggcuucaacuucagccagauccugcccgaccccagcaagcccagcaagcggagcuucaucgaggaccugcuguucaacaaggugacccuagccgacgccggcuucaucaagcaguacggcgacugccucggcgacauagccgcccgggaccugaucugcgcccagaaguucaacggccugaccgugcugccuccccugcugaccgacgagaugaucgcccaguacaccagcgcccuguuagccggaaccaucaccagcggcuggacuuucggcgcuggagccgcucugcagauccccuucgccaugcagauggccuaccgguucaacggcaucggcgugacccagaacgugcuguacgagaaccagaagcugaucgccaaccaguucaacagcgccaucggcaagauccaggacagccugagcagcaccgcuagcgcccugggcaagcugcaggacguggugaaccagaacgcccaggcccugaacacccuggugaagcagcugagcagcaacuucggcgccaucagcagcgugcugaacgacauccugagccggcuggacaaggucgaggccgaggugcagaucgaccggcugaucacuggccggcugcagagccugcagaccuacgugacccagcagcugauccgggccgccgagauucgggccagcgccaaccuggccgccaccaagaugagcgagugcgugcugggccagagcaagcggguggacuucugcggcaagggcuaccaccugaugagcuuuccccagagcgcaccccacggagugguguuccugcacgugaccuacgugcccgcccaggagaagaacuucaccaccgccccagccaucugccacgacggcaaggcccacuuuccccgggagggcguguucgugagcaacggcacccacugguucgugacccagcggaacuucuacgagccccagaucaucaccaccgacaacaccuucgugagcggcaacugcgacguggugaucggcaucgugaacaacaccguguacgauccccugcagcccgagcuggacagcuucaaggaggagcuggacaaguacuucaagaaucacaccagccccgacguggaccugggcgacaucagcggcaucaacgccagcguggugaacauccagaaggagaucgaucggcugaacgagguggccaagaaccugaacgagagccugaucgaccugcaggagcugggcaaguacgagcaguacaucaaguggcccugguacaucuggcugggcuucaucgccggccugaucgccaucgugauggugaccaucaugcugugcugcaugaccagcugcugcagcugccugaagggcuguugcagcugcggcagcugcugcaaguucgacgaggacgacagcgagcccgugcugaagggcgugaagcugcacuacaccugaggacuaguuauaagacugacuagcccgaugggccucccaacgggcccuccuccccuccuugcaccgagauuaaucaaaggcucuuuucagagccaccaaaaaaaaaaaaaaaaaaaaaaaaaaaaaaaaaaaaaaaaaaaaaaaaaaaaaaaaaaaaaaaaaaaaaaaaaaaaaaaaaaaaaaaaaaaaaaaaaaaaa

SEQ ID NO: 24112 - RNA, 4035 nt, Artificial Sequence
  SARS-CoV-2/Wuhan/WIV05/2019__EPI_ISL_402128 spike protein mRNA gc (1-1273)(Y453F_D614G)
aggagaaagcuuaccauguucguguuccuggugcugcugccccuggugagcagccagugcgugaaccugaccacccggacccagcugccaccagccuacaccaacagcuucacccggggcgucuacuaccccgacaagguguuccggagcagcguccugcacagcacccaggaccuguuccugcccuucuucagcaacgugaccugguuccacgccauccacgugagcggcaccaacggcaccaagcgguucgacaaccccgugcugcccuucaacgacggcguguacuucgccagcaccgagaagagcaacaucauccggggcuggaucuucggcaccacccuggacagcaagacccagagccugcugaucgugaauaacgccaccaacguggugaucaaggugugcgaguuccaguucugcaacgaccccuuccugggcguguacuaccacaagaacaacaagagcuggauggagagcgaguuccggguguacagcagcgccaacaacugcaccuucgaguacgugagccagcccuuccugauggaccuggagggcaagcagggcaacuucaagaaccugcgggaguucguguucaagaacaucgacggcuacuucaagaucuacagcaagcacaccccaaucaaccuggugcgggaucugccccagggcuucucagcccuggagccccugguggaccugcccaucggcaucaacaucacccgguuccagacccugcuggcccugcaccggagcuaccugaccccaggcgacagcagcagcggguggacagcaggcgcggcugcuuacuacgugggcuaccugcagccccggaccuuccugcugaaguacaacgagaacggcaccaucaccgacgccguggacugcgcccuggacccucugagcgagaccaagugcacccugaagagcuucaccguggagaagggcaucuaccagaccagcaacuuccgggugcagcccaccgagagcaucgugcgguuccccaacaucaccaaccugugccccuucggcgagguguucaacgccacccgguucgccagcguguacgccuggaaccggaagcggaucagcaacugcguggccgacuacagcgugcuguacaacagcgccagcuucagcaccuucaagugcuacggcgugagccccaccaagcugaacgaccugugcuucaccaacguguacgccgacagcuucgugauccguggcgacgaggugcggcagaucgcacccggccagacaggcaagaucgccgacuacaacuacaagcugcccgacgacuucaccggcugcgugaucgccuggaacagcaacaaccucgacagcaaggugggcggcaacuacaacuaccuguuccggcuguuccggaagagcaaccugaagcccuucgagcgggacaucagcaccgagaucuaccaagccggcuccaccccuugcaacggcguggagggcuucaacugcuacuucccucugcagagcuacggcuuccagcccaccaacggcgugggcuaccagcccuaccgggugguggugcugagcuucgagcugcugcacgccccagccaccguguguggccccaagaagagcaccaaccuggugaagaacaagugcgugaacuucaacuucaacggccuuaccggcaccggcgugcugaccgagagcaacaagaaauuccugcccuuucagcaguucggccgggacaucgccgacaccaccgacgcugugcgggauccccagacccuggagauccuggacaucaccccuugcagcuucggcggcgugagcgugaucaccccaggcaccaacaccagcaaccagguggccgugcuguaccagggcgugaacugcaccgaggugcccguggccauccacgccgaccagcugacacccaccuggcgggucuacagcaccggcagcaacguguuccagacccgggccgguugccugaucggcgccgagcacgugaacaacagcuacgagugcgacauccccaucggcgccggcaucugugccagcuaccagacccagaccaauucaccccggagggcaaggagcguggccagccagagcaucaucgccuacaccaugagccugggcgccgagaacagcguggccuacagcaacaacagcaucgccauccccaccaacuucaccaucagcgugaccaccgagauucugcccgugagcaugaccaagaccagcguggacugcaccauguacaucugcggcgacagcaccgagugcagcaaccugcugcugcaguacggcagcuucugcacccagcugaaccgggcccugaccggcaucgccguggagcaggacaagaacacccaggagguguucgcccaggugaagcagaucuacaagaccccucccaucaaggacuucggcggcuucaacuucagccagauccugcccgaccccagcaagcccagcaagcggagcuucaucgaggaccugcuguucaacaaggugacccuagccgacgccggcuucaucaagcaguacggcgacugccucggcgacauagccgcccgggaccugaucugcgcccagaaguucaacggccugaccgugcugccuccccugcugaccgacgagaugaucgcccaguacaccagcgcccuguuagccggaaccaucaccagcggcuggacuuucggcgcuggagccgcucugcagauccccuucgccaugcagauggccuaccgguucaacggcaucggcgugacccagaacgugcuguacgagaaccagaagcugaucgccaaccaguucaacagcgccaucggcaagauccaggacagccugagcagcaccgcuagcgcccugggcaagcugcaggacguggugaaccagaacgcccaggcccugaacacccuggugaagcagcugagcagcaacuucggcgccaucagcagcgugcugaacgacauccugagccggcuggacaaggucgaggccgaggugcagaucgaccggcugaucacuggccggcugcagagccugcagaccuacgugacccagcagcugauccgggccgccgagauucgggccagcgccaaccuggccgccaccaagaugagcgagugcgugcugggccagagcaagcggguggacuucugcggcaagggcuaccaccugaugagcuuuccccagagcgcaccccacggagugguguuccugcacgugaccuacgugcccgcccaggagaagaacuucaccaccgccccagccaucugccacgacggcaaggcccacuuuccccgggagggcguguucgugagcaacggcacccacugguucgugacccagcggaacuucuacgagccccagaucaucaccaccgacaacaccuucgugagcggcaacugcgacguggugaucggcaucgugaacaacaccguguacgauccccugcagcccgagcuggacagcuucaaggaggagcuggacaaguacuucaagaaucacaccagccccgacguggaccugggcgacaucagcggcaucaacgccagcguggugaacauccagaaggagaucgaucggcugaacgagguggccaagaaccugaacgagagccugaucgaccugcaggagcugggcaaguacgagcaguacaucaaguggcccugguacaucuggcugggcuucaucgccggccugaucgccaucgugauggugaccaucaugcugugcugcaugaccagcugcugcagcugccugaagggcuguugcagcugcggcagcugcugcaaguucgacgaggacgacagcgagcccgugcugaagggcgugaagcugcacuacaccugaggacuaguuauaagacugacuagcccgaugggccucccaacgggcccuccuccccuccuugcaccgagauuaaucaaaggcucuuuucagagccaccaaaaaaaaaaaaaaaaaaaaaaaaaaaaaaaaaaaaaaaaaaaaaaaaaaaaaaaaaaaaaaaaaaaaaaaaaaaaaaaaaaaaaaaaaaaaaaaaaaaaa

SEQ ID NO: 24113 - RNA, 4035 nt, Artificial Sequence
  SARS-CoV-2/Wuhan/WIV05/2019__EPI_ISL_402128 spike protein mRNA gc (1-1273)(D614G_I692V)
aggagaaagcuuaccauguucguguuccuggugcugcugccccuggugagcagccagugcgugaaccugaccacccggacccagcugccaccagccuacaccaacagcuucacccggggcgucuacuaccccgacaagguguuccggagcagcguccugcacagcacccaggaccuguuccugcccuucuucagcaacgugaccugguuccacgccauccacgugagcggcaccaacggcaccaagcgguucgacaaccccgugcugcccuucaacgacggcguguacuucgccagcaccgagaagagcaacaucauccggggcuggaucuucggcaccacccuggacagcaagacccagagccugcugaucgugaauaacgccaccaacguggugaucaaggugugcgaguuccaguucugcaacgaccccuuccugggcguguacuaccacaagaacaacaagagcuggauggagagcgaguuccggguguacagcagcgccaacaacugcaccuucgaguacgugagccagcccuuccugauggaccuggagggcaagcagggcaacuucaagaaccugcgggaguucguguucaagaacaucgacggcuacuucaagaucuacagcaagcacaccccaaucaaccuggugcgggaucugccccagggcuucucagcccuggagccccugguggaccugcccaucggcaucaacaucacccgguuccagacccugcuggcccugcaccggagcuaccugaccccaggcgacagcagcagcggguggacagcaggcgcggcugcuuacuacgugggcuaccugcagccccggaccuuccugcugaaguacaacgagaacggcaccaucaccgacgccguggacugcgcccuggacccucugagcgagaccaagugcacccugaagagcuucaccguggagaagggcaucuaccagaccagcaacuuccgggugcagcccaccgagagcaucgugcgguuccccaacaucaccaaccugugccccuucggcgagguguucaacgccacccgguucgccagcguguacgccuggaaccggaagcggaucagcaacugcguggccgacuacagcgugcuguacaacagcgccagcuucagcaccuucaagugcuacggcgugagccccaccaagcugaacgaccugugcuucaccaacguguacgccgacagcuucgugauccguggcgacgaggugcggcagaucgcacccggccagacaggcaagaucgccgacuacaacuacaagcugcccgacgacuucaccggcugcgugaucgccuggaacagcaacaaccucgacagcaaggugggcggcaacuacaacuaccuguaccggcuguuccggaagagcaaccugaagcccuucgagcgggacaucagcaccgagaucuaccaagccggcuccaccccuugcaacggcguggagggcuucaacugcuacuucccucugcagagcuacggcuuccagcccaccaacggcgugggcuaccagcccuaccgggugguggugcugagcuucgagcugcugcacgccccagccaccguguguggccccaagaagagcaccaaccuggugaagaacaagugcgugaacuucaacuucaacggccuuaccggcaccggcgugcugaccgagagcaacaagaaauuccugcccuuucagcaguucggccgggacaucgccgacaccaccgacgcugugcgggauccccagacccuggagauccuggacaucaccccuugcagcuucggcggcgugagcgugaucaccccaggcaccaacaccagcaaccagguggccgugcuguaccagggcgugaacugcaccgaggugcccguggccauccacgccgaccagcugacacccaccuggcgggucuacagcaccggcagcaacguguuccagacccgggccgguugccugaucggcgccgagcacgugaacaacagcuacgagugcgacauccccaucggcgccggcaucugugccagcuaccagacccagaccaauucaccccggagggcaaggagcguggccagccagagcgugaucgccuacaccaugagccugggcgccgagaacagcguggccuacagcaacaacagcaucgccauccccaccaacuucaccaucagcgugaccaccgagauucugcccgugagcaugaccaagaccagcguggacugcaccauguacaucugcggcgacagcaccgagugcagcaaccugcugcugcaguacggcagcuucugcacccagcugaaccgggcccugaccggcaucgccguggagcaggacaagaacacccaggagguguucgcccaggugaagcagaucuacaagaccccucccaucaaggacuucggcggcuucaacuucagccagauccugcccgaccccagcaagcccagcaagcggagcuucaucgaggaccugcuguucaacaaggugacccuagccgacgccggcuucaucaagcaguacggcgacugccucggcgacauagccgcccgggaccugaucugcgcccagaaguucaacggccugaccgugcugccuccccugcugaccgacgagaugaucgcccaguacaccagcgcccuguuagccggaaccaucaccagcggcuggacuuucggcgcuggagccgcucugcagauccccuucgccaugcagauggccuaccgguucaacggcaucggcgugacccagaacgugcuguacgagaaccagaagcugaucgccaaccaguucaacagcgccaucggcaagauccaggacagccugagcagcaccgcuagcgcccugggcaagcugcaggacguggugaaccagaacgcccaggcccugaacacccuggugaagcagcugagcagcaacuucggcgccaucagcagcgugcugaacgacauccugagccggcuggacaaggucgaggccgaggugcagaucgaccggcugaucacuggccggcugcagagccugcagaccuacgugacccagcagcugauccgggccgccgagauucgggccagcgccaaccuggccgccaccaagaugagcgagugcgugcugggccagagcaagcggguggacuucugcggcaagggcuaccaccugaugagcuuuccccagagcgcaccccacggagugguguuccugcacgugaccuacgugcccgcccaggagaagaacuucaccaccgccccagccaucugccacgacggcaaggcccacuuuccccgggagggcguguucgugagcaacggcacccacugguucgugacccagcggaacuucuacgagccccagaucaucaccaccgacaacaccuucgugagcggcaacugcgacguggugaucggcaucgugaacaacaccguguacgauccccugcagcccgagcuggacagcuucaaggaggagcuggacaaguacuucaagaaucacaccagccccgacguggaccugggcgacaucagcggcaucaacgccagcguggugaacauccagaaggagaucgaucggcugaacgagguggccaagaaccugaacgagagccugaucgaccugcaggagcugggcaaguacgagcaguacaucaaguggcccugguacaucuggcugggcuucaucgccggccugaucgccaucgugauggugaccaucaugcugugcugcaugaccagcugcugcagcugccugaagggcuguugcagcugcggcagcugcugcaaguucgacgaggacgacagcgagcccgugcugaagggcgugaagcugcacuacaccugaggacuaguuauaagacugacuagcccgaugggccucccaacgggcccuccuccccuccuugcaccgagauuaaucaaaggcucuuuucagagccaccaaaaaaaaaaaaaaaaaaaaaaaaaaaaaaaaaaaaaaaaaaaaaaaaaaaaaaaaaaaaaaaaaaaaaaaaaaaaaaaaaaaaaaaaaaaaaaaaaaaaa

SEQ ID NO: 24114 - RNA, 4035 nt, Artificial Sequence
  SARS-CoV-2/Wuhan/WIV05/2019__EPI_ISL_402128 spike protein mRNA gc (1-1273)(D614G_M1229I)
aggagaaagcuuaccauguucguguuccuggugcugcugccccuggugagcagccagugcgugaaccugaccacccggacccagcugccaccagccuacaccaacagcuucacccggggcgucuacuaccccgacaagguguuccggagcagcguccugcacagcacccaggaccuguuccugcccuucuucagcaacgugaccugguuccacgccauccacgugagcggcaccaacggcaccaagcgguucgacaaccccgugcugcccuucaacgacggcguguacuucgccagcaccgagaagagcaacaucauccggggcuggaucuucggcaccacccuggacagcaagacccagagccugcugaucgugaauaacgccaccaacguggugaucaaggugugcgaguuccaguucugcaacgaccccuuccugggcguguacuaccacaagaacaacaagagcuggauggagagcgaguuccggguguacagcagcgccaacaacugcaccuucgaguacgugagccagcccuuccugauggaccuggagggcaagcagggcaacuucaagaaccugcgggaguucguguucaagaacaucgacggcuacuucaagaucuacagcaagcacaccccaaucaaccuggugcgggaucugccccagggcuucucagcccuggagccccugguggaccugcccaucggcaucaacaucacccgguuccagacccugcuggcccugcaccggagcuaccugaccccaggcgacagcagcagcggguggacagcaggcgcggcugcuuacuacgugggcuaccugcagccccggaccuuccugcugaaguacaacgagaacggcaccaucaccgacgccguggacugcgcccuggacccucugagcgagaccaagugcacccugaagagcuucaccguggagaagggcaucuaccagaccagcaacuuccgggugcagcccaccgagagcaucgugcgguuccccaacaucaccaaccugugccccuucggcgagguguucaacgccacccgguucgccagcguguacgccuggaaccggaagcggaucagcaacugcguggccgacuacagcgugcuguacaacagcgccagcuucagcaccuucaagugcuacggcgugagccccaccaagcugaacgaccugugcuucaccaacguguacgccgacagcuucgugauccguggcgacgaggugcggcagaucgcacccggccagacaggcaagaucgccgacuacaacuacaagcugcccgacgacuucaccggcugcgugaucgccuggaacagcaacaaccucgacagcaaggugggcggcaacuacaacuaccuguaccggcuguuccggaagagcaaccugaagcccuucgagcgggacaucagcaccgagaucuaccaagccggcuccaccccuugcaacggcguggagggcuucaacugcuacuucccucugcagagcuacggcuuccagcccaccaacggcgugggcuaccagcccuaccgggugguggugcugagcuucgagcugcugcacgccccagccaccguguguggccccaagaagagcaccaaccuggugaagaacaagugcgugaacuucaacuucaacggccuuaccggcaccggcgugcugaccgagagcaacaagaaauuccugcccuuucagcaguucggccgggacaucgccgacaccaccgacgcugugcgggauccccagacccuggagauccuggacaucaccccuugcagcuucggcggcgugagcgugaucaccccaggcaccaacaccagcaaccagguggccgugcuguaccagggcgugaacugcaccgaggugcccguggccauccacgccgaccagcugacacccaccuggcgggucuacagcaccggcagcaacguguuccagacccgggccgguugccugaucggcgccgagcacgugaacaacagcuacgagugcgacauccccaucggcgccggcaucugugccagcuaccagacccagaccaauucaccccggagggcaaggagcguggccagccagagcaucaucgccuacaccaugagccugggcgccgagaacagcguggccuacagcaacaacagcaucgccauccccaccaacuucaccaucagcgugaccaccgagauucugcccgugagcaugaccaagaccagcguggacugcaccauguacaucugcggcgacagcaccgagugcagcaaccugcugcugcaguacggcagcuucugcacccagcugaaccgggcccugaccggcaucgccguggagcaggacaagaacacccaggagguguucgcccaggugaagcagaucuacaagaccccucccaucaaggacuucggcggcuucaacuucagccagauccugcccgaccccagcaagcccagcaagcggagcuucaucgaggaccugcuguucaacaaggugacccuagccgacgccggcuucaucaagcaguacggcgacugccucggcgacauagccgcccgggaccugaucugcgcccagaaguucaacggccugaccgugcugccuccccugcugaccgacgagaugaucgcccaguacaccagcgcccuguuagccggaaccaucaccagcggcuggacuuucggcgcuggagccgcucugcagauccccuucgccaugcagauggccuaccgguucaacggcaucggcgugacccagaacgugcuguacgagaaccagaagcugaucgccaaccaguucaacagcgccaucggcaagauccaggacagccugagcagcaccgcuagcgcccugggcaagcugcaggacguggugaaccagaacgcccaggcccugaacacccuggugaagcagcugagcagcaacuucggcgccaucagcagcgugcugaacgacauccugagccggcuggacaaggucgaggccgaggugcagaucgaccggcugaucacuggccggcugcagagccugcagaccuacgugacccagcagcugauccgggccgccgagauucgggccagcgccaaccuggccgccaccaagaugagcgagugcgugcugggccagagcaagcggguggacuucugcggcaagggcuaccaccugaugagcuuuccccagagcgcaccccacggagugguguuccugcacgugaccuacgugcccgcccaggagaagaacuucaccaccgccccagccaucugccacgacggcaaggcccacuuuccccgggagggcguguucgugagcaacggcacccacugguucgugacccagcggaacuucuacgagccccagaucaucaccaccgacaacaccuucgugagcggcaacugcgacguggugaucggcaucgugaacaacaccguguacgauccccugcagcccgagcuggacagcuucaaggaggagcuggacaaguacuucaagaaucacaccagccccgacguggaccugggcgacaucagcggcaucaacgccagcguggugaacauccagaaggagaucgaucggcugaacgagguggccaagaaccugaacgagagccugaucgaccugcaggagcugggcaaguacgagcaguacaucaaguggcccugguacaucuggcugggcuucaucgccggccugaucgccaucgugaucgugaccaucaugcugugcugcaugaccagcugcugcagcugccugaagggcuguugcagcugcggcagcugcugcaaguucgacgaggacgacagcgagcccgugcugaagggcgugaagcugcacuacaccugaggacuaguuauaagacugacuagcccgaugggccucccaacgggcccuccuccccuccuugcaccgagauuaaucaaaggcucuuuucagagccaccaaaaaaaaaaaaaaaaaaaaaaaaaaaaaaaaaaaaaaaaaaaaaaaaaaaaaaaaaaaaaaaaaaaaaaaaaaaaaaaaaaaaaaaaaaaaaaaaaaaaa

SEQ ID NO: 24115 - RNA, 4029 nt, Artificial Sequence
  SARS-CoV-2/Wuhan/WIV05/2019__EPI_ISL_402128 spike protein mRNA gc (1-1273)(H69del_V70del_A222V_Y453F_S477N_D614G_I692V)
aggagaaagcuuaccauguucguguuccuggugcugcugccccuggugagcagccagugcgugaaccugaccacccggacccagcugccaccagccuacaccaacagcuucacccggggcgucuacuaccccgacaagguguuccggagcagcguccugcacagcacccaggaccuguuccugcccuucuucagcaacgugaccugguuccacgccaucagcggcaccaacggcaccaagcgguucgacaaccccgugcugcccuucaacgacggcguguacuucgccagcaccgagaagagcaacaucauccggggcuggaucuucggcaccacccuggacagcaagacccagagccugcugaucgugaauaacgccaccaacguggugaucaaggugugcgaguuccaguucugcaacgaccccuuccugggcguguacuaccacaagaacaacaagagcuggauggagagcgaguuccggguguacagcagcgccaacaacugcaccuucgaguacgugagccagcccuuccugauggaccuggagggcaagcagggcaacuucaagaaccugcgggaguucguguucaagaacaucgacggcuacuucaagaucuacagcaagcacaccccaaucaaccuggugcgggaucugccccagggcuucucagugcuggagccccugguggaccugcccaucggcaucaacaucacccgguuccagacccugcuggcccugcaccggagcuaccugaccccaggcgacagcagcagcggguggacagcaggcgcggcugcuuacuacgugggcuaccugcagccccggaccuuccugcugaaguacaacgagaacggcaccaucaccgacgccguggacugcgcccuggacccucugagcgagaccaagugcacccugaagagcuucaccguggagaagggcaucuaccagaccagcaacuuccgggugcagcccaccgagagcaucgugcgguuccccaacaucaccaaccugugccccuucggcgagguguucaacgccacccgguucgccagcguguacgccuggaaccggaagcggaucagcaacugcguggccgacuacagcgugcuguacaacagcgccagcuucagcaccuucaagugcuacggcgugagccccaccaagcugaacgaccugugcuucaccaacguguacgccgacagcuucgugauccguggcgacgaggugcggcagaucgcacccggccagacaggcaagaucgccgacuacaacuacaagcugcccgacgacuucaccggcugcgugaucgccuggaacagcaacaaccucgacagcaaggugggcggcaacuacaacuaccuguuccggcuguuccggaagagcaaccugaagcccuucgagcgggacaucagcaccgagaucuaccaagccggcaacaccccuugcaacggcguggagggcuucaacugcuacuucccucugcagagcuacggcuuccagcccaccaacggcgugggcuaccagcccuaccgggugguggugcugagcuucgagcugcugcacgccccagccaccguguguggccccaagaagagcaccaaccuggugaagaacaagugcgugaacuucaacuucaacggccuuaccggcaccggcgugcugaccgagagcaacaagaaauuccugcccuuucagcaguucggccgggacaucgccgacaccaccgacgcugugcgggauccccagacccuggagauccuggacaucaccccuugcagcuucggcggcgugagcgugaucaccccaggcaccaacaccagcaaccagguggccgugcuguaccagggcgugaacugcaccgaggugcccguggccauccacgccgaccagcugacacccaccuggcgggucuacagcaccggcagcaacguguuccagacccgggccgguugccugaucggcgccgagcacgugaacaacagcuacgagugcgacauccccaucggcgccggcaucugugccagcuaccagacccagaccaauucaccccggagggcaaggagcguggccagccagagcgugaucgccuacaccaugagccugggcgccgagaacagcguggccuacagcaacaacagcaucgccauccccaccaacuucaccaucagcgugaccaccgagauucugcccgugagcaugaccaagaccagcguggacugcaccauguacaucugcggcgacagcaccgagugcagcaaccugcugcugcaguacggcagcuucugcacccagcugaaccgggcccugaccggcaucgccguggagcaggacaagaacacccaggagguguucgcccaggugaagcagaucuacaagaccccucccaucaaggacuucggcggcuucaacuucagccagauccugcccgaccccagcaagcccagcaagcggagcuucaucgaggaccugcuguucaacaaggugacccuagccgacgccggcuucaucaagcaguacggcgacugccucggcgacauagccgcccgggaccugaucugcgcccagaaguucaacggccugaccgugcugccuccccugcugaccgacgagaugaucgcccaguacaccagcgcccuguuagccggaaccaucaccagcggcuggacuuucggcgcuggagccgcucugcagauccccuucgccaugcagauggccuaccgguucaacggcaucggcgugacccagaacgugcuguacgagaaccagaagcugaucgccaaccaguucaacagcgccaucggcaagauccaggacagccugagcagcaccgcuagcgcccugggcaagcugcaggacguggugaaccagaacgcccaggcccugaacacccuggugaagcagcugagcagcaacuucggcgccaucagcagcgugcugaacgacauccugagccggcuggacaaggucgaggccgaggugcagaucgaccggcugaucacuggccggcugcagagccugcagaccuacgugacccagcagcugauccgggccgccgagauucgggccagcgccaaccuggccgccaccaagaugagcgagugcgugcugggccagagcaagcggguggacuucugcggcaagggcuaccaccugaugagcuuuccccagagcgcaccccacggagugguguuccugcacgugaccuacgugcccgcccaggagaagaacuucaccaccgccccagccaucugccacgacggcaaggcccacuuuccccgggagggcguguucgugagcaacggcacccacugguucgugacccagcggaacuucuacgagccccagaucaucaccaccgacaacaccuucgugagcggcaacugcgacguggugaucggcaucgugaacaacaccguguacgauccccugcagcccgagcuggacagcuucaaggaggagcuggacaaguacuucaagaaucacaccagccccgacguggaccugggcgacaucagcggcaucaacgccagcguggugaacauccagaaggagaucgaucggcugaacgagguggccaagaaccugaacgagagccugaucgaccugcaggagcugggcaaguacgagcaguacaucaaguggcccugguacaucuggcugggcuucaucgccggccugaucgccaucgugauggugaccaucaugcugugcugcaugaccagcugcugcagcugccugaagggcuguugcagcugcggcagcugcugcaaguucgacgaggacgacagcgagcccgugcugaagggcgugaagcugcacuacaccugaggacuaguuauaagacugacuagcccgaugggccucccaacgggcccuccuccccuccuugcaccgagauuaaucaaaggcucuuuucagagccaccaaaaaaaaaaaaaaaaaaaaaaaaaaaaaaaaaaaaaaaaaaaaaaaaaaaaaaaaaaaaaaaaaaaaaaaaaaaaaaaaaaaaaaaaaaaaaaaaaaaaa

SEQ ID NO: 24116 - RNA, 4029 nt, Artificial Sequence
  SARS-CoV-2/Wuhan/WIV05/2019__EPI_ISL_402128 spike protein mRNA gc (1-1273)(H69del_V70del_Y453F_D614G_I692V_M1229I)
aggagaaagcuuaccauguucguguuccuggugcugcugccccuggugagcagccagugcgugaaccugaccacccggacccagcugccaccagccuacaccaacagcuucacccggggcgucuacuaccccgacaagguguuccggagcagcguccugcacagcacccaggaccuguuccugcccuucuucagcaacgugaccugguuccacgccaucagcggcaccaacggcaccaagcgguucgacaaccccgugcugcccuucaacgacggcguguacuucgccagcaccgagaagagcaacaucauccggggcuggaucuucggcaccacccuggacagcaagacccagagccugcugaucgugaauaacgccaccaacguggugaucaaggugugcgaguuccaguucugcaacgaccccuuccugggcguguacuaccacaagaacaacaagagcuggauggagagcgaguuccggguguacagcagcgccaacaacugcaccuucgaguacgugagccagcccuuccugauggaccuggagggcaagcagggcaacuucaagaaccugcgggaguucguguucaagaacaucgacggcuacuucaagaucuacagcaagcacaccccaaucaaccuggugcgggaucugccccagggcuucucagcccuggagccccugguggaccugcccaucggcaucaacaucacccgguuccagacccugcuggcccugcaccggagcuaccugaccccaggcgacagcagcagcggguggacagcaggcgcggcugcuuacuacgugggcuaccugcagccccggaccuuccugcugaaguacaacgagaacggcaccaucaccgacgccguggacugcgcccuggacccucugagcgagaccaagugcacccugaagagcuucaccguggagaagggcaucuaccagaccagcaacuuccgggugcagcccaccgagagcaucgugcgguuccccaacaucaccaaccugugccccuucggcgagguguucaacgccacccgguucgccagcguguacgccuggaaccggaagcggaucagcaacugcguggccgacuacagcgugcuguacaacagcgccagcuucagcaccuucaagugcuacggcgugagccccaccaagcugaacgaccugugcuucaccaacguguacgccgacagcuucgugauccguggcgacgaggugcggcagaucgcacccggccagacaggcaagaucgccgacuacaacuacaagcugcccgacgacuucaccggcugcgugaucgccuggaacagcaacaaccucgacagcaaggugggcggcaacuacaacuaccuguuccggcuguuccggaagagcaaccugaagcccuucgagcgggacaucagcaccgagaucuaccaagccggcuccaccccuugcaacggcguggagggcuucaacugcuacuucccucugcagagcuacggcuuccagcccaccaacggcgugggcuaccagcccuaccgggugguggugcugagcuucgagcugcugcacgccccagccaccguguguggccccaagaagagcaccaaccuggugaagaacaagugcgugaacuucaacuucaacggccuuaccggcaccggcgugcugaccgagagcaacaagaaauuccugcccuuucagcaguucggccgggacaucgccgacaccaccgacgcugugcgggauccccagacccuggagauccuggacaucaccccuugcagcuucggcggcgugagcgugaucaccccaggcaccaacaccagcaaccagguggccgugcuguaccagggcgugaacugcaccgaggugcccguggccauccacgccgaccagcugacacccaccuggcgggucuacagcaccggcagcaacguguuccagacccgggccgguugccugaucggcgccgagcacgugaacaacagcuacgagugcgacauccccaucggcgccggcaucugugccagcuaccagacccagaccaauucaccccggagggcaaggagcguggccagccagagcgugaucgccuacaccaugagccugggcgccgagaacagcguggccuacagcaacaacagcaucgccauccccaccaacuucaccaucagcgugaccaccgagauucugcccgugagcaugaccaagaccagcguggacugcaccauguacaucugcggcgacagcaccgagugcagcaaccugcugcugcaguacggcagcuucugcacccagcugaaccgggcccugaccggcaucgccguggagcaggacaagaacacccaggagguguucgcccaggugaagcagaucuacaagaccccucccaucaaggacuucggcggcuucaacuucagccagauccugcccgaccccagcaagcccagcaagcggagcuucaucgaggaccugcuguucaacaaggugacccuagccgacgccggcuucaucaagcaguacggcgacugccucggcgacauagccgcccgggaccugaucugcgcccagaaguucaacggccugaccgugcugccuccccugcugaccgacgagaugaucgcccaguacaccagcgcccuguuagccggaaccaucaccagcggcuggacuuucggcgcuggagccgcucugcagauccccuucgccaugcagauggccuaccgguucaacggcaucggcgugacccagaacgugcuguacgagaaccagaagcugaucgccaaccaguucaacagcgccaucggcaagauccaggacagccugagcagcaccgcuagcgcccugggcaagcugcaggacguggugaaccagaacgcccaggcccugaacacccuggugaagcagcugagcagcaacuucggcgccaucagcagcgugcugaacgacauccugagccggcuggacaaggucgaggccgaggugcagaucgaccggcugaucacuggccggcugcagagccugcagaccuacgugacccagcagcugauccgggccgccgagauucgggccagcgccaaccuggccgccaccaagaugagcgagugcgugcugggccagagcaagcggguggacuucugcggcaagggcuaccaccugaugagcuuuccccagagcgcaccccacggagugguguuccugcacgugaccuacgugcccgcccaggagaagaacuucaccaccgccccagccaucugccacgacggcaaggcccacuuuccccgggagggcguguucgugagcaacggcacccacugguucgugacccagcggaacuucuacgagccccagaucaucaccaccgacaacaccuucgugagcggcaacugcgacguggugaucggcaucgugaacaacaccguguacgauccccugcagcccgagcuggacagcuucaaggaggagcuggacaaguacuucaagaaucacaccagccccgacguggaccugggcgacaucagcggcaucaacgccagcguggugaacauccagaaggagaucgaucggcugaacgagguggccaagaaccugaacgagagccugaucgaccugcaggagcugggcaaguacgagcaguacaucaaguggcccugguacaucuggcugggcuucaucgccggccugaucgccaucgugaucgugaccaucaugcugugcugcaugaccagcugcugcagcugccugaagggcuguugcagcugcggcagcugcugcaaguucgacgaggacgacagcgagcccgugcugaagggcgugaagcugcacuacaccugaggacuaguuauaagacugacuagcccgaugggccucccaacgggcccuccuccccuccuugcaccgagauuaaucaaaggcucuuuucagagccaccaaaaaaaaaaaaaaaaaaaaaaaaaaaaaaaaaaaaaaaaaaaaaaaaaaaaaaaaaaaaaaaaaaaaaaaaaaaaaaaaaaaaaaaaaaaaaaaaaaaaa

SEQ ID NO: 24117 - RNA, 4026 nt, Artificial Sequence
  SARS-CoV-2/Wuhan/WIV05/2019__EPI_ISL_402128 spike protein mRNA gc (1-1273)(H69del_V70del_Y144del_N501Y_A570D_D614G_P681H_T716I_S982 A_D1118H)
aggagaaagcuuaccauguucguguuccuggugcugcugccccuggugagcagccagugcgugaaccugaccacccggacccagcugccaccagccuacaccaacagcuucacccggggcgucuacuaccccgacaagguguuccggagcagcguccugcacagcacccaggaccuguuccugcccuucuucagcaacgugaccugguuccacgccaucagcggcaccaacggcaccaagcgguucgacaaccccgugcugcccuucaacgacggcguguacuucgccagcaccgagaagagcaacaucauccggggcuggaucuucggcaccacccuggacagcaagacccagagccugcugaucgugaauaacgccaccaacguggugaucaaggugugcgaguuccaguucugcaacgaccccuuccugggcguguaccacaagaacaacaagagcuggauggagagcgaguuccggguguacagcagcgccaacaacugcaccuucgaguacgugagccagcccuuccugauggaccuggagggcaagcagggcaacuucaagaaccugcgggaguucguguucaagaacaucgacggcuacuucaagaucuacagcaagcacaccccaaucaaccuggugcgggaucugccccagggcuucucagcccuggagccccugguggaccugcccaucggcaucaacaucacccgguuccagacccugcuggcccugcaccggagcuaccugaccccaggcgacagcagcagcggguggacagcaggcgcggcugcuuacuacgugggcuaccugcagccccggaccuuccugcugaaguacaacgagaacggcaccaucaccgacgccguggacugcgcccuggacccucugagcgagaccaagugcacccugaagagcuucaccguggagaagggcaucuaccagaccagcaacuuccgggugcagcccaccgagagcaucgugcgguuccccaacaucaccaaccugugccccuucggcgagguguucaacgccacccgguucgccagcguguacgccuggaaccggaagcggaucagcaacugcguggccgacuacagcgugcuguacaacagcgccagcuucagcaccuucaagugcuacggcgugagccccaccaagcugaacgaccugugcuucaccaacguguacgccgacagcuucgugauccguggcgacgaggugcggcagaucgcacccggccagacaggcaagaucgccgacuacaacuacaagcugcccgacgacuucaccggcugcgugaucgccuggaacagcaacaaccucgacagcaaggugggcggcaacuacaacuaccuguaccggcuguuccggaagagcaaccugaagcccuucgagcgggacaucagcaccgagaucuaccaagccggcuccaccccuugcaacggcguggagggcuucaacugcuacuucccucugcagagcuacggcuuccagcccaccuacggcgugggcuaccagcccuaccgggugguggugcugagcuucgagcugcugcacgccccagccaccguguguggccccaagaagagcaccaaccuggugaagaacaagugcgugaacuucaacuucaacggccuuaccggcaccggcgugcugaccgagagcaacaagaaauuccugcccuuucagcaguucggccgggacaucgacgacaccaccgacgcugugcgggauccccagacccuggagauccuggacaucaccccuugcagcuucggcggcgugagcgugaucaccccaggcaccaacaccagcaaccagguggccgugcuguaccagggcgugaacugcaccgaggugcccguggccauccacgccgaccagcugacacccaccuggcgggucuacagcaccggcagcaacguguuccagacccgggccgguugccugaucggcgccgagcacgugaacaacagcuacgagugcgacauccccaucggcgccggcaucugugccagcuaccagacccagaccaauucacaccggagggcaaggagcguggccagccagagcaucaucgccuacaccaugagccugggcgccgagaacagcguggccuacagcaacaacagcaucgccauccccaucaacuucaccaucagcgugaccaccgagauucugcccgugagcaugaccaagaccagcguggacugcaccauguacaucugcggcgacagcaccgagugcagcaaccugcugcugcaguacggcagcuucugcacccagcugaaccgggcccugaccggcaucgccguggagcaggacaagaacacccaggagguguucgcccaggugaagcagaucuacaagaccccucccaucaaggacuucggcggcuucaacuucagccagauccugcccgaccccagcaagcccagcaagcggagcuucaucgaggaccugcuguucaacaaggugacccuagccgacgccggcuucaucaagcaguacggcgacugccucggcgacauagccgcccgggaccugaucugcgcccagaaguucaacggccugaccgugcugccuccccugcugaccgacgagaugaucgcccaguacaccagcgcccuguuagccggaaccaucaccagcggcuggacuuucggcgcuggagccgcucugcagauccccuucgccaugcagauggccuaccgguucaacggcaucggcgugacccagaacgugcuguacgagaaccagaagcugaucgccaaccaguucaacagcgccaucggcaagauccaggacagccugagcagcaccgcuagcgcccugggcaagcugcaggacguggugaaccagaacgcccaggcccugaacacccuggugaagcagcugagcagcaacuucggcgccaucagcagcgugcugaacgacauccuggcccggcuggacaaggucgaggccgaggugcagaucgaccggcugaucacuggccggcugcagagccugcagaccuacgugacccagcagcugauccgggccgccgagauucgggccagcgccaaccuggccgccaccaagaugagcgagugcgugcugggccagagcaagcggguggacuucugcggcaagggcuaccaccugaugagcuuuccccagagcgcaccccacggagugguguuccugcacgugaccuacgugcccgcccaggagaagaacuucaccaccgccccagccaucugccacgacggcaaggcccacuuuccccgggagggcguguucgugagcaacggcacccacugguucgugacccagcggaacuucuacgagccccagaucaucaccacccacaacaccuucgugagcggcaacugcgacguggugaucggcaucgugaacaacaccguguacgauccccugcagcccgagcuggacagcuucaaggaggagcuggacaaguacuucaagaaucacaccagccccgacguggaccugggcgacaucagcggcaucaacgccagcguggugaacauccagaaggagaucgaucggcugaacgagguggccaagaaccugaacgagagccugaucgaccugcaggagcugggcaaguacgagcaguacaucaaguggcccugguacaucuggcugggcuucaucgccggccugaucgccaucgugauggugaccaucaugcugugcugcaugaccagcugcugcagcugccugaagggcuguugcagcugcggcagcugcugcaaguucgacgaggacgacagcgagcccgugcugaagggcgugaagcugcacuacaccugaggacuaguuauaagacugacuagcccgaugggccucccaacgggcccuccuccccuccuugcaccgagauuaaucaaaggcucuuuucagagccaccaaaaaaaaaaaaaaaaaaaaaaaaaaaaaaaaaaaaaaaaaaaaaaaaaaaaaaaaaaaaaaaaaaaaaaaaaaaaaaaaaaaaaaaaaaaaaaaaaaaaa

SEQ ID NO: 24118 - RNA, 4035 nt, Artificial Sequence
  SARS-CoV-2/Wuhan/WIV05/2019__EPI_ISL_402128 spike protein mRNA gc (1-1273)(K417N_E484K_N501Y_D614G)
aggagaaagcuuaccauguucguguuccuggugcugcugccccuggugagcagccagugcgugaaccugaccacccggacccagcugccaccagccuacaccaacagcuucacccggggcgucuacuaccccgacaagguguuccggagcagcguccugcacagcacccaggaccuguuccugcccuucuucagcaacgugaccugguuccacgccauccacgugagcggcaccaacggcaccaagcgguucgacaaccccgugcugcccuucaacgacggcguguacuucgccagcaccgagaagagcaacaucauccggggcuggaucuucggcaccacccuggacagcaagacccagagccugcugaucgugaauaacgccaccaacguggugaucaaggugugcgaguuccaguucugcaacgaccccuuccugggcguguacuaccacaagaacaacaagagcuggauggagagcgaguuccggguguacagcagcgccaacaacugcaccuucgaguacgugagccagcccuuccugauggaccuggagggcaagcagggcaacuucaagaaccugcgggaguucguguucaagaacaucgacggcuacuucaagaucuacagcaagcacaccccaaucaaccuggugcgggaucugccccagggcuucucagcccuggagccccugguggaccugcccaucggcaucaacaucacccgguuccagacccugcuggcccugcaccggagcuaccugaccccaggcgacagcagcagcggguggacagcaggcgcggcugcuuacuacgugggcuaccugcagccccggaccuuccugcugaaguacaacgagaacggcaccaucaccgacgccguggacugcgcccuggacccucugagcgagaccaagugcacccugaagagcuucaccguggagaagggcaucuaccagaccagcaacuuccgggugcagcccaccgagagcaucgugcgguuccccaacaucaccaaccugugccccuucggcgagguguucaacgccacccgguucgccagcguguacgccuggaaccggaagcggaucagcaacugcguggccgacuacagcgugcuguacaacagcgccagcuucagcaccuucaagugcuacggcgugagccccaccaagcugaacgaccugugcuucaccaacguguacgccgacagcuucgugauccguggcgacgaggugcggcagaucgcacccggccagacaggcaacaucgccgacuacaacuacaagcugcccgacgacuucaccggcugcgugaucgccuggaacagcaacaaccucgacagcaaggugggcggcaacuacaacuaccuguaccggcuguuccggaagagcaaccugaagcccuucgagcgggacaucagcaccgagaucuaccaagccggcuccaccccuugcaacggcgugaagggcuucaacugcuacuucccucugcagagcuacggcuuccagcccaccuacggcgugggcuaccagcccuaccgggugguggugcugagcuucgagcugcugcacgccccagccaccguguguggccccaagaagagcaccaaccuggugaagaacaagugcgugaacuucaacuucaacggccuuaccggcaccggcgugcugaccgagagcaacaagaaauuccugcccuuucagcaguucggccgggacaucgccgacaccaccgacgcugugcgggauccccagacccuggagauccuggacaucaccccuugcagcuucggcggcgugagcgugaucaccccaggcaccaacaccagcaaccagguggccgugcuguaccagggcgugaacugcaccgaggugcccguggccauccacgccgaccagcugacacccaccuggcgggucuacagcaccggcagcaacguguuccagacccgggccgguugccugaucggcgccgagcacgugaacaacagcuacgagugcgacauccccaucggcgccggcaucugugccagcuaccagacccagaccaauucaccccggagggcaaggagcguggccagccagagcaucaucgccuacaccaugagccugggcgccgagaacagcguggccuacagcaacaacagcaucgccauccccaccaacuucaccaucagcgugaccaccgagauucugcccgugagcaugaccaagaccagcguggacugcaccauguacaucugcggcgacagcaccgagugcagcaaccugcugcugcaguacggcagcuucugcacccagcugaaccgggcccugaccggcaucgccguggagcaggacaagaacacccaggagguguucgcccaggugaagcagaucuacaagaccccucccaucaaggacuucggcggcuucaacuucagccagauccugcccgaccccagcaagcccagcaagcggagcuucaucgaggaccugcuguucaacaaggugacccuagccgacgccggcuucaucaagcaguacggcgacugccucggcgacauagccgcccgggaccugaucugcgcccagaaguucaacggccugaccgugcugccuccccugcugaccgacgagaugaucgcccaguacaccagcgcccuguuagccggaaccaucaccagcggcuggacuuucggcgcuggagccgcucugcagauccccuucgccaugcagauggccuaccgguucaacggcaucggcgugacccagaacgugcuguacgagaaccagaagcugaucgccaaccaguucaacagcgccaucggcaagauccaggacagccugagcagcaccgcuagcgcccugggcaagcugcaggacguggugaaccagaacgcccaggcccugaacacccuggugaagcagcugagcagcaacuucggcgccaucagcagcgugcugaacgacauccugagccggcuggacaaggucgaggccgaggugcagaucgaccggcugaucacuggccggcugcagagccugcagaccuacgugacccagcagcugauccgggccgccgagauucgggccagcgccaaccuggccgccaccaagaugagcgagugcgugcugggccagagcaagcggguggacuucugcggcaagggcuaccaccugaugagcuuuccccagagcgcaccccacggagugguguuccugcacgugaccuacgugcccgcccaggagaagaacuucaccaccgccccagccaucugccacgacggcaaggcccacuuuccccgggagggcguguucgugagcaacggcacccacugguucgugacccagcggaacuucuacgagccccagaucaucaccaccgacaacaccuucgugagcggcaacugcgacguggugaucggcaucgugaacaacaccguguacgauccccugcagcccgagcuggacagcuucaaggaggagcuggacaaguacuucaagaaucacaccagccccgacguggaccugggcgacaucagcggcaucaacgccagcguggugaacauccagaaggagaucgaucggcugaacgagguggccaagaaccugaacgagagccugaucgaccugcaggagcugggcaaguacgagcaguacaucaaguggcccugguacaucuggcugggcuucaucgccggccugaucgccaucgugauggugaccaucaugcugugcugcaugaccagcugcugcagcugccugaagggcuguugcagcugcggcagcugcugcaaguucgacgaggacgacagcgagcccgugcugaagggcgugaagcugcacuacaccugaggacuaguuauaagacugacuagcccgaugggccucccaacgggcccuccuccccuccuugcaccgagauuaaucaaaggcucuuuucagagccaccaaaaaaaaaaaaaaaaaaaaaaaaaaaaaaaaaaaaaaaaaaaaaaaaaaaaaaaaaaaaaaaaaaaaaaaaaaaaaaaaaaaaaaaaaaaaaaaaaaaaa

SEQ ID NO: 24119 - RNA, 4026 nt, Artificial Sequence
  SARS-CoV-2/Wuhan/WIV05/2019__EPI_ISL_402128 spike protein mRNA gc (1-1273)(L18F_D80A_D215G_L242del_A243del_L244del_R246I_K417N_E484 K_N501Y_D614G_A701V)
aggagaaagcuuaccauguucguguuccuggugcugcugccccuggugagcagccagugcgugaacuucaccacccggacccagcugccaccagccuacaccaacagcuucacccggggcgucuacuaccccgacaagguguuccggagcagcguccugcacagcacccaggaccuguuccugcccuucuucagcaacgugaccugguuccacgccauccacgugagcggcaccaacggcaccaagcgguucgccaaccccgugcugcccuucaacgacggcguguacuucgccagcaccgagaagagcaacaucauccggggcuggaucuucggcaccacccuggacagcaagacccagagccugcugaucgugaauaacgccaccaacguggugaucaaggugugcgaguuccaguucugcaacgaccccuuccugggcguguacuaccacaagaacaacaagagcuggauggagagcgaguuccggguguacagcagcgccaacaacugcaccuucgaguacgugagccagcccuuccugauggaccuggagggcaagcagggcaacuucaagaaccugcgggaguucguguucaagaacaucgacggcuacuucaagaucuacagcaagcacaccccaaucaaccuggugcggggccugccccagggcuucucagcccuggagccccugguggaccugcccaucggcaucaacaucacccgguuccagacccugcacaucagcuaccugaccccaggcgacagcagcagcggguggacagcaggcgcggcugcuuacuacgugggcuaccugcagccccggaccuuccugcugaaguacaacgagaacggcaccaucaccgacgccguggacugcgcccuggacccucugagcgagaccaagugcacccugaagagcuucaccguggagaagggcaucuaccagaccagcaacuuccgggugcagcccaccgagagcaucgugcgguuccccaacaucaccaaccugugccccuucggcgagguguucaacgccacccgguucgccagcguguacgccuggaaccggaagcggaucagcaacugcguggccgacuacagcgugcuguacaacagcgccagcuucagcaccuucaagugcuacggcgugagccccaccaagcugaacgaccugugcuucaccaacguguacgccgacagcuucgugauccguggcgacgaggugcggcagaucgcacccggccagacaggcaacaucgccgacuacaacuacaagcugcccgacgacuucaccggcugcgugaucgccuggaacagcaacaaccucgacagcaaggugggcggcaacuacaacuaccuguaccggcuguuccggaagagcaaccugaagcccuucgagcgggacaucagcaccgagaucuaccaagccggcuccaccccuugcaacggcgugaagggcuucaacugcuacuucccucugcagagcuacggcuuccagcccaccuacggcgugggcuaccagcccuaccgggugguggugcugagcuucgagcugcugcacgccccagccaccguguguggccccaagaagagcaccaaccuggugaagaacaagugcgugaacuucaacuucaacggccuuaccggcaccggcgugcugaccgagagcaacaagaaauuccugcccuuucagcaguucggccgggacaucgccgacaccaccgacgcugugcgggauccccagacccuggagauccuggacaucaccccuugcagcuucggcggcgugagcgugaucaccccaggcaccaacaccagcaaccagguggccgugcuguaccagggcgugaacugcaccgaggugcccguggccauccacgccgaccagcugacacccaccuggcgggucuacagcaccggcagcaacguguuccagacccgggccgguugccugaucggcgccgagcacgugaacaacagcuacgagugcgacauccccaucggcgccggcaucugugccagcuaccagacccagaccaauucaccccggagggcaaggagcguggccagccagagcaucaucgccuacaccaugagccugggcguggagaacagcguggccuacagcaacaacagcaucgccauccccaccaacuucaccaucagcgugaccaccgagauucugcccgugagcaugaccaagaccagcguggacugcaccauguacaucugcggcgacagcaccgagugcagcaaccugcugcugcaguacggcagcuucugcacccagcugaaccgggcccugaccggcaucgccguggagcaggacaagaacacccaggagguguucgcccaggugaagcagaucuacaagaccccucccaucaaggacuucggcggcuucaacuucagccagauccugcccgaccccagcaagcccagcaagcggagcuucaucgaggaccugcuguucaacaaggugacccuagccgacgccggcuucaucaagcaguacggcgacugccucggcgacauagccgcccgggaccugaucugcgcccagaaguucaacggccugaccgugcugccuccccugcugaccgacgagaugaucgcccaguacaccagcgcccuguuagccggaaccaucaccagcggcuggacuuucggcgcuggagccgcucugcagauccccuucgccaugcagauggccuaccgguucaacggcaucggcgugacccagaacgugcuguacgagaaccagaagcugaucgccaaccaguucaacagcgccaucggcaagauccaggacagccugagcagcaccgcuagcgcccugggcaagcugcaggacguggugaaccagaacgcccaggcccugaacacccuggugaagcagcugagcagcaacuucggcgccaucagcagcgugcugaacgacauccugagccggcuggacaaggucgaggccgaggugcagaucgaccggcugaucacuggccggcugcagagccugcagaccuacgugacccagcagcugauccgggccgccgagauucgggccagcgccaaccuggccgccaccaagaugagcgagugcgugcugggccagagcaagcggguggacuucugcggcaagggcuaccaccugaugagcuuuccccagagcgcaccccacggagugguguuccugcacgugaccuacgugcccgcccaggagaagaacuucaccaccgccccagccaucugccacgacggcaaggcccacuuuccccgggagggcguguucgugagcaacggcacccacugguucgugacccagcggaacuucuacgagccccagaucaucaccaccgacaacaccuucgugagcggcaacugcgacguggugaucggcaucgugaacaacaccguguacgauccccugcagcccgagcuggacagcuucaaggaggagcuggacaaguacuucaagaaucacaccagccccgacguggaccugggcgacaucagcggcaucaacgccagcguggugaacauccagaaggagaucgaucggcugaacgagguggccaagaaccugaacgagagccugaucgaccugcaggagcugggcaaguacgagcaguacaucaaguggcccugguacaucuggcugggcuucaucgccggccugaucgccaucgugauggugaccaucaugcugugcugcaugaccagcugcugcagcugccugaagggcuguugcagcugcggcagcugcugcaaguucgacgaggacgacagcgagcccgugcugaagggcgugaagcugcacuacaccugaggacuaguuauaagacugacuagcccgaugggccucccaacgggcccuccuccccuccuugcaccgagauuaaucaaaggcucuuuucagagccaccaaaaaaaaaaaaaaaaaaaaaaaaaaaaaaaaaaaaaaaaaaaaaaaaaaaaaaaaaaaaaaaaaaaaaaaaaaaaaaaaaaaaaaaaaaaaaaaaaaaaa

SEQ ID NO: 24120 - RNA, 4035 nt, Artificial Sequence
  SARS-CoV-2/Wuhan/WIV05/2019__EPI_ISL_402128 spike protein mRNA gc (1-1273)(E484K_D614G)
aggagaaagcuuaccauguucguguuccuggugcugcugccccuggugagcagccagugcgugaaccugaccacccggacccagcugccaccagccuacaccaacagcuucacccggggcgucuacuaccccgacaagguguuccggagcagcguccugcacagcacccaggaccuguuccugcccuucuucagcaacgugaccugguuccacgccauccacgugagcggcaccaacggcaccaagcgguucgacaaccccgugcugcccuucaacgacggcguguacuucgccagcaccgagaagagcaacaucauccggggcuggaucuucggcaccacccuggacagcaagacccagagccugcugaucgugaauaacgccaccaacguggugaucaaggugugcgaguuccaguucugcaacgaccccuuccugggcguguacuaccacaagaacaacaagagcuggauggagagcgaguuccggguguacagcagcgccaacaacugcaccuucgaguacgugagccagcccuuccugauggaccuggagggcaagcagggcaacuucaagaaccugcgggaguucguguucaagaacaucgacggcuacuucaagaucuacagcaagcacaccccaaucaaccuggugcgggaucugccccagggcuucucagcccuggagccccugguggaccugcccaucggcaucaacaucacccgguuccagacccugcuggcccugcaccggagcuaccugaccccaggcgacagcagcagcggguggacagcaggcgcggcugcuuacuacgugggcuaccugcagccccggaccuuccugcugaaguacaacgagaacggcaccaucaccgacgccguggacugcgcccuggacccucugagcgagaccaagugcacccugaagagcuucaccguggagaagggcaucuaccagaccagcaacuuccgggugcagcccaccgagagcaucgugcgguuccccaacaucaccaaccugugccccuucggcgagguguucaacgccacccgguucgccagcguguacgccuggaaccggaagcggaucagcaacugcguggccgacuacagcgugcuguacaacagcgccagcuucagcaccuucaagugcuacggcgugagccccaccaagcugaacgaccugugcuucaccaacguguacgccgacagcuucgugauccguggcgacgaggugcggcagaucgcacccggccagacaggcaagaucgccgacuacaacuacaagcugcccgacgacuucaccggcugcgugaucgccuggaacagcaacaaccucgacagcaaggugggcggcaacuacaacuaccuguaccggcuguuccggaagagcaaccugaagcccuucgagcgggacaucagcaccgagaucuaccaagccggcuccaccccuugcaacggcgugaagggcuucaacugcuacuucccucugcagagcuacggcuuccagcccaccaacggcgugggcuaccagcccuaccgggugguggugcugagcuucgagcugcugcacgccccagccaccguguguggccccaagaagagcaccaaccuggugaagaacaagugcgugaacuucaacuucaacggccuuaccggcaccggcgugcugaccgagagcaacaagaaauuccugcccuuucagcaguucggccgggacaucgccgacaccaccgacgcugugcgggauccccagacccuggagauccuggacaucaccccuugcagcuucggcggcgugagcgugaucaccccaggcaccaacaccagcaaccagguggccgugcuguaccagggcgugaacugcaccgaggugcccguggccauccacgccgaccagcugacacccaccuggcgggucuacagcaccggcagcaacguguuccagacccgggccgguugccugaucggcgccgagcacgugaacaacagcuacgagugcgacauccccaucggcgccggcaucugugccagcuaccagacccagaccaauucaccccggagggcaaggagcguggccagccagagcaucaucgccuacaccaugagccugggcgccgagaacagcguggccuacagcaacaacagcaucgccauccccaccaacuucaccaucagcgugaccaccgagauucugcccgugagcaugaccaagaccagcguggacugcaccauguacaucugcggcgacagcaccgagugcagcaaccugcugcugcaguacggcagcuucugcacccagcugaaccgggcccugaccggcaucgccguggagcaggacaagaacacccaggagguguucgcccaggugaagcagaucuacaagaccccucccaucaaggacuucggcggcuucaacuucagccagauccugcccgaccccagcaagcccagcaagcggagcuucaucgaggaccugcuguucaacaaggugacccuagccgacgccggcuucaucaagcaguacggcgacugccucggcgacauagccgcccgggaccugaucugcgcccagaaguucaacggccugaccgugcugccuccccugcugaccgacgagaugaucgcccaguacaccagcgcccuguuagccggaaccaucaccagcggcuggacuuucggcgcuggagccgcucugcagauccccuucgccaugcagauggccuaccgguucaacggcaucggcgugacccagaacgugcuguacgagaaccagaagcugaucgccaaccaguucaacagcgccaucggcaagauccaggacagccugagcagcaccgcuagcgcccugggcaagcugcaggacguggugaaccagaacgcccaggcccugaacacccuggugaagcagcugagcagcaacuucggcgccaucagcagcgugcugaacgacauccugagccggcuggacaaggucgaggccgaggugcagaucgaccggcugaucacuggccggcugcagagccugcagaccuacgugacccagcagcugauccgggccgccgagauucgggccagcgccaaccuggccgccaccaagaugagcgagugcgugcugggccagagcaagcggguggacuucugcggcaagggcuaccaccugaugagcuuuccccagagcgcaccccacggagugguguuccugcacgugaccuacgugcccgcccaggagaagaacuucaccaccgccccagccaucugccacgacggcaaggcccacuuuccccgggagggcguguucgugagcaacggcacccacugguucgugacccagcggaacuucuacgagccccagaucaucaccaccgacaacaccuucgugagcggcaacugcgacguggugaucggcaucgugaacaacaccguguacgauccccugcagcccgagcuggacagcuucaaggaggagcuggacaaguacuucaagaaucacaccagccccgacguggaccugggcgacaucagcggcaucaacgccagcguggugaacauccagaaggagaucgaucggcugaacgagguggccaagaaccugaacgagagccugaucgaccugcaggagcugggcaaguacgagcaguacaucaaguggcccugguacaucuggcugggcuucaucgccggccugaucgccaucgugauggugaccaucaugcugugcugcaugaccagcugcugcagcugccugaagggcuguugcagcugcggcagcugcugcaaguucgacgaggacgacagcgagcccgugcugaagggcgugaagcugcacuacaccugaggacuaguuauaagacugacuagcccgaugggccucccaacgggcccuccuccccuccuugcaccgagauuaaucaaaggcucuuuucagagccaccaaaaaaaaaaaaaaaaaaaaaaaaaaaaaaaaaaaaaaaaaaaaaaaaaaaaaaaaaaaaaaaaaaaaaaaaaaaaaaaaaaaaaaaaaaaaaaaaaaaaa

SEQ ID NO: 24121 - RNA, 4035 nt, Artificial Sequence
  SARS-CoV-2/Wuhan/WIV05/2019__EPI_ISL_402128 spike protein mRNA gc (1-1273)(L18F_T20N_P26S_D138Y_R190S_K417T_E484K_N501Y_D614G_H655Y _T1027I)
aggagaaagcuuaccauguucguguuccuggugcugcugccccuggugagcagccagugcgugaacuucaccaaccggacccagcugccaagcgccuacaccaacagcuucacccggggcgucuacuaccccgacaagguguuccggagcagcguccugcacagcacccaggaccuguuccugcccuucuucagcaacgugaccugguuccacgccauccacgugagcggcaccaacggcaccaagcgguucgacaaccccgugcugcccuucaacgacggcguguacuucgccagcaccgagaagagcaacaucauccggggcuggaucuucggcaccacccuggacagcaagacccagagccugcugaucgugaauaacgccaccaacguggugaucaaggugugcgaguuccaguucugcaacuaccccuuccugggcguguacuaccacaagaacaacaagagcuggauggagagcgaguuccggguguacagcagcgccaacaacugcaccuucgaguacgugagccagcccuuccugauggaccuggagggcaagcagggcaacuucaagaaccugagcgaguucguguucaagaacaucgacggcuacuucaagaucuacagcaagcacaccccaaucaaccuggugcgggaucugccccagggcuucucagcccuggagccccugguggaccugcccaucggcaucaacaucacccgguuccagacccugcuggcccugcaccggagcuaccugaccccaggcgacagcagcagcggguggacagcaggcgcggcugcuuacuacgugggcuaccugcagccccggaccuuccugcugaaguacaacgagaacggcaccaucaccgacgccguggacugcgcccuggacccucugagcgagaccaagugcacccugaagagcuucaccguggagaagggcaucuaccagaccagcaacuuccgggugcagcccaccgagagcaucgugcgguuccccaacaucaccaaccugugccccuucggcgagguguucaacgccacccgguucgccagcguguacgccuggaaccggaagcggaucagcaacugcguggccgacuacagcgugcuguacaacagcgccagcuucagcaccuucaagugcuacggcgugagccccaccaagcugaacgaccugugcuucaccaacguguacgccgacagcuucgugauccguggcgacgaggugcggcagaucgcacccggccagacaggcaccaucgccgacuacaacuacaagcugcccgacgacuucaccggcugcgugaucgccuggaacagcaacaaccucgacagcaaggugggcggcaacuacaacuaccuguaccggcuguuccggaagagcaaccugaagcccuucgagcgggacaucagcaccgagaucuaccaagccggcuccaccccuugcaacggcgugaagggcuucaacugcuacuucccucugcagagcuacggcuuccagcccaccuacggcgugggcuaccagcccuaccgggugguggugcugagcuucgagcugcugcacgccccagccaccguguguggccccaagaagagcaccaaccuggugaagaacaagugcgugaacuucaacuucaacggccuuaccggcaccggcgugcugaccgagagcaacaagaaauuccugcccuuucagcaguucggccgggacaucgccgacaccaccgacgcugugcgggauccccagacccuggagauccuggacaucaccccuugcagcuucggcggcgugagcgugaucaccccaggcaccaacaccagcaaccagguggccgugcuguaccagggcgugaacugcaccgaggugcccguggccauccacgccgaccagcugacacccaccuggcgggucuacagcaccggcagcaacguguuccagacccgggccgguugccugaucggcgccgaguacgugaacaacagcuacgagugcgacauccccaucggcgccggcaucugugccagcuaccagacccagaccaauucaccccggagggcaaggagcguggccagccagagcaucaucgccuacaccaugagccugggcgccgagaacagcguggccuacagcaacaacagcaucgccauccccaccaacuucaccaucagcgugaccaccgagauucugcccgugagcaugaccaagaccagcguggacugcaccauguacaucugcggcgacagcaccgagugcagcaaccugcugcugcaguacggcagcuucugcacccagcugaaccgggcccugaccggcaucgccguggagcaggacaagaacacccaggagguguucgcccaggugaagcagaucuacaagaccccucccaucaaggacuucggcggcuucaacuucagccagauccugcccgaccccagcaagcccagcaagcggagcuucaucgaggaccugcuguucaacaaggugacccuagccgacgccggcuucaucaagcaguacggcgacugccucggcgacauagccgcccgggaccugaucugcgcccagaaguucaacggccugaccgugcugccuccccugcugaccgacgagaugaucgcccaguacaccagcgcccuguuagccggaaccaucaccagcggcuggacuuucggcgcuggagccgcucugcagauccccuucgccaugcagauggccuaccgguucaacggcaucggcgugacccagaacgugcuguacgagaaccagaagcugaucgccaaccaguucaacagcgccaucggcaagauccaggacagccugagcagcaccgcuagcgcccugggcaagcugcaggacguggugaaccagaacgcccaggcccugaacacccuggugaagcagcugagcagcaacuucggcgccaucagcagcgugcugaacgacauccugagccggcuggacaaggucgaggccgaggugcagaucgaccggcugaucacuggccggcugcagagccugcagaccuacgugacccagcagcugauccgggccgccgagauucgggccagcgccaaccuggccgccaucaagaugagcgagugcgugcugggccagagcaagcggguggacuucugcggcaagggcuaccaccugaugagcuuuccccagagcgcaccccacggagugguguuccugcacgugaccuacgugcccgcccaggagaagaacuucaccaccgccccagccaucugccacgacggcaaggcccacuuuccccgggagggcguguucgugagcaacggcacccacugguucgugacccagcggaacuucuacgagccccagaucaucaccaccgacaacaccuucgugagcggcaacugcgacguggugaucggcaucgugaacaacaccguguacgauccccugcagcccgagcuggacagcuucaaggaggagcuggacaaguacuucaagaaucacaccagccccgacguggaccugggcgacaucagcggcaucaacgccagcguggugaacauccagaaggagaucgaucggcugaacgagguggccaagaaccugaacgagagccugaucgaccugcaggagcugggcaaguacgagcaguacaucaaguggcccugguacaucuggcugggcuucaucgccggccugaucgccaucgugauggugaccaucaugcugugcugcaugaccagcugcugcagcugccugaagggcuguugcagcugcggcagcugcugcaaguucgacgaggacgacagcgagcccgugcugaagggcgugaagcugcacuacaccugaggacuaguuauaagacugacuagcccgaugggccucccaacgggcccuccuccccuccuugcaccgagauuaaucaaaggcucuuuucagagccaccaaaaaaaaaaaaaaaaaaaaaaaaaaaaaaaaaaaaaaaaaaaaaaaaaaaaaaaaaaaaaaaaaaaaaaaaaaaaaaaaaaaaaaaaaaaaaaaaaaaaa

SEQ ID NO: 24122 - RNA, 4035 nt, Artificial Sequence
  SARS-CoV-2/Wuhan/WIV05/2019__EPI_ISL_402128 spike protein mRNA gc (1-1273)(S13I_W152C_L452R_D614G)
aggagaaagcuuaccauguucguguuccuggugcugcugccccuggugagcauccagugcgugaaccugaccacccggacccagcugccaccagccuacaccaacagcuucacccggggcgucuacuaccccgacaagguguuccggagcagcguccugcacagcacccaggaccuguuccugcccuucuucagcaacgugaccugguuccacgccauccacgugagcggcaccaacggcaccaagcgguucgacaaccccgugcugcccuucaacgacggcguguacuucgccagcaccgagaagagcaacaucauccggggcuggaucuucggcaccacccuggacagcaagacccagagccugcugaucgugaauaacgccaccaacguggugaucaaggugugcgaguuccaguucugcaacgaccccuuccugggcguguacuaccacaagaacaacaagagcugcauggagagcgaguuccggguguacagcagcgccaacaacugcaccuucgaguacgugagccagcccuuccugauggaccuggagggcaagcagggcaacuucaagaaccugcgggaguucguguucaagaacaucgacggcuacuucaagaucuacagcaagcacaccccaaucaaccuggugcgggaucugccccagggcuucucagcccuggagccccugguggaccugcccaucggcaucaacaucacccgguuccagacccugcuggcccugcaccggagcuaccugaccccaggcgacagcagcagcggguggacagcaggcgcggcugcuuacuacgugggcuaccugcagccccggaccuuccugcugaaguacaacgagaacggcaccaucaccgacgccguggacugcgcccuggacccucugagcgagaccaagugcacccugaagagcuucaccguggagaagggcaucuaccagaccagcaacuuccgggugcagcccaccgagagcaucgugcgguuccccaacaucaccaaccugugccccuucggcgagguguucaacgccacccgguucgccagcguguacgccuggaaccggaagcggaucagcaacugcguggccgacuacagcgugcuguacaacagcgccagcuucagcaccuucaagugcuacggcgugagccccaccaagcugaacgaccugugcuucaccaacguguacgccgacagcuucgugauccguggcgacgaggugcggcagaucgcacccggccagacaggcaagaucgccgacuacaacuacaagcugcccgacgacuucaccggcugcgugaucgccuggaacagcaacaaccucgacagcaaggugggcggcaacuacaacuaccgcuaccggcuguuccggaagagcaaccugaagcccuucgagcgggacaucagcaccgagaucuaccaagccggcuccaccccuugcaacggcguggagggcuucaacugcuacuucccucugcagagcuacggcuuccagcccaccaacggcgugggcuaccagcccuaccgggugguggugcugagcuucgagcugcugcacgccccagccaccguguguggccccaagaagagcaccaaccuggugaagaacaagugcgugaacuucaacuucaacggccuuaccggcaccggcgugcugaccgagagcaacaagaaauuccugcccuuucagcaguucggccgggacaucgccgacaccaccgacgcugugcgggauccccagacccuggagauccuggacaucaccccuugcagcuucggcggcgugagcgugaucaccccaggcaccaacaccagcaaccagguggccgugcuguaccagggcgugaacugcaccgaggugcccguggccauccacgccgaccagcugacacccaccuggcgggucuacagcaccggcagcaacguguuccagacccgggccgguugccugaucggcgccgagcacgugaacaacagcuacgagugcgacauccccaucggcgccggcaucugugccagcuaccagacccagaccaauucaccccggagggcaaggagcguggccagccagagcaucaucgccuacaccaugagccugggcgccgagaacagcguggccuacagcaacaacagcaucgccauccccaccaacuucaccaucagcgugaccaccgagauucugcccgugagcaugaccaagaccagcguggacugcaccauguacaucugcggcgacagcaccgagugcagcaaccugcugcugcaguacggcagcuucugcacccagcugaaccgggcccugaccggcaucgccguggagcaggacaagaacacccaggagguguucgcccaggugaagcagaucuacaagaccccucccaucaaggacuucggcggcuucaacuucagccagauccugcccgaccccagcaagcccagcaagcggagcuucaucgaggaccugcuguucaacaaggugacccuagccgacgccggcuucaucaagcaguacggcgacugccucggcgacauagccgcccgggaccugaucugcgcccagaaguucaacggccugaccgugcugccuccccugcugaccgacgagaugaucgcccaguacaccagcgcccuguuagccggaaccaucaccagcggcuggacuuucggcgcuggagccgcucugcagauccccuucgccaugcagauggccuaccgguucaacggcaucggcgugacccagaacgugcuguacgagaaccagaagcugaucgccaaccaguucaacagcgccaucggcaagauccaggacagccugagcagcaccgcuagcgcccugggcaagcugcaggacguggugaaccagaacgcccaggcccugaacacccuggugaagcagcugagcagcaacuucggcgccaucagcagcgugcugaacgacauccugagccggcuggacaaggucgaggccgaggugcagaucgaccggcugaucacuggccggcugcagagccugcagaccuacgugacccagcagcugauccgggccgccgagauucgggccagcgccaaccuggccgccaccaagaugagcgagugcgugcugggccagagcaagcggguggacuucugcggcaagggcuaccaccugaugagcuuuccccagagcgcaccccacggagugguguuccugcacgugaccuacgugcccgcccaggagaagaacuucaccaccgccccagccaucugccacgacggcaaggcccacuuuccccgggagggcguguucgugagcaacggcacccacugguucgugacccagcggaacuucuacgagccccagaucaucaccaccgacaacaccuucgugagcggcaacugcgacguggugaucggcaucgugaacaacaccguguacgauccccugcagcccgagcuggacagcuucaaggaggagcuggacaaguacuucaagaaucacaccagccccgacguggaccugggcgacaucagcggcaucaacgccagcguggugaacauccagaaggagaucgaucggcugaacgagguggccaagaaccugaacgagagccugaucgaccugcaggagcugggcaaguacgagcaguacaucaaguggcccugguacaucuggcugggcuucaucgccggccugaucgccaucgugauggugaccaucaugcugugcugcaugaccagcugcugcagcugccugaagggcuguugcagcugcggcagcugcugcaaguucgacgaggacgacagcgagcccgugcugaagggcgugaagcugcacuacaccugaggacuaguuauaagacugacuagcccgaugggccucccaacgggcccuccuccccuccuugcaccgagauuaaucaaaggcucuuuucagagccaccaaaaaaaaaaaaaaaaaaaaaaaaaaaaaaaaaaaaaaaaaaaaaaaaaaaaaaaaaaaaaaaaaaaaaaaaaaaaaaaaaaaaaaaaaaaaaaaaaaaaa

SEQ ID NO: 24123 - RNA, 4035 nt, Artificial Sequence
  SARS-CoV-2/Wuhan/WIV05/2019__EPI_ISL_402128 spike protein mRNA gc (1-1273)
aggagaaagcuuaccauguucguguuccuggugcugcugccccuggugagcagccagugcgugaaccugaccacccggacccagcugcccccugccuacaccaacagcuucacccggggcguguacuaccccgacaagguguuccggagcagcgugcugcacagcacccaggaccuguuccugcccuucuucagcaacgugaccugguuccacgccauccacgugagcggcaccaacggcaccaagcgguucgacaacccagugcugcccuucaacgacggcguguacuucgccagcaccgagaagucaaacaucauccggggcuggaucuucggcaccacccuggacagcaagacacagagccugcugaucgugaacaacgccaccaacguggugaucaaggugugcgaguuucaguucugcaacgaccccuuccugggcguguacuaccacaagaacaacaagagcuggauggagagcgaguuccgggucuacagcagcgcuaacaauugcaccuucgaguacgugagccagcccuuccugauggaccucgagggcaagcagggcaacuucaagaaccugcgggaguucguguucaagaacaucgauggcuacuucaagaucuacagcaagcacacccccaucaaccuggugcgggaccugccccagggauucagcgcccuggagccucugguggaccugcccaucggcaucaacaucaccagguuccagacccugcuggcccugcaccggagcuaccugacccccggcgacagcagcagcggcuggaccgccggcgccgccgcauacuacgugggcuaccugcagccacggaccuuccugcugaaguacaacgagaacggcaccaucaccgacgccguggacugcgcccuggacccccugagcgagaccaagugcacccuaaagagcuucaccguggagaagggcaucuaccagaccagcaacuuccgggugcagcccacugagagcaucgugcgguuccccaacauuaccaaccugugucccuucggcgagguguucaacgccacccgguucgccagcguguacgccuggaaccggaagcggaucagcaacugcguggccgacuacagcgugcuguacaacagcgccagcuucagcaccuucaagugcuacggcgugagcccuaccaagcugaacgaccugugcuucaccaacguguacgcugacagcuucgugauccggggcgacgaggugcggcagaucgcccccggccagaccggcaagaucgccgacuacaacuacaagcugcccgacgacuucaccggcugcgugaucgccuggaacagcaacaaccuggacagcaaggugggcggcaacuacaacuaccuguaccggcuguuccguaagagcaaccugaagccauucgagcgggacaucagcaccgagaucuaccaggccggcagcacccccugcaacgguguggagggcuuuaacugcuacuucccccugcagagcuacggcuuccagcccaccaacggcgugggcuaccagcccuaccgggugguggugcugagcuucgagcugcugcacgcccccgccaccgugugcggcccuaaaaagagcaccaaccuggugaagaacaagugcgugaacuucaauuucaacggccugaccggcaccggcgugcugaccgagagcaacaagaaguuccugcccuuccagcaguucggccgggauaucgccgacaccaccgacgcagugcgggacccccagacccuggagauccuggacaucaccccaugcagcuucggcggcgugagcgucaucacccccggcacaaacaccagcaaccagguggccgugcuguaccaggacgugaacugcaccgaggugcccguggccauccacgccgaccagcugacccccaccuggcggguguacagcaccggaagcaacguguuccagacccgggccggcugccugaucggcgccgagcacgugaacaacuccuacgagugcgacauccccaucggcgcuggcaucugcgccagcuaccagacccagaccaacagcccccggcgggcccggagcguggccagccagagcaucaucgccuacaccaugagcuuaggcgccgagaacagcguggccuacagcaacaacagcaucgcgaucccuaccaacuucaccaucagcgugaccaccgagauacugcccgugagcaugaccaagaccagcguggacuguaccauguacaucugcggcgacagcaccgagugcagcaaccugcugcugcaguacggcagcuucugcacccagcugaaccgggcccugaccggcaucgccguggagcaggacaagaacacccaagagguguucgcccaggugaagcagaucuacaagacucccccaaucaaggacuucggcggcuucaacuucagccagauccugcccgaccccagcaagcccagcaagcggagcuucaucgaggaccugcuguucaacaaggugacccuggccgacgccggcuucaucaagcaguacggcgauugccugggcgacaucgccgcucgggaccugaucugcgcccagaaguucaacgggcugaccgugcugcccccucugcugaccgacgagaugaucgcccaguacaccagcgcccugcuugccggcaccaucaccagcggcuggaccuucggcgccggcgcagcccugcagauccccuucgccaugcagauggccuaccgguucaacggcaucggcgugacccagaacgugcuguacgagaaccagaagcugaucgccaaccaguucaacagcgccaucggcaagauccaggacagccugagcagcaccgccagcgcccugggcaagcugcaggacguggugaaccagaacgcucaggcccugaacacccuggugaagcagcugagcagcaacuucggcgccaucagcucagugcugaaugacauccugagcaggcuggacaagguggaggccgaggugcagaucgaccggcugaucaccggccggcugcagagccugcagaccuacgugacccagcagcugauccgggccgccgagauccgggccagcgccaaccuggcagccaccaagaugagcgagugcgugcugggccagagcaagcggguggacuuuugcggcaagggcuaccaccugaugagcuucccccagagcgccccacacggcgugguguuccuccacgucacauacgugcccgcccaggagaagaacuucaccaccgcccccgccauuugccacgacggcaaggcucacuucccccgggagggcguguucgugagcaacggaacccacugguucgugacccagcggaacuucuacgagccccagaucaucaccaccgacaacaccuucgugagcggcaacugcgacguggugaucggcaucgugaacaacaccguguacgacccccugcagccugagcuggacagcuucaaggaggagcuggacaaguacuucaagaaccacaccagccccgauguggaccugggcgacaucagcggcaucaacgccagcguggugaacauccagaaggagaucgaccggcugaacgagguggccaagaaccugaacgagagccugaucgaccugcaggagcugggcaaguacgagcaguacaucaaguggcccugguacaucuggcugggcuucaucgccggccugaucgccaucgugauggugaccaucaugcugugcugcaugaccagcugcuguagcugccugaagggcugcugcagcugcggcagcugcugcaaguucgacgaggacgacagcgagccagugcugaagggcgugaagcugcacuacaccugaggacuaguuauaagacugacuagcccgaugggccucccaacgggcccuccuccccuccuugcaccgagauuaaucaaaggcucuuuucagagccaccaaaaaaaaaaaaaaaaaaaaaaaaaaaaaaaaaaaaaaaaaaaaaaaaaaaaaaaaaaaaaaaaaaaaaaaaaaaaaaaaaaaaaaaaaaaaaaaaaaaaa

SEQ ID NO: 24124 - RNA, 4035 nt, Artificial Sequence
  SARS-CoV-2/Wuhan/WIV05/2019__EPI_ISL_402128 spike protein mRNA gc (1-1273)(D614G)
aggagaaagcuuaccauguucguguuccuggugcugcugccccuggugagcagccagugcgugaaccugaccacccggacccagcugcccccugccuacaccaacagcuucacccggggcguguacuaccccgacaagguguuccggagcagcgugcugcacagcacccaggaccuguuccugcccuucuucagcaacgugaccugguuccacgccauccacgugagcggcaccaacggcaccaagcgguucgacaacccagugcugcccuucaacgacggcguguacuucgccagcaccgagaagucaaacaucauccggggcuggaucuucggcaccacccuggacagcaagacacagagccugcugaucgugaacaacgccaccaacguggugaucaaggugugcgaguuucaguucugcaacgaccccuuccugggcguguacuaccacaagaacaacaagagcuggauggagagcgaguuccgggucuacagcagcgcuaacaauugcaccuucgaguacgugagccagcccuuccugauggaccucgagggcaagcagggcaacuucaagaaccugcgggaguucguguucaagaacaucgauggcuacuucaagaucuacagcaagcacacccccaucaaccuggugcgggaccugccccagggauucagcgcccuggagccucugguggaccugcccaucggcaucaacaucaccagguuccagacccugcuggcccugcaccggagcuaccugacccccggcgacagcagcagcggcuggaccgccggcgccgccgcauacuacgugggcuaccugcagccacggaccuuccugcugaaguacaacgagaacggcaccaucaccgacgccguggacugcgcccuggacccccugagcgagaccaagugcacccuaaagagcuucaccguggagaagggcaucuaccagaccagcaacuuccgggugcagcccacugagagcaucgugcgguuccccaacauuaccaaccugugucccuucggcgagguguucaacgccacccgguucgccagcguguacgccuggaaccggaagcggaucagcaacugcguggccgacuacagcgugcuguacaacagcgccagcuucagcaccuucaagugcuacggcgugagcccuaccaagcugaacgaccugugcuucaccaacguguacgcugacagcuucgugauccggggcgacgaggugcggcagaucgcccccggccagaccggcaagaucgccgacuacaacuacaagcugcccgacgacuucaccggcugcgugaucgccuggaacagcaacaaccuggacagcaaggugggcggcaacuacaacuaccuguaccggcuguuccguaagagcaaccugaagccauucgagcgggacaucagcaccgagaucuaccaggccggcagcacccccugcaacgguguggagggcuuuaacugcuacuucccccugcagagcuacggcuuccagcccaccaacggcgugggcuaccagcccuaccgggugguggugcugagcuucgagcugcugcacgcccccgccaccgugugcggcccuaaaaagagcaccaaccuggugaagaacaagugcgugaacuucaauuucaacggccugaccggcaccggcgugcugaccgagagcaacaagaaguuccugcccuuccagcaguucggccgggauaucgccgacaccaccgacgcagugcgggacccccagacccuggagauccuggacaucaccccaugcagcuucggcggcgugagcgucaucacccccggcacaaacaccagcaaccagguggccgugcuguaccagggagugaacugcaccgaggugcccguggccauccacgccgaccagcugacccccaccuggcggguguacagcaccggcagcaacguguuccagacccgggccggcugccugaucggcgccgagcacgugaacaacuccuacgagugcgacauccccaucggcgcuggcaucugcgccagcuaccagacccagaccaacagcccccggcgggcccggagcguggccagccagagcaucaucgccuacaccaugagcuuaggcgccgagaacagcguggccuacagcaacaacagcaucgcgaucccuaccaacuucaccaucagcgugaccaccgagauacugcccgugagcaugaccaagaccagcguggacuguaccauguacaucugcggcgacagcaccgagugcagcaaccugcugcugcaguacggcagcuucugcacccagcugaaccgggcccugaccggcaucgccguggagcaggacaagaacacccaagagguguucgcccaggugaagcagaucuacaagacucccccaaucaaggacuucggcggcuucaacuucagccagauccugcccgaccccagcaagcccagcaagcggagcuucaucgaggaccugcuguucaacaaggugacccuggccgacgccggcuucaucaagcaguacggcgacugccugggggauaucgccgcucgggaccugaucugcgcccagaaguucaacggccugaccgugcugcccccucugcugaccgacgagaugaucgcccaguacaccagcgcccugcuugccggcaccaucaccagcggcuggaccuucggcgccggcgcagcccugcagauccccuucgccaugcagauggccuaccgguucaacggcaucggcgugacccagaacgugcuguacgagaaccagaagcugaucgccaaccaguucaacagcgccaucggcaagauccaggacagccugagcagcaccgccagcgcccugggcaagcugcaggacguggugaaccagaacgcucaggcccugaacacccuggugaagcagcugagcagcaacuucggcgccaucagcucagugcugaaugacauccugagcaggcuggacaagguggaggccgaggugcagaucgaccggcugaucaccggccggcugcagagccugcagaccuacgugacccagcagcugauccgggccgccgagauccgggccagcgccaaccuggcagccaccaagaugagcgagugcgugcugggccagagcaagcggguggacuuuugcggcaagggcuaccaccugaugagcuucccccagagcgccccacacggcgugguguuccuccacgucacauacgugcccgcccaggagaagaacuucaccaccgcccccgccauuugccacgacggcaaggcucacuucccccgggagggaguguucgugagcaacggcacccacugguucgugacccagcggaacuucuacgagccccagaucaucaccaccgacaacaccuucgugagcggcaacugcgacguggugaucggcaucgugaacaacaccguguacgacccccugcagccugagcuggacagcuucaaggaggagcuggacaaguacuucaagaaccacaccagccccgacguggaucugggcgacaucagcggcaucaacgccagcguggugaacauccagaaggagaucgaccggcugaacgagguggccaagaaccugaacgagagccugaucgaccugcaggagcugggcaaguacgagcaguacaucaaguggcccugguacaucuggcugggcuucaucgccggccugaucgccaucgugauggugaccaucaugcugugcugcaugaccagcugcuguagcugccugaagggcugcugcagcugcggcagcugcugcaaguucgacgaggacgacagcgagccagugcugaagggcgugaagcugcacuacaccugaggacuaguuauaagacugacuagcccgaugggccucccaacgggcccuccuccccuccuugcaccgagauuaaucaaaggcucuuuucagagccaccaaaaaaaaaaaaaaaaaaaaaaaaaaaaaaaaaaaaaaaaaaaaaaaaaaaaaaaaaaaaaaaaaaaaaaaaaaaaaaaaaaaaaaaaaaaaaaaaaaaaa

SEQ ID NO: 24125 - RNA, 4035 nt, Artificial Sequence
  SARS-CoV-2/Wuhan/WIV05/2019__EPI_ISL_402128 spike protein mRNA gc (1-1273)(A222V_D614G)
aggagaaagcuuaccauguucguguuccuggugcugcugccccuggugagcagccagugcgugaaccugaccacccggacccagcugcccccugccuacaccaacagcuucacccggggcguguacuaccccgacaagguguuccggagcagcgugcugcacagcacccaggaccuguuccugcccuucuucagcaacgugaccugguuccacgccauccacgugagcggcaccaacggcaccaagcgguucgacaacccagugcugcccuucaacgacggcguguacuucgccagcaccgagaagucaaacaucauccggggcuggaucuucggcaccacccuggacagcaagacacagagccugcugaucgugaacaacgccaccaacguggugaucaaggugugcgaguuucaguucugcaacgaccccuuccugggcguguacuaccacaagaacaacaagagcuggauggagagcgaguuccgggucuacagcagcgcuaacaauugcaccuucgaguacgugagccagcccuuccugauggaccucgagggcaagcagggcaacuucaagaaccugcgggaguucguguucaagaacaucgauggcuacuucaagaucuacagcaagcacacccccaucaaccuggugcgggaccugccccagggauucagcgugcuggagccucugguggaccugcccaucggcaucaacaucaccagguuccagacccugcuggcccugcaccggagcuaccugacccccggcgacagcagcagcggcuggaccgccggcgccgccgccuacuacgugggcuaccugcagccacggaccuuccugcugaaguacaacgagaacggcaccaucaccgacgcaguggacugcgcccuggacccccugagcgagaccaagugcacccuaaagagcuucaccguggagaagggcaucuaccagaccagcaacuuccgggugcagcccacugagagcaucgugcgguuccccaacauuaccaaccugugucccuucggcgagguguucaacgccacccgguucgccagcguguacgccuggaaccggaagcggaucagcaacugcguggccgacuacagcgugcuguacaacagcgccagcuucagcaccuucaagugcuacggcgugagcccuaccaagcugaacgaccugugcuucaccaacguguacgccgacagcuucgugauccggggcgacgaggugcggcagaucgcucccggccagaccggcaagaucgccgacuacaacuacaagcugcccgacgacuucaccggcugcgugaucgccuggaacagcaacaaccuggacagcaaggugggcggcaacuacaacuaccuguaccggcuguuccguaagagcaaccugaagccauucgagcgggacaucagcaccgagaucuaccaggccggcagcacccccugcaacgguguggagggcuuuaacugcuacuucccccugcagagcuacggcuuccagcccaccaacggcgugggcuaccagcccuaccgggugguggugcugagcuucgagcugcugcacgcccccgccaccgugugcggcccuaaaaagagcaccaaccuggugaagaacaagugcgugaacuucaauuucaacggccugaccggcaccggcgugcugaccgagagcaacaagaaguuccugcccuuccagcaguucggccgggauaucgccgacaccaccgacgccgugcgggacccccagacccuggagauccuggacaucaccccaugcagcuucggcggcgucagcgugaucacccccggcacaaacaccagcaaccagguggcagugcuguaccagggagugaacugcaccgaggugcccguggccauccacgccgaccagcugacccccaccuggcggguguacagcaccggcagcaacguguuccagacccgggccggcugccugaucggcgccgagcacgugaacaacuccuacgagugcgacauccccaucggcgccggcaucugcgcuagcuaccagacccagaccaacagcccccggcgggcccggagcguggccagccagagcaucaucgccuacaccaugagcuuaggcgccgagaacagcguggccuacagcaacaacagcaucgccaucccuaccaacuucaccaucagcgugaccaccgagauacugcccgugagcaugaccaagaccagcguggacuguaccauguacaucugcggcgacagcaccgagugcagcaaccugcugcugcaguacggcagcuucugcacccagcugaaccgggcgcugaccggcaucgccguggagcaggacaagaacacccaagagguguucgcccaggugaagcagaucuacaagacucccccaaucaaggacuucggcggcuucaacuucagccagauccugcccgaccccagcaagcccagcaagcggagcuucaucgaggaccugcuguucaacaaggugacccuggccgacgccggcuucaucaagcaguacggcgacugccugggggauaucgccgcccgggaccugaucugcgcucagaaguucaacggccugaccgugcugcccccucugcugaccgacgagaugaucgcccaguacaccagcgcccugcuugccggcaccaucaccagcggcuggaccuucggcgccggcgccgcacugcagauccccuucgccaugcagauggccuaccgguucaacggcaucggcgugacccagaacgugcuguacgagaaccagaagcugaucgccaaccaguucaacagcgccaucggcaagauccaggacagccugagcagcaccgccagcgcccugggcaagcugcaggacguggugaaccagaacgcccaggcucugaacacccuggugaagcagcugagcagcaacuucggcgccaucagcucagugcugaaugacauccugagcaggcuggacaagguggaggccgaggugcagaucgaccggcugaucaccggccggcugcagagccugcagaccuacgugacccagcagcugauccgggccgccgagauccgggccagcgccaaccuggccgcaaccaagaugagcgagugcgugcugggccagagcaagcggguggacuuuugcggcaagggcuaccaccugaugagcuucccccagagcgccccacacggcguggucuuccuccacgugacauacgugcccgcccaggagaagaacuucaccaccgcccccgccauuugccacgacggcaaggcccacuucccccgggagggaguguucgugagcaacggcacccacugguucgugacccagcggaacuucuacgagccccagaucaucaccaccgacaacaccuucgugagcggcaacugcgacguggugaucggcaucgugaacaacaccguguacgacccccugcagccugagcuggacagcuucaaggaggagcuggacaaguacuucaagaaccacaccagccccgacguggaucugggcgacaucagcggcaucaacgcuagcguggugaacauccagaaggagaucgaccggcugaacgagguggccaagaaccugaacgagagccugaucgaccugcaggagcugggcaaguacgagcaguacaucaaguggcccugguacaucuggcugggcuucaucgccggccugaucgccaucgugauggugaccaucaugcugugcugcaugaccagcugcuguagcugccugaagggcugcugcagcugcggcagcugcugcaaguucgacgaggacgacagcgagccagugcugaagggcgugaagcugcacuacaccugaggacuaguuauaagacugacuagcccgaugggccucccaacgggcccuccuccccuccuugcaccgagauuaaucaaaggcucuuuucagagccaccaaaaaaaaaaaaaaaaaaaaaaaaaaaaaaaaaaaaaaaaaaaaaaaaaaaaaaaaaaaaaaaaaaaaaaaaaaaaaaaaaaaaaaaaaaaaaaaaaaaaa

SEQ ID NO: 24126 - RNA, 4035 nt, Artificial Sequence
  SARS-CoV-2/Wuhan/WIV05/2019__EPI_ISL_402128 spike protein mRNA gc (1-1273)(N439K_D614G)
aggagaaagcuuaccauguucguguuccuggugcugcugccccuggugagcagccagugcgugaaccugaccacccggacccagcugcccccugccuacaccaacagcuucacccggggcguguacuaccccgacaagguguuccggagcagcgugcugcacagcacccaggaccuguuccugcccuucuucagcaacgugaccugguuccacgccauccacgugagcggcaccaacggcaccaagcgguucgacaacccagugcugcccuucaacgacggcguguacuucgccagcaccgagaagucaaacaucauccggggcuggaucuucggcaccacccuggacagcaagacacagagccugcugaucgugaacaacgccaccaacguggugaucaaggugugcgaguuucaguucugcaacgaccccuuccugggcguguacuaccacaagaacaacaagagcuggauggagagcgaguuccgggucuacagcagcgcuaacaauugcaccuucgaguacgugagccagcccuuccugauggaccucgagggcaagcagggcaacuucaagaaccugcgggaguucguguucaagaacaucgauggcuacuucaagaucuacagcaagcacacccccaucaaccuggugcgggaccugccccagggauucagcgcccuggagccucugguggaccugcccaucggcaucaacaucaccagguuccagacccugcuggcccugcaccggagcuaccugacccccggcgacagcagcagcggcuggaccgccggcgccgccgcauacuacgugggcuaccugcagccacggaccuuccugcugaaguacaacgagaacggcaccaucaccgacgccguggacugcgcccuggacccccugagcgagaccaagugcacccuaaagagcuucaccguggagaagggcaucuaccagaccagcaacuuccgggugcagcccacugagagcaucgugcgguuccccaacauuaccaaccugugucccuucggcgagguguucaacgccacccgguucgccagcguguacgccuggaaccggaagcggaucagcaacugcguggccgacuacagcgugcuguacaacagcgccagcuucagcaccuucaagugcuacggcgugagcccuaccaagcugaacgaccugugcuucaccaacguguacgcugacagcuucgugauccggggcgacgaggugcggcagaucgcccccggccagaccggcaagaucgccgacuacaacuacaagcugcccgacgacuucaccggcugcgugaucgccuggaacagcaagaaccuggacagcaaggugggcggcaacuacaacuaccuguaccggcuguuccguaagagcaaccugaagccauucgagcgggacaucagcaccgagaucuaccaggccggcagcacccccugcaacgguguggagggcuuuaacugcuacuucccccugcagagcuacggcuuccagcccaccaacggcgugggcuaccagcccuaccgggugguggugcugagcuucgagcugcugcacgcccccgccaccgugugcggcccuaaaaagagcaccaaccuggugaagaacaagugcgugaacuucaacuucaauggccugaccggcaccggcgugcugaccgagagcaacaagaaguuccugcccuuccagcaguucggccgggauaucgccgacaccaccgacgcagugcgggacccccagacccuggagauccuggacaucaccccaugcagcuucggcggcgugagcgucaucacccccggcacaaacaccagcaaccagguggccgugcuguaccagggagugaacugcaccgaggugcccguggccauccacgccgaccagcugacccccaccuggcggguguacagcaccggcagcaacguguuccagacccgggccggcugccugaucggcgccgagcacgugaacaacuccuacgagugcgacauccccaucggcgcuggcaucugcgccagcuaccagacccagaccaacagcccccggcgggcccggagcguggccagccagagcaucaucgccuacaccaugagcuuaggcgccgagaacagcguggccuacagcaacaacagcaucgcgaucccuaccaacuucaccaucagcgugaccaccgagauacugcccgugagcaugaccaagaccagcguggacuguaccauguacaucugcggcgacagcaccgagugcagcaaccugcugcugcaguacggcagcuucugcacccagcugaaccgggcccugaccggcaucgccguggagcaggacaagaacacccaagagguguucgcccaggugaagcagaucuacaagacucccccaaucaaggacuucggcggcuucaacuucagccagauccugcccgaccccagcaagcccagcaagcggagcuucaucgaggaccugcuguucaacaaggugacccuggccgacgccggcuucaucaagcaguacggcgacugccugggggauaucgccgcucgggaccugaucugcgcccagaaguucaacggccugaccgugcugcccccucugcugaccgacgagaugaucgcccaguacaccagcgcccugcuugccggcaccaucaccagcggcuggaccuucggcgccggcgcagcccugcagauccccuucgccaugcagauggccuaccgguucaacggcaucggcgugacccagaacgugcuguacgagaaccagaagcugaucgccaaccaguucaacagcgccaucggcaagauccaggacagccugagcagcaccgccagcgcccugggcaagcugcaggacguggugaaccagaacgcucaggcccugaacacccuggugaagcagcugagcagcaacuucggcgccaucagcucagugcugaacgacauccugagcaggcuggacaagguggaggccgaggugcagaucgaccggcugaucaccggccggcugcagagccugcagaccuacgugacccagcagcugauccgggccgccgagauccgggccagcgccaaucuggcagccaccaagaugagcgagugcgugcugggccagagcaagcggguggacuuuugcggcaagggcuaccaccugaugagcuucccccagagcgccccacacggcgugguguuccuccacgucacauacgugcccgcccaggagaagaacuucaccaccgcccccgccauuugccacgacggcaaggcucacuucccccgggagggaguguucgugagcaacggcacccacugguucgugacccagcggaacuucuacgagccccagaucaucaccaccgacaacaccuucgugagcggcaacugcgacguggugaucggcaucgugaacaacaccguguacgacccccugcagccugagcuggacagcuucaaggaggagcuggacaaguacuucaagaaccacaccagccccgacguggaucugggcgacaucagcggcaucaacgccagcguggugaacauccagaaggagaucgaccggcugaacgagguggccaagaaccugaacgagagccugaucgaccugcaggagcugggcaaguacgagcaguacaucaaguggcccugguacaucuggcugggcuucaucgccggccugaucgccaucgugauggugaccaucaugcugugcugcaugaccagcugcuguagcugccugaagggcugcugcagcugcggcagcugcugcaaguucgacgaggacgacagcgagccagugcugaagggcgugaagcugcacuacaccugaggacuaguuauaagacugacuagcccgaugggccucccaacgggcccuccuccccuccuugcaccgagauuaaucaaaggcucuuuucagagccaccaaaaaaaaaaaaaaaaaaaaaaaaaaaaaaaaaaaaaaaaaaaaaaaaaaaaaaaaaaaaaaaaaaaaaaaaaaaaaaaaaaaaaaaaaaaaaaaaaaaaa

SEQ ID NO: 24127 - RNA, 4035 nt, Artificial Sequence
  SARS-CoV-2/Wuhan/WIV05/2019__EPI_ISL_402128 spike protein mRNA gc (1-1273)(S477N_D614G)
aggagaaagcuuaccauguucguguuccuggugcugcugccccuggugagcagccagugcgugaaccugaccacccggacccagcugcccccugccuacaccaacagcuucacccggggcguguacuaccccgacaagguguuccggagcagcgugcugcacagcacccaggaccuguuccugcccuucuucagcaacgugaccugguuccacgccauccacgugagcggcaccaacggcaccaagcgguucgacaacccagugcugcccuucaacgacggcguguacuucgccagcaccgagaagucaaacaucauccggggcuggaucuucggcaccacccuggacagcaagacacagagccugcugaucgugaacaacgccaccaacguggugaucaaggugugcgaguuucaguucugcaacgaccccuuccugggcguguacuaccacaagaacaacaagagcuggauggagagcgaguuccgggucuacagcagcgcuaacaauugcaccuucgaguacgugagccagcccuuccugauggaccucgagggcaagcagggcaacuucaagaaccugcgggaguucguguucaagaacaucgauggcuacuucaagaucuacagcaagcacacccccaucaaccuggugcgggaccugccccagggauucagcgcccuggagccucugguggaccugcccaucggcaucaacaucaccagguuccagacccugcuggcccugcaccggagcuaccugacccccggcgacagcagcagcggcuggaccgccggcgccgccgcauacuacgugggcuaccugcagccacggaccuuccugcugaaguacaacgagaacggcaccaucaccgacgccguggacugcgcccuggacccccugagcgagaccaagugcacccuaaagagcuucaccguggagaagggcaucuaccagaccagcaacuuccgggugcagcccacugagagcaucgugcgguuccccaacauuaccaaccugugucccuucggcgagguguucaacgccacccgguucgccagcguguacgccuggaaccggaagcggaucagcaacugcguggccgacuacagcgugcuguacaacagcgccagcuucagcaccuucaagugcuacggcgugagcccuaccaagcugaacgaccugugcuucaccaacguguacgcugacagcuucgugauccggggcgacgaggugcggcagaucgcccccggccagaccggcaagaucgccgacuacaacuacaagcugcccgacgacuucaccggcugcgugaucgccuggaacagcaacaaccuggacagcaaggugggcggcaacuacaacuaccuguaccggcuguuccguaagagcaaccugaagccauucgagcgggacaucagcaccgagaucuaccaggccggcaacacccccugcaacgguguggagggcuuuaacugcuacuucccccugcagagcuacggcuuccagcccaccaacggcgugggcuaccagcccuaccgggugguggugcugagcuucgagcugcugcacgcccccgccaccgugugcggcccuaaaaagagcaccaaccuggugaagaacaagugcgugaauuucaacuucaacggccugaccggcaccggcgugcugaccgagagcaacaagaaguuccugcccuuccagcaguucggccgggauaucgccgacaccaccgacgcagugcgggacccccagacccuggagauccuggacaucaccccaugcagcuucggcggcgugagcgucaucacccccggcacaaacaccagcaaccagguggccgugcuguaccagggagugaacugcaccgaggugcccguggccauccacgccgaccagcugacccccaccuggcggguguacagcaccggcagcaacguguuccagacccgggccggcugccugaucggcgccgagcacgugaacaacagcuacgagugcgacauccccaucggcgcuggcaucugcgccuccuaccagacccagaccaacagcccccggcgggcccggagcguggccagccagagcaucaucgccuacaccaugagcuuaggcgccgagaacagcguggccuacagcaacaacagcaucgcgaucccuaccaacuucaccaucagcgugaccaccgagauacugcccgugagcaugaccaagaccagcguggacuguaccauguacaucugcggcgacagcaccgagugcagcaaccugcugcugcaguacggcagcuucugcacccagcugaaccgggcccugaccggcaucgccguggagcaggacaagaacacccaagagguguucgcccaggugaagcagaucuacaagacucccccaaucaaggacuucggcggcuucaacuucagccagauccugcccgaccccagcaagcccagcaagcggagcuucaucgaggaccugcuguucaacaaggugacccuggccgacgccggcuucaucaagcaguacggcgacugccugggggauaucgccgcucgggaccugaucugcgcccagaaguucaacggccugaccgugcugcccccucugcugaccgacgagaugaucgcccaguacaccagcgcccugcuugccggcaccaucaccagcggcuggaccuucggcgccggcgcagcccugcagauccccuucgccaugcagauggccuaccgguucaacggcaucggcgugacccagaacgugcuguacgagaaccagaagcugaucgccaaccaguucaacagcgccaucggcaagauccaggacagccugagcagcaccgccagcgcccugggcaagcugcaggacguggugaaccagaacgcucaggcccugaacacccuggugaagcagcugagcagcaauuucggcgccaucagcagcgugcugaacgacauccugucaaggcuggacaagguggaggccgaggugcagaucgaccggcugaucaccggccggcugcagagccugcagaccuacgugacccagcagcugauccgggccgccgagauccgggccagcgccaaccuggcagccaccaagaugagcgagugcgugcugggccagagcaagcggguggacuuuugcggcaagggcuaccaccugaugagcuucccccagagcgccccacacggcgugguguuccuccacgucacauacgugcccgcccaggagaagaacuucaccaccgcccccgccauuugccacgacggcaaggcucacuucccccgggagggaguguucgugagcaacggcacccacugguucgugacccagcggaacuucuacgagccccagaucaucaccaccgacaacaccuucgugagcggcaacugcgacguggugaucggcaucgugaacaacaccguguacgacccccugcagccugagcuggacagcuucaaggaggagcuggacaaguacuucaagaaccacaccagccccgacguggaucugggcgacaucagcggcaucaacgccagcguggugaacauccagaaggagaucgaccggcugaacgagguggccaagaaccugaacgagagccugaucgaccugcaggagcugggcaaguacgagcaguacaucaaguggcccugguacaucuggcugggcuucaucgccggccugaucgccaucgugauggugaccaucaugcugugcugcaugaccagcugcuguagcugccugaagggcugcugcagcugcggcagcugcugcaaguucgacgaggacgacagcgagccagugcugaagggcgugaagcugcacuacaccugaggacuaguuauaagacugacuagcccgaugggccucccaacgggcccuccuccccuccuugcaccgagauuaaucaaaggcucuuuucagagccaccaaaaaaaaaaaaaaaaaaaaaaaaaaaaaaaaaaaaaaaaaaaaaaaaaaaaaaaaaaaaaaaaaaaaaaaaaaaaaaaaaaaaaaaaaaaaaaaaaaaaa

SEQ ID NO: 24128 - RNA, 4035 nt, Artificial Sequence
  SARS-CoV-2/Wuhan/WIV05/2019__EPI_ISL_402128 spike protein mRNA gc (1-1273)(N501Y_D614G)
aggagaaagcuuaccauguucguguuccuggugcugcugccccuggugagcagccagugcgugaaccugaccacccggacccagcugcccccugccuacaccaacagcuucacccggggcguguacuaccccgacaagguguuccggagcagcgugcugcacagcacccaggaccuguuccugcccuucuucagcaacgugaccugguuccacgccauccacgugagcggcaccaacggcaccaagcgguucgacaacccagugcugcccuucaacgacggcguguacuucgccagcaccgagaagucaaacaucauccggggcuggaucuucggcaccacccuggacagcaagacacagagccugcugaucgugaacaacgccaccaacguggugaucaaggugugcgaguuucaguucugcaacgaccccuuccugggcguguacuaccacaagaacaacaagagcuggauggagagcgaguuccgggucuacagcagcgcuaacaauugcaccuucgaguacgugagccagcccuuccugauggaccucgagggcaagcagggcaacuucaagaaccugcgggaguucguguucaagaacaucgauggcuacuucaagaucuacagcaagcacacccccaucaaccuggugcgggaccugccccagggauucagcgcccuggagccucugguggaccugcccaucggcaucaacaucaccagguuccagacccugcuggcccugcaccggagcuaccugacccccggcgacagcagcagcggcuggaccgccggcgccgccgcauacuacgugggcuaccugcagccacggaccuuccugcugaaguacaacgagaacggcaccaucaccgacgccguggacugcgcccuggacccccugagcgagaccaagugcacccuaaagagcuucaccguggagaagggcaucuaccagaccagcaacuuccgggugcagcccacugagagcaucgugcgguuccccaacauuaccaaccugugucccuucggcgagguguucaacgccacccgguucgccagcguguacgccuggaaccggaagcggaucagcaacugcguggccgacuacagcgugcuguacaacagcgccagcuucagcaccuucaagugcuacggcgugagcccuaccaagcugaacgaccugugcuucaccaacguguacgcugacagcuucgugauccggggcgacgaggugcggcagaucgcccccggccagaccggcaagaucgccgacuacaacuacaagcugcccgacgacuucaccggcugcgugaucgccuggaacagcaacaaccuggacagcaaggugggcggcaacuacaacuaccuguaccggcuguuccguaagagcaaccugaagccauucgagcgggacaucagcaccgagaucuaccaggccggcagcacccccugcaacgguguggagggcuuuaacugcuacuucccccugcagagcuacggcuuccagcccaccuacggcgugggcuaccagcccuaccgggugguggugcugagcuucgagcugcugcacgcccccgccaccgugugcggcccuaaaaagagcaccaaccuggugaagaacaagugcgugaacuucaacuucaauggccugaccggcaccggcgugcugaccgagagcaacaagaaguuccugcccuuccagcaguucggccgggauaucgccgacaccaccgacgcagugcgggacccccagacccuggagauccuggacaucaccccaugcagcuucggcggcgugagcgucaucacccccggcacaaacaccagcaaccagguggccgugcuguaccagggagugaacugcaccgaggugcccguggccauccacgccgaccagcugacccccaccuggcggguguacagcaccggcagcaacguguuccagacccgggccggcugccugaucggcgccgagcacgugaacaacuccuacgagugcgacauccccaucggcgcuggcaucugcgccagcuaccagacccagaccaacagcccccggcgggcccggagcguggccagccagagcaucaucgccuacaccaugagcuuaggcgccgagaacagcguggccuacagcaacaacagcaucgcgaucccuaccaacuucaccaucagcgugaccaccgagauacugcccgugagcaugaccaagaccagcguggacuguaccauguacaucugcggcgacagcaccgagugcagcaaccugcugcugcaguacggcagcuucugcacccagcugaaccgggcccugaccggcaucgccguggagcaggacaagaacacccaagagguguucgcccaggugaagcagaucuacaagacucccccaaucaaggacuucggcggcuucaacuucagccagauccugcccgaccccagcaagcccagcaagcggagcuucaucgaggaccugcuguucaacaaggugacccuggccgacgccggcuucaucaagcaguacggcgacugccugggggauaucgccgcucgggaccugaucugcgcccagaaguucaacggccugaccgugcugcccccucugcugaccgacgagaugaucgcccaguacaccagcgcccugcuugccggcaccaucaccagcggcuggaccuucggcgccggcgcagcccugcagauccccuucgccaugcagauggccuaccgguucaacggcaucggcgugacccagaacgugcuguacgagaaccagaagcugaucgccaaccaguucaacagcgccaucggcaagauccaggacagccugagcagcaccgccagcgcccugggcaagcugcaggacguggugaaccagaacgcucaggcccugaacacccuggugaagcagcugagcagcaacuucggcgccaucagcucagugcugaacgacauccugagcaggcuggacaagguggaggccgaggugcagaucgaccggcugaucaccggccggcugcagagccugcagaccuacgugacccagcagcugauccgggccgccgagauccgggccagcgccaaucuggcagccaccaagaugagcgagugcgugcugggccagagcaagcggguggacuuuugcggcaagggcuaccaccugaugagcuucccccagagcgccccacacggcgugguguuccuccacgucacauacgugcccgcccaggagaagaacuucaccaccgcccccgccauuugccacgacggcaaggcucacuucccccgggagggaguguucgugagcaacggcacccacugguucgugacccagcggaacuucuacgagccccagaucaucaccaccgacaacaccuucgugagcggcaacugcgacguggugaucggcaucgugaacaacaccguguacgacccccugcagccugagcuggacagcuucaaggaggagcuggacaaguacuucaagaaccacaccagccccgacguggaucugggcgacaucagcggcaucaacgccagcguggugaacauccagaaggagaucgaccggcugaacgagguggccaagaaccugaacgagagccugaucgaccugcaggagcugggcaaguacgagcaguacaucaaguggcccugguacaucuggcugggcuucaucgccggccugaucgccaucgugauggugaccaucaugcugugcugcaugaccagcugcuguagcugccugaagggcugcugcagcugcggcagcugcugcaaguucgacgaggacgacagcgagccagugcugaagggcgugaagcugcacuacaccugaggacuaguuauaagacugacuagcccgaugggccucccaacgggcccuccuccccuccuugcaccgagauuaaucaaaggcucuuuucagagccaccaaaaaaaaaaaaaaaaaaaaaaaaaaaaaaaaaaaaaaaaaaaaaaaaaaaaaaaaaaaaaaaaaaaaaaaaaaaaaaaaaaaaaaaaaaaaaaaaaaaaa

SEQ ID NO: 24129 - RNA, 4029 nt, Artificial Sequence
  SARS-CoV-2/Wuhan/WIV05/2019__EPI_ISL_402128 spike protein mRNA gc (1-1273)(H69del_V70del_D614G)
aggagaaagcuuaccauguucguguuccuggugcugcugccccuggugagcagccagugcgugaaccugaccacccggacccagcugcccccugccuacaccaacagcuucacccggggcguguacuaccccgacaagguguuccggagcagcgugcugcacagcacccaggaccuguuccugcccuucuucagcaacgugaccugguuccacgccaucagcggcaccaacggcaccaagcgguucgacaacccagugcugcccuucaacgacggcguguacuucgccagcaccgagaagucaaacaucauccggggcuggaucuucggcaccacccuggacagcaagacacagagccugcugaucgugaacaacgccaccaacguggugaucaaggugugcgaguuucaguucugcaacgaccccuuccugggcguguacuaccacaagaacaacaagagcuggauggagagcgaguuccggguguacagcagcgcuaacaauugcaccuucgaguacgucagccagcccuuccugauggaccucgagggcaagcagggcaacuucaagaaccugcgggaguucguguucaagaacaucgauggcuacuucaagaucuacagcaagcacacccccaucaaccuggugcgggaccugccccagggauucagcgcccuggagccucugguggaccugcccaucggcaucaacaucaccagguuccagacccugcuggcccugcaccggagcuaccugacccccggcgacagcagcagcggcuggaccgccggcgccgccgcauacuacgugggcuaccugcagccacggaccuuccugcugaaguacaacgagaacggcaccaucaccgacgccguggacugcgcccuggacccccugagcgagaccaagugcacccuaaagagcuucaccguggagaagggcaucuaccagaccagcaacuuccgggugcagcccacugagagcaucgugcgguuccccaacauuaccaaccugugucccuucggcgagguguucaacgccacccgguucgccagcguguacgccuggaaccggaagcggaucagcaacugcguggccgacuacagcgugcuguacaacagcgccagcuucagcaccuucaagugcuacggcgugagcccuaccaagcugaacgaccugugcuucaccaacguguacgcugacagcuucgugauccggggcgacgaggugcggcagaucgcccccggccagaccggcaagaucgccgacuacaacuacaagcugcccgacgacuucaccggcugcgugaucgccuggaacagcaacaaccuggacagcaaggugggcggcaacuacaacuaccuguaccggcuguuccguaagagcaaccugaagccauucgagcgggacaucagcaccgagaucuaccaggccggcagcacccccugcaacgguguggagggcuuuaacugcuacuucccccugcagagcuacggcuuccagcccaccaacggcgugggcuaccagcccuaccgggugguggugcugagcuucgagcugcugcacgcccccgccaccgugugcggcccuaaaaagagcaccaaccuggugaagaacaagugcgugaacuucaauuucaacggccugaccggcaccggcgugcugaccgagagcaacaagaaguuccugcccuuccagcaguucggccgggauaucgccgacaccaccgacgcagugcgggacccccagacccuggagauccuggacaucaccccaugcagcuucggcggcgugagcgugaucacccccggcacaaacaccagcaaccaggucgccgugcuguaccagggagugaacugcaccgaggugcccguggccauccacgccgaccagcugacccccaccuggcggguguacagcaccggcagcaacguguuccagacccgggccggcugccugaucggcgccgagcacgugaacaacuccuacgagugcgacauccccaucggcgcuggcaucugcgccagcuaccagacccagaccaacagcccccggcgggcccggagcguggccagccagagcaucaucgccuacaccaugagcuuaggcgccgagaacagcguggccuacagcaacaacagcaucgcgaucccuaccaacuucaccaucagcgugaccaccgagauacugcccgugagcaugaccaagaccagcguggacuguaccauguacaucugcggcgacagcaccgagugcagcaaccugcugcugcaguacggcagcuucugcacccagcugaaccgggcccugaccggcaucgccguggagcaggacaagaacacccaagagguguucgcccaggugaagcagaucuacaagacucccccaaucaaggacuucggcggcuucaacuucagccagauccugcccgaccccagcaagcccagcaagcggagcuucaucgaggaccugcuguucaacaaggugacccuggccgacgccggcuucaucaagcaguacggcgacugccugggggauaucgccgcucgggaccugaucugcgcccagaaguucaacggccugaccgugcugcccccucugcugaccgacgagaugaucgcccaguacaccagcgcccugcuugccggcaccaucaccagcggcuggaccuucggcgccggcgcagcccugcagauccccuucgccaugcagauggccuaccgguucaacggcaucggcgugacccagaacgugcuguacgagaaccagaagcugaucgccaaccaguucaacagcgccaucggcaagauccaggacagccugagcagcaccgccagcgcccugggcaagcugcaggacguggugaaccagaacgcucaggcccugaacacccuggugaagcagcugagcagcaacuucggcgccaucagcucagugcugaaugacauccugagcaggcuggacaagguggaggccgaggugcagaucgaccggcugaucaccggccggcugcagagccugcagaccuacgugacccagcagcugauccgggccgccgagauccgggccagcgccaaccuggcagccaccaagaugagcgagugcgugcugggccagagcaagcggguggacuuuugcggcaagggcuaccaccugaugagcuucccccagagcgccccacacggcgugguguuccuccacgugacauacguccccgcccaggagaagaacuucaccaccgcccccgccauuugccacgacggcaaggcucacuucccccgggagggaguguucgugagcaacggcacccacugguucgugacccagcggaacuucuacgagccccagaucaucaccaccgacaacaccuucgugagcggcaacugcgacguggugaucggcaucgugaacaacaccguguacgacccccugcagccugagcuggacagcuucaaggaggagcuggacaaguacuucaagaaccacaccagccccgacguggaucugggcgacaucagcggcaucaacgccagcguggugaacauccagaaggagaucgaccggcugaacgagguggccaagaaccugaacgagagccugaucgaccugcaggagcugggcaaguacgagcaguacaucaaguggcccugguacaucuggcugggcuucaucgccggccugaucgccaucgugauggugaccaucaugcugugcugcaugaccagcugcuguagcugccugaagggcugcugcagcugcggcagcugcugcaaguucgacgaggacgacagcgagccagugcugaagggcgugaagcugcacuacaccugaggacuaguuauaagacugacuagcccgaugggccucccaacgggcccuccuccccuccuugcaccgagauuaaucaaaggcucuuuucagagccaccaaaaaaaaaaaaaaaaaaaaaaaaaaaaaaaaaaaaaaaaaaaaaaaaaaaaaaaaaaaaaaaaaaaaaaaaaaaaaaaaaaaaaaaaaaaaaaaaaaaaa

SEQ ID NO: 24130 - RNA, 4035 nt, Artificial Sequence
  SARS-CoV-2/Wuhan/WIV05/2019__EPI_ISL_402128 spike protein mRNA gc (1-1273)(Y453F_D614G)
aggagaaagcuuaccauguucguguuccuggugcugcugccccuggugagcagccagugcgugaaccugaccacccggacccagcugcccccugccuacaccaacagcuucacccggggcguguacuaccccgacaagguguuccggagcagcgugcugcacagcacccaggaccuguuccugcccuucuucagcaacgugaccugguuccacgccauccacgugagcggcaccaacggcaccaagcgguucgacaacccagugcugcccuucaacgacggcguguacuucgccagcaccgagaagucaaacaucauccggggcuggaucuucggcaccacccuggacagcaagacacagagccugcugaucgugaacaacgccaccaacguggugaucaaggugugcgaguuucaguucugcaacgaccccuuccugggcguguacuaccacaagaacaacaagagcuggauggagagcgaguuccgggucuacagcagcgcuaacaauugcaccuucgaguacgugagccagcccuuccugauggaccucgagggcaagcagggcaacuucaagaaccugcgggaguucguguucaagaacaucgauggcuacuucaagaucuacagcaagcacacccccaucaaccuggugcgggaccugccccagggauucagcgcccuggagccucugguggaccugcccaucggcaucaacaucaccagguuccagacccugcuggcccugcaccggagcuaccugacccccggcgacagcagcagcggcuggaccgccggcgccgccgcauacuacgugggcuaccugcagccacggaccuuccugcugaaguacaacgagaacggcaccaucaccgacgccguggacugcgcccuggacccccugagcgagaccaagugcacccuaaagagcuucaccguggagaagggcaucuaccagaccagcaacuuccgggugcagcccacugagagcaucgugcgguuccccaacauuaccaaccugugucccuucggcgagguguucaacgccacccgguucgccagcguguacgccuggaaccggaagcggaucagcaacugcguggccgacuacagcgugcuguacaacagcgccagcuucagcaccuucaagugcuacggcgugagcccuaccaagcugaacgaccugugcuucaccaacguguacgcugacagcuucgugauccggggcgacgaggugcggcagaucgcccccggccagaccggcaagaucgccgacuacaacuacaagcugcccgacgacuucaccggcugcgugaucgccuggaacagcaacaaccuggacagcaaggugggcggcaacuacaacuaccuguuccggcuguuccguaagagcaaccugaagccauuugagcgggacaucagcaccgagaucuaccaggccggcagcacccccugcaacgguguggagggcuucaacugcuacuucccccugcagagcuacggcuuccagcccaccaacggcgugggcuaccagcccuaccgggugguggugcugagcuucgagcugcugcacgcccccgccaccgugugcggcccuaaaaagagcaccaaccuggugaagaacaagugcgugaacuucaauuucaacggccugaccggcaccggcgugcugaccgagagcaacaagaaguuccugcccuuccagcaguucggccgggauaucgccgacaccaccgacgcagugcgggacccccagacccuggagauccuggacaucaccccaugcagcuucggcggcgugagcgucaucacccccggcacaaacaccagcaaccagguggccgugcuguaccagggagugaacugcaccgaggugcccguggccauccacgccgaccagcugacccccaccuggcggguguacagcaccggcagcaacguguuccagacccgggccggcugccugaucggcgccgagcacgugaacaacuccuacgagugcgacauccccaucggcgcuggcaucugcgccagcuaccagacccagaccaacagcccccggcgggcccggagcguggccagccagagcaucaucgccuacaccaugagcuuaggcgccgagaacagcguggccuacagcaacaacagcaucgcgaucccuaccaacuucaccaucagcgugaccaccgagauacugcccgugagcaugaccaagaccagcguggacuguaccauguacaucugcggcgacagcaccgagugcagcaaccugcugcugcaguacggcagcuucugcacccagcugaaccgggcccugaccggcaucgccguggagcaggacaagaacacccaagagguguucgcccaggugaagcagaucuacaagacucccccaaucaaggacuucggcggcuucaacuucagccagauccugcccgaccccagcaagcccagcaagcggagcuucaucgaggaccugcuguucaacaaggugacccuggccgacgccggcuucaucaagcaguacggcgacugccugggggauaucgccgcucgggaccugaucugcgcccagaaguucaacggccugaccgugcugcccccucugcugaccgacgagaugaucgcccaguacaccagcgcccugcuugccggcaccaucaccagcggcuggaccuucggcgccggcgcagcccugcagauccccuucgccaugcagauggccuaccgguucaacggcaucggcgugacccagaacgugcuguacgagaaccagaagcugaucgccaaccaguucaacagcgccaucggcaagauccaggacagccugagcagcaccgccagcgcccugggcaagcugcaggacguggugaaccagaacgcucaggcccugaacacccuggugaagcagcugagcagcaacuuuggcgccaucagcucagugcugaaugacauccugagcaggcuggacaagguggaggccgaggugcagaucgaccggcugaucaccggccggcugcagagccugcagaccuacgugacccagcagcugauccgggccgccgagauccgggccagcgccaaccuggcagccaccaagaugagcgagugcgugcugggccagagcaagcggguggacuucugcggcaagggcuaccaccugaugagcuucccccagagcgccccacacggcgugguguuccuccacgucacauacgugcccgcccaggagaagaacuucaccaccgcccccgccauuugccacgacggcaaggcucacuucccccgggagggaguguucgugagcaacggcacccacugguucgugacccagcggaacuucuacgagccccagaucaucaccaccgacaacaccuucgugagcggcaacugcgacguggugaucggcaucgugaacaacaccguguacgacccccugcagccugagcuggacagcuucaaggaggagcuggacaaguacuucaagaaccacaccagccccgacguggaucugggcgacaucagcggcaucaacgccagcguggugaacauccagaaggagaucgaccggcugaacgagguggccaagaaccugaacgagagccugaucgaccugcaggagcugggcaaguacgagcaguacaucaaguggcccugguacaucuggcugggcuucaucgccggccugaucgccaucgugauggugaccaucaugcugugcugcaugaccagcugcuguagcugccugaagggcugcugcagcugcggcagcugcugcaaguucgacgaggacgacagcgagccagugcugaagggcgugaagcugcacuacaccugaggacuaguuauaagacugacuagcccgaugggccucccaacgggcccuccuccccuccuugcaccgagauuaaucaaaggcucuuuucagagccaccaaaaaaaaaaaaaaaaaaaaaaaaaaaaaaaaaaaaaaaaaaaaaaaaaaaaaaaaaaaaaaaaaaaaaaaaaaaaaaaaaaaaaaaaaaaaaaaaaaaaa

SEQ ID NO: 24131 - RNA, 4035 nt, Artificial Sequence
  SARS-CoV-2/Wuhan/WIV05/2019__EPI_ISL_402128 spike protein mRNA gc (1-1273)(D614G_I692V)
aggagaaagcuuaccauguucguguuccuggugcugcugccccuggugagcagccagugcgugaaccugaccacccggacccagcugcccccugccuacaccaacagcuucacccggggcguguacuaccccgacaagguguuccggagcagcgugcugcacagcacccaggaccuguuccugcccuucuucagcaacgugaccugguuccacgccauccacgugagcggcaccaacggcaccaagcgguucgacaacccagugcugcccuucaacgacggcguguacuucgccagcaccgagaagucaaacaucauccggggcuggaucuucggcaccacccuggacagcaagacacagagccugcugaucgugaacaacgccaccaacguggugaucaaggugugcgaguuucaguucugcaacgaccccuuccugggcguguacuaccacaagaacaacaagagcuggauggagagcgaguuccgggucuacagcagcgcuaacaauugcaccuucgaguacgugagccagcccuuccugauggaccucgagggcaagcagggcaacuucaagaaccugcgggaguucguguucaagaacaucgauggcuacuucaagaucuacagcaagcacacccccaucaaccuggugcgggaccugccccagggauucagcgcccuggagccucugguggaccugcccaucggcaucaacaucaccagguuccagacccugcuggcccugcaccggagcuaccugacccccggcgacagcagcagcggcuggaccgccggcgccgccgcauacuacgugggcuaccugcagccacggaccuuccugcugaaguacaacgagaacggcaccaucaccgacgccguggacugcgcccuggacccccugagcgagaccaagugcacccuaaagagcuucaccguggagaagggcaucuaccagaccagcaacuuccgggugcagcccacugagagcaucgugcgguuccccaacauuaccaaccugugucccuucggcgagguguucaacgccacccgguucgccagcguguacgccuggaaccggaagcggaucagcaacugcguggccgacuacagcgugcuguacaacagcgccagcuucagcaccuucaagugcuacggcgugagcccuaccaagcugaacgaccugugcuucaccaacguguacgcugacagcuucgugauccggggcgacgaggugcggcagaucgcccccggccagaccggcaagaucgccgacuacaacuacaagcugcccgacgacuucaccggcugcgugaucgccuggaacagcaacaaccuggacagcaaggugggcggcaacuacaacuaccuguaccggcuguuccguaagagcaaccugaagccauucgagcgggacaucagcaccgagaucuaccaggccggcagcacccccugcaacgguguggagggcuuuaacugcuacuucccccugcagagcuacggcuuccagcccaccaacggcgugggcuaccagcccuaccgggugguggugcugagcuucgagcugcugcacgcccccgccaccgugugcggcccuaaaaagagcaccaaccuggugaagaacaagugcgugaacuucaauuucaacggccugaccggcaccggcgugcugaccgagagcaacaagaaguuccugcccuuccagcaguucggccgggauaucgccgacaccaccgacgcagugcgggacccccagacccuggagauccuggacaucaccccaugcagcuucggcggcgugagcgucaucacccccggcacaaacaccagcaaccagguggccgugcuguaccagggagugaacugcaccgaggugcccguggccauccacgccgaccagcugacccccaccuggcggguguacagcaccggcagcaacguguuccagacccgggccggcugccugaucggcgccgagcacgugaacaacuccuacgagugcgacauccccaucggcgcuggcaucugcgccagcuaccagacccagaccaacagcccccggcgggcccggagcguggccagccagagcgugaucgccuacaccaugagcuuaggcgccgagaacagcguggccuacagcaacaacagcaucgcgaucccuaccaacuucaccaucagcgugaccaccgagauccugcccgugagcaugaccaagaccagcguggacuguaccauguacauaugcggcgacagcaccgagugcagcaaccugcugcugcaguacggcagcuucugcacccagcugaaccgggcccugaccggcaucgccguggagcaggacaagaacacccaagagguguucgcccaggugaagcagaucuacaagacucccccaaucaaggacuucggcggcuucaacuucagccagauccugcccgaccccagcaagcccagcaagcggagcuucaucgaggaccugcuguucaacaaggugacccuggccgacgccggcuucaucaagcaguacggcgacugccugggggauaucgccgcucgggaccugaucugcgcccagaaguucaacggccugaccgugcugcccccucugcugaccgacgagaugaucgcccaguacaccagcgcccugcuugccggcaccaucaccagcggcuggaccuucggcgccggcgcagcccugcagauccccuucgccaugcagauggccuaccgguucaacggcaucggcgugacccagaacgugcuguacgagaaccagaagcugaucgccaaccaguucaacagcgccaucggcaagauccaggacagccugagcagcaccgccagcgcccugggcaagcugcaggacguggugaaccagaacgcucaggcccugaacacccuggugaagcagcugagcagcaacuucggcgccaucagcucagugcugaaugacauccugagcaggcuggacaagguggaggccgaggugcagaucgaccggcugaucaccggccggcugcagagccugcagaccuacgugacccagcagcugauccgggccgccgagauccgggccagcgccaaccuggcagccaccaagaugagcgagugcgugcugggccagagcaagcggguggacuuuugcggcaagggcuaccaccugaugagcuucccccagagcgccccacacggcguggucuuccuccacgugacauacgugcccgcccaggagaagaacuucaccaccgcccccgccaucugccacgacggcaaggcucacuucccccgggagggaguguucgugagcaacggcacccacugguucgugacccagcggaacuucuacgagccccagauuaucaccaccgacaacaccuucgugagcggcaacugcgacguggugaucggcaucgugaacaacaccguguacgacccccugcagccugagcuggacagcuucaaggaggagcuggacaaguacuucaagaaccacaccagccccgacguggaucugggcgacaucagcggcaucaacgccagcguggugaacauccagaaggagaucgaccggcugaacgagguggccaagaaccugaacgagagccugaucgaccugcaggagcugggcaaguacgagcaguacaucaaguggcccugguacaucuggcugggcuucaucgccggccugaucgccaucgugauggugaccaucaugcugugcugcaugaccagcugcuguagcugccugaagggcugcugcagcugcggcagcugcugcaaguucgacgaggacgacagcgagccagugcugaagggcgugaagcugcacuacaccugaggacuaguuauaagacugacuagcccgaugggccucccaacgggcccuccuccccuccuugcaccgagauuaaucaaaggcucuuuucagagccaccaaaaaaaaaaaaaaaaaaaaaaaaaaaaaaaaaaaaaaaaaaaaaaaaaaaaaaaaaaaaaaaaaaaaaaaaaaaaaaaaaaaaaaaaaaaaaaaaaaaaa

SEQ ID NO: 24132 - RNA, 4035 nt, Artificial Sequence
  SARS-CoV-2/Wuhan/WIV05/2019__EPI_ISL_402128 spike protein mRNA gc (1-1273)(D614G_M1229I)
aggagaaagcuuaccauguucguguuccuggugcugcugccccuggugagcagccagugcgugaaccugaccacccggacccagcugcccccugccuacaccaacagcuucacccggggcguguacuaccccgacaagguguuccggagcagcgugcugcacagcacccaggaccuguuccugcccuucuucagcaacgugaccugguuccacgccauccacgugagcggcaccaacggcaccaagcgguucgacaacccagugcugcccuucaacgacggcguguacuucgccagcaccgagaagucaaacaucauccggggcuggaucuucggcaccacccuggacagcaagacacagagccugcugaucgugaacaacgccaccaacguggugaucaaggugugcgaguuucaguucugcaacgaccccuuccugggcguguacuaccacaagaacaacaagagcuggauggagagcgaguuccgggucuacagcagcgcuaacaauugcaccuucgaguacgugagccagcccuuccugauggaccucgagggcaagcagggcaacuucaagaaccugcgggaguucguguucaagaacaucgauggcuacuucaagaucuacagcaagcacacccccaucaaccuggugcgggaccugccccagggauucagcgcccuggagccucugguggaccugcccaucggcaucaacaucaccagguuccagacccugcuggcccugcaccggagcuaccugacccccggcgacagcagcagcggcuggaccgccggcgccgccgcauacuacgugggcuaccugcagccacggaccuuccugcugaaguacaacgagaacggcaccaucaccgacgccguggacugcgcccuggacccccugagcgagaccaagugcacccuaaagagcuucaccguggagaagggcaucuaccagaccagcaacuuccgggugcagcccacugagagcaucgugcgguuccccaacauuaccaaccugugucccuucggcgagguguucaacgccacccgguucgccagcguguacgccuggaaccggaagcggaucagcaacugcguggccgacuacagcgugcuguacaacagcgccagcuucagcaccuucaagugcuacggcgugagcccuaccaagcugaacgaccugugcuucaccaacguguacgcugacagcuucgugauccggggcgacgaggugcggcagaucgcccccggccagaccggcaagaucgccgacuacaacuacaagcugcccgacgacuucaccggcugcgugaucgccuggaacagcaacaaccuggacagcaaggugggcggcaacuacaacuaccuguaccggcuguuccguaagagcaaccugaagccauucgagcgggacaucagcaccgagaucuaccaggccggcagcacccccugcaacgguguggagggcuuuaacugcuacuucccccugcagagcuacggcuuccagcccaccaacggcgugggcuaccagcccuaccgggugguggugcugagcuucgagcugcugcacgcccccgccaccgugugcggcccuaaaaagagcaccaaccuggugaagaacaagugcgugaacuucaauuucaacggccugaccggcaccggcgugcugaccgagagcaacaagaaguuccugcccuuccagcaguucggccgggauaucgccgacaccaccgacgcagugcgggacccccagacccuggagauccuggacaucaccccaugcagcuucggcggcgugagcgucaucacccccggcacaaacaccagcaaccagguggccgugcuguaccagggagugaacugcaccgaggugcccguggccauccacgccgaccagcugacccccaccuggcggguguacagcaccggcagcaacguguuccagacccgggccggcugccugaucggcgccgagcacgugaacaacuccuacgagugcgacauccccaucggcgcuggcaucugcgccagcuaccagacccagaccaacagcccccggcgggcccggagcguggccagccagagcaucaucgccuacaccaugagcuuaggcgccgagaacagcguggccuacagcaacaacagcaucgcgaucccuaccaacuucaccaucagcgugaccaccgagauacugcccgugagcaugaccaagaccagcguggacuguaccauguacaucugcggcgacagcaccgagugcagcaaccugcugcugcaguacggcagcuucugcacccagcugaaccgggcccugaccggcaucgccguggagcaggacaagaacacccaagagguguucgcccaggugaagcagaucuacaagacucccccaaucaaggacuucggcggcuucaacuucagccagauccugcccgaccccagcaagcccagcaagcggagcuucaucgaggaccugcuguucaacaaggugacccuggccgacgccggcuucaucaagcaguacggcgacugccugggggauaucgccgcucgggaccugaucugcgcccagaaguucaacggccugaccgugcugcccccucugcugaccgacgagaugaucgcccaguacaccagcgcccugcuugccggcaccaucaccagcggcuggaccuucggcgccggcgcagcccugcagauccccuucgccaugcagauggccuaccgguucaacggcaucggcgugacccagaacgugcuguacgagaaccagaagcugaucgccaaccaguucaacagcgccaucggcaagauccaggacagccugagcagcaccgccagcgcccugggcaagcugcaggacguggugaaccagaacgcucaggcccugaacacccuggugaagcagcugagcagcaacuucggcgccaucagcucagugcugaaugacauccugagcaggcuggacaagguggaggccgaggugcagaucgaccggcugaucaccggccggcugcagagccugcagaccuacgugacccagcagcugauccgggccgccgagauccgggccagcgccaaccuggcagccaccaagaugagcgagugcgugcugggccagagcaagcggguggacuuuugcggcaagggcuaccaccugaugagcuucccccagagcgccccacacggcgugguguuccuccacgucacauacgugcccgcccaggagaagaacuucaccaccgcccccgccauuugccacgacggcaaggcucacuucccccgggagggaguguucgugagcaacggcacccacugguucgugacccagcggaacuucuacgagccccagaucaucaccaccgacaacaccuucgugagcggcaacugcgacguggugaucggcaucgugaacaacaccguguacgacccccugcagccugagcuggacagcuucaaggaggagcuggacaaguacuucaagaaccacaccagccccgacguggaucugggcgacaucagcggcaucaacgccagcguggugaacauccagaaggagaucgaccggcugaacgagguggccaagaaccugaacgagagccugaucgaccugcaggagcugggcaaguacgagcaguacaucaaguggcccugguacaucuggcugggcuucaucgccggccugaucgccaucgugaucgugaccaucaugcugugcugcaugaccagcugcuguagcugccugaagggcugcugcagcugcggcagcugcugcaaguucgacgaggacgacagcgagccagugcugaagggcgugaagcugcacuacaccugaggacuaguuauaagacugacuagcccgaugggccucccaacgggcccuccuccccuccuugcaccgagauuaaucaaaggcucuuuucagagccaccaaaaaaaaaaaaaaaaaaaaaaaaaaaaaaaaaaaaaaaaaaaaaaaaaaaaaaaaaaaaaaaaaaaaaaaaaaaaaaaaaaaaaaaaaaaaaaaaaaaaa

SEQ ID NO: 24133 - RNA, 4029 nt, Artificial Sequence
  SARS-CoV-2/Wuhan/WIV05/2019__EPI_ISL_402128 spike protein mRNA gc (1-1273)(H69del_V70del_A222V_Y453F_S477N_D614G_I692V)
aggagaaagcuuaccauguucguguuccuggugcugcugccccuggugagcagccagugcgugaaccugaccacccggacccagcugcccccugccuacaccaacagcuucacccggggcguguacuaccccgacaagguguuccggagcagcgugcugcacagcacccaggaccuguuccugcccuucuucagcaacgugaccugguuccacgccaucagcggcaccaacggcaccaagcgguucgacaacccagugcugcccuucaacgacggcguguacuucgccagcaccgagaagucaaacaucauccggggcuggaucuucggcaccacccuggacagcaagacacagagccugcugaucgugaacaacgccaccaacguggugaucaaggugugcgaguuucaguucugcaacgaccccuuccugggcguguacuaccacaagaacaacaagagcuggauggagagcgaguuccggguguacagcagcgcuaacaauugcaccuucgaguacgucagccagcccuuccugauggaccucgagggcaagcagggcaacuucaagaaccugcgggaguucguguucaagaacaucgauggcuacuucaagaucuacagcaagcacacccccaucaaccuggugcgggaccugccccagggauucagcgugcuggagccucugguggaccugcccaucggcaucaacaucaccagguuccagacccugcuggcccugcaccggagcuaccugacccccggcgacagcagcagcggcuggaccgccggcgccgccgccuacuacgugggcuaccugcagccacggaccuuccugcugaaguacaacgagaacggcaccaucaccgacgcaguggacugcgcccuggacccccugagcgagaccaagugcacccuaaagagcuucaccguggagaagggcaucuaccagaccagcaacuuccgggugcagcccacugagagcaucgugcgguuccccaacauuaccaaccugugucccuucggcgagguguucaacgccacccgguucgccagcguguacgccuggaaccggaagcggaucagcaacugcguggccgacuacagcgugcuguacaacagcgccagcuucagcaccuucaagugcuacggcgugagcccuaccaagcugaacgaccugugcuucaccaacguguacgccgacagcuucgugauccggggcgacgaggugcggcagaucgcucccggccagaccggcaagaucgccgacuacaacuacaagcugcccgacgacuucaccggcugcgugaucgccuggaacagcaacaaccuggacagcaaggugggcggcaacuacaacuaccuguuccggcuguuccguaagagcaaccugaagccauuugagcgggacaucagcaccgagaucuaccaggccggcaacacccccugcaacgguguggagggcuucaacugcuacuucccccugcagagcuacggcuuccagcccaccaacggcgugggcuaccagcccuaccgggugguggugcugagcuucgagcugcugcacgcccccgccaccgugugcggcccuaaaaagagcaccaaccuggugaagaacaagugcgugaauuucaacuucaacggccugaccggcaccggcgugcugaccgagagcaacaagaaguuccugcccuuccagcaguucggccgggauaucgccgacaccaccgacgccgugcgggacccccagacccuggagauccuggacaucaccccaugcagcuucggcggcgugagcgucaucacccccggcacaaacaccagcaaccagguggcagugcuguaccagggagugaacugcaccgaggugcccguggccauccacgccgaccagcugacccccaccuggcggguguacagcaccggcagcaacguguuccagacccgggccggcugccugaucggcgccgagcacgugaacaacagcuacgagugcgacauccccaucggcgccggcaucugcgcuuccuaccagacccagaccaacagcccccggcgggcccggagcguggccagccagagcgugaucgccuacaccaugagcuuaggcgccgagaacagcguggccuacagcaacaacagcaucgccaucccuaccaacuucaccaucagcgugaccaccgagauccugcccgugagcaugaccaagaccagcguggacuguaccauguacauaugcggcgacagcaccgagugcagcaaccugcugcugcaguacggcagcuucugcacccagcugaaccgggcgcugaccggcaucgccguggagcaggacaagaacacccaagagguguucgcccaggugaagcagaucuacaagacucccccaaucaaggacuucggcggcuucaacuucagccagauccugcccgaccccagcaagcccagcaagcggagcuucaucgaggaccugcuguucaacaaggugacccuggccgacgccggcuucaucaagcaguacggcgacugccugggggauaucgccgcccgggaccugaucugcgcucagaaguucaacggccugaccgugcugcccccucugcugaccgacgagaugaucgcccaguacaccagcgcccugcuugccggcaccaucaccagcggcuggaccuucggcgccggcgccgcacugcagauccccuucgccaugcagauggccuaccgguucaacggcaucggcgugacccagaacgugcuguacgagaaccagaagcugaucgccaaccaguucaacagcgccaucggcaagauccaggacagccugagcagcaccgccagcgcccugggcaagcugcaggacguggugaaccagaacgcccaggcucugaacacccuggugaagcagcugagcagcaauuuuggcgccaucagcagcgugcugaacgacauccugucaaggcuggacaagguggaggccgaggugcagaucgaccggcugaucaccggccggcugcagagccugcagaccuacgugacccagcagcugauccgggccgccgagauccgggccagcgccaaccuggccgcaaccaagaugagcgagugcgugcugggccagagcaagcggguggacuucugcggcaagggcuaccaccugaugagcuucccccagagcgccccacacggcguggucuuccuccacgugacauacgugcccgcccaggagaagaacuucaccaccgcccccgccaucugccacgacggcaaggcccacuucccccgggagggaguguucgugagcaacggcacccacugguucgugacccagcggaacuucuacgagccccagauuaucaccaccgacaacaccuucgugagcggcaacugcgacguggugaucggcaucgugaacaacaccguguacgacccccugcagccugagcuggacagcuucaaggaggagcuggacaaguacuucaagaaccacaccagccccgacguggaucugggcgacaucagcggcaucaacgcuagcguggugaacauccagaaggagaucgaccggcugaacgagguggccaagaaccugaacgagagccugaucgaccugcaggagcugggcaaguacgagcaguacaucaaguggcccugguacaucuggcugggcuucaucgccggccugaucgccaucgugauggugaccaucaugcugugcugcaugaccagcugcuguagcugccugaagggcugcugcagcugcggcagcugcugcaaguucgacgaggacgacagcgagccagugcugaagggcgugaagcugcacuacaccugaggacuaguuauaagacugacuagcccgaugggccucccaacgggcccuccuccccuccuugcaccgagauuaaucaaaggcucuuuucagagccaccaaaaaaaaaaaaaaaaaaaaaaaaaaaaaaaaaaaaaaaaaaaaaaaaaaaaaaaaaaaaaaaaaaaaaaaaaaaaaaaaaaaaaaaaaaaaaaaaaaaaa

SEQ ID NO: 24134 - RNA, 4029 nt, Artificial Sequence
  SARS-CoV-2/Wuhan/WIV05/2019__EPI_ISL_402128 spike protein mRNA gc (1-1273)(H69del_V70del_Y453F_D614G_I692V_M1229I)
aggagaaagcuuaccauguucguguuccuggugcugcugccccuggugagcagccagugcgugaaccugaccacccggacccagcugcccccugccuacaccaacagcuucacccggggcguguacuaccccgacaagguguuccggagcagcgugcugcacagcacccaggaccuguuccugcccuucuucagcaacgugaccugguuccacgccaucagcggcaccaacggcaccaagcgguucgacaacccagugcugcccuucaacgacggcguguacuucgccagcaccgagaagucaaacaucauccggggcuggaucuucggcaccacccuggacagcaagacacagagccugcugaucgugaacaacgccaccaacguggugaucaaggugugcgaguuucaguucugcaacgaccccuuccugggcguguacuaccacaagaacaacaagagcuggauggagagcgaguuccggguguacagcagcgcuaacaauugcaccuucgaguacgucagccagcccuuccugauggaccucgagggcaagcagggcaacuucaagaaccugcgggaguucguguucaagaacaucgauggcuacuucaagaucuacagcaagcacacccccaucaaccuggugcgggaccugccccagggauucagcgcccuggagccucugguggaccugcccaucggcaucaacaucaccagguuccagacccugcuggcccugcaccggagcuaccugacccccggcgacagcagcagcggcuggaccgccggcgccgccgcauacuacgugggcuaccugcagccacggaccuuccugcugaaguacaacgagaacggcaccaucaccgacgccguggacugcgcccuggacccccugagcgagaccaagugcacccuaaagagcuucaccguggagaagggcaucuaccagaccagcaacuuccgggugcagcccacugagagcaucgugcgguuccccaacauuaccaaccugugucccuucggcgagguguucaacgccacccgguucgccagcguguacgccuggaaccggaagcggaucagcaacugcguggccgacuacagcgugcuguacaacagcgccagcuucagcaccuucaagugcuacggcgugagcccuaccaagcugaacgaccugugcuucaccaacguguacgcugacagcuucgugauccggggcgacgaggugcggcagaucgcccccggccagaccggcaagaucgccgacuacaacuacaagcugcccgacgacuucaccggcugcgugaucgccuggaacagcaacaaccuggacagcaaggugggcggcaacuacaacuaccuguuccggcuguuccguaagagcaaccugaagccauuugagcgggacaucagcaccgagaucuaccaggccggcagcacccccugcaacgguguggagggcuucaacugcuacuucccccugcagagcuacggcuuccagcccaccaacggcgugggcuaccagcccuaccgggugguggugcugagcuucgagcugcugcacgcccccgccaccgugugcggcccuaaaaagagcaccaaccuggugaagaacaagugcgugaacuucaauuucaacggccugaccggcaccggcgugcugaccgagagcaacaagaaguuccugcccuuccagcaguucggccgggauaucgccgacaccaccgacgcagugcgggacccccagacccuggagauccuggacaucaccccaugcagcuucggcggcgugagcgugaucacccccggcacaaacaccagcaaccaggucgccgugcuguaccagggagugaacugcaccgaggugcccguggccauccacgccgaccagcugacccccaccuggcggguguacagcaccggcagcaacguguuccagacccgggccggcugccugaucggcgccgagcacgugaacaacuccuacgagugcgacauccccaucggcgcuggcaucugcgccagcuaccagacccagaccaacagcccccggcgggcccggagcguggccagccagagcgugaucgccuacaccaugagcuuaggcgccgagaacagcguggccuacagcaacaacagcaucgcgaucccuaccaacuucaccaucagcgugaccaccgagauccugcccgugagcaugaccaagaccagcguggacuguaccauguacauaugcggcgacagcaccgagugcagcaaccugcugcugcaguacggcagcuucugcacccagcugaaccgggcccugaccggcaucgccguggagcaggacaagaacacccaagagguguucgcccaggugaagcagaucuacaagacucccccaaucaaggacuucggcggcuucaacuucagccagauccugcccgaccccagcaagcccagcaagcggagcuucaucgaggaccugcuguucaacaaggugacccuggccgacgccggcuucaucaagcaguacggcgacugccugggggauaucgccgcucgggaccugaucugcgcccagaaguucaacggccugaccgugcugcccccucugcugaccgacgagaugaucgcccaguacaccagcgcccugcuugccggcaccaucaccagcggcuggaccuucggcgccggcgcagcccugcagauccccuucgccaugcagauggccuaccgguucaacggcaucggcgugacccagaacgugcuguacgagaaccagaagcugaucgccaaccaguucaacagcgccaucggcaagauccaggacagccugagcagcaccgccagcgcccugggcaagcugcaggacguggugaaccagaacgcucaggcccugaacacccuggugaagcagcugagcagcaacuuuggcgccaucagcucagugcugaaugacauccugagcaggcuggacaagguggaggccgaggugcagaucgaccggcugaucaccggccggcugcagagccugcagaccuacgugacccagcagcugauccgggccgccgagauccgggccagcgccaaccuggcagccaccaagaugagcgagugcgugcugggccagagcaagcggguggacuucugcggcaagggcuaccaccugaugagcuucccccagagcgccccacacggcgugguguuccuccacgucacauacgugcccgcccaggagaagaacuucaccaccgcccccgccaucugccacgacggcaaggcucacuucccccgggagggaguguucgugagcaacggcacccacugguucgugacccagcggaacuucuacgagccccagauuaucaccaccgacaacaccuucgugagcggcaacugcgacguggugaucggcaucgugaacaacaccguguacgacccccugcagccugagcuggacagcuucaaggaggagcuggacaaguacuucaagaaccacaccagccccgacguggaucugggcgacaucagcggcaucaacgccagcguggugaacauccagaaggagaucgaccggcugaacgagguggccaagaaccugaacgagagccugaucgaccugcaggagcugggcaaguacgagcaguacaucaaguggcccugguacaucuggcugggcuucaucgccggccugaucgccaucgugaucgugaccaucaugcugugcugcaugaccagcugcuguagcugccugaagggcugcugcagcugcggcagcugcugcaaguucgacgaggacgacagcgagccagugcugaagggcgugaagcugcacuacaccugaggacuaguuauaagacugacuagcccgaugggccucccaacgggcccuccuccccuccuugcaccgagauuaaucaaaggcucuuuucagagccaccaaaaaaaaaaaaaaaaaaaaaaaaaaaaaaaaaaaaaaaaaaaaaaaaaaaaaaaaaaaaaaaaaaaaaaaaaaaaaaaaaaaaaaaaaaaaaaaaaaaaa

SEQ ID NO: 24135 - RNA, 4026 nt, Artificial Sequence
  SARS-CoV-2/Wuhan/WIV05/2019__EPI_ISL_402128 spike protein mRNA gc (1-1273)(H69del_V70del_Y144del_N501Y_A570D_D614G_P681H_T716I_S982 A_D1118H)
aggagaaagcuuaccauguucguguuccuggugcugcugccccuggugagcagccagugcgugaaccugaccacccggacccagcugcccccugccuacaccaacagcuucacccggggcguguacuaccccgacaagguguuccggagcagcgugcugcacagcacccaggaccuguuccugcccuucuucagcaacgugaccugguuccacgccaucagcggcaccaacggcaccaagcgguucgacaacccagugcugcccuucaacgacggcguguacuucgccagcaccgagaagucaaacaucauccggggcuggaucuucggcaccacccuggacagcaagacacagagccugcugaucgugaacaacgccaccaacguggugaucaaggugugcgaguuucaguucugcaacgaccccuuccugggcguguaccacaagaacaacaagagcuggauggagagcgaguuccggguguacagcagcgcuaacaauugcaccuucgaguacgucagccagcccuuccugauggaccucgagggcaagcagggcaacuucaagaaccugcgggaguucguguucaagaacaucgauggcuacuucaagaucuacagcaagcacacccccaucaaccuggugcgggaccugccccagggauucagcgcccuggagccucugguggaccugcccaucggcaucaacaucaccagguuccagacccugcuggcccugcaccggagcuaccugacccccggcgacagcagcagcggcuggaccgccggcgccgccgcauacuacgugggcuaccugcagccacggaccuuccugcugaaguacaacgagaacggcaccaucaccgacgccguggacugcgcccuggacccccugagcgagaccaagugcacccuaaagagcuucaccguggagaagggcaucuaccagaccagcaacuuccgggugcagcccacugagagcaucgugcgguuccccaacauuaccaaccugugucccuucggcgagguguucaacgccacccgguucgccagcguguacgccuggaaccggaagcggaucagcaacugcguggccgacuacagcgugcuguacaacagcgccagcuucagcaccuucaagugcuacggcgugagcccuaccaagcugaacgaccugugcuucaccaacguguacgcugacagcuucgugauccggggcgacgaggugcggcagaucgcccccggccagaccggcaagaucgccgacuacaacuacaagcugcccgacgacuucaccggcugcgugaucgccuggaacagcaacaaccuggacagcaaggugggcggcaacuacaacuaccuguaccggcuguuccguaagagcaaccugaagccauucgagcgggacaucagcaccgagaucuaccaggccggcagcacccccugcaacgguguggagggcuuuaacugcuacuucccccugcagagcuacggcuuccagcccaccuacggcgugggcuaccagcccuaccgggugguggugcugagcuucgagcugcugcacgcccccgccaccgugugcggcccuaaaaagagcaccaaccuggugaagaacaagugcgugaacuucaacuucaauggccugaccggcaccggcgugcugaccgagagcaacaagaaguuccugcccuuccagcaguucggccgggauaucgacgacaccaccgacgccgugcgggacccccagacccuggagauccuggacaucaccccaugcagcuucggcggcgugagcgugaucacccccggcacaaacaccagcaaccaggucgcagugcuguaccagggagugaacugcaccgaggugcccguggccauccacgccgaccagcugacccccaccuggcggguguacagcaccggcagcaacguguuccagacccgggccggcugccugaucggcgccgagcacgugaacaacuccuacgagugcgacauccccaucggcgccggcaucugcgcuagcuaccagacccagaccaacagccaccggcgggcccggagcguggccagccagagcaucaucgccuacaccaugagcuuaggcgccgagaacagcguggccuacagcaacaacagcaucgccauccccaucaacuucaccauaagcgugaccaccgagauccugccugugagcaugaccaagaccagcguggacuguaccauguacaucugcggcgacagcaccgagugcagcaaccugcugcugcaguacggcagcuucugcacccagcugaaccgggcgcugaccggcaucgccguggagcaggacaagaacacccaagagguguucgcccaggugaagcagaucuacaagaccccacccaucaaggacuucggcggcuucaacuucagccagauccugcccgaccccagcaagcccagcaagcggagcuucaucgaggaccugcuguucaacaaggugacucuggccgacgccggcuucaucaagcaguacggcgauugccugggggacaucgccgcccgggaccugaucugcgcucagaaguucaacggccugaccgugcugccuccccugcugaccgacgagaugaucgcccaguacaccagcgcccugcuugccggcaccaucaccagcggcuggaccuucggcgccggcgccgcacugcagauccccuucgccaugcagauggccuaccgguucaacggcaucggcgugacccagaacgugcuguacgagaaccagaagcugaucgccaaccaguucaacagcgccaucggcaagauccaggacagccugagcagcaccgccagcgcccugggcaagcugcaggacguggugaaccagaacgcccaggcucugaacacccuggugaagcagcugagcagcaacuucggcgccaucagcucagugcugaacgacauccuggccaggcuggacaagguggaggccgaggugcagaucgaccggcugaucaccggccggcugcagagccugcagaccuacgugacccagcagcugauccgggccgccgagauucgggccagcgccaaucuggcagccaccaagaugagcgagugcgugcugggccagagcaagcggguggacuuuugcggcaagggcuaccaccugaugagcuucccccagagcgcuccccacggcgugguguuccuccacgugaccuacgucccagcccaggagaagaacuucacaaccgcccccgccaucugccacgacggcaaggcccacuucccccgggagggaguguucgugagcaacggcacccacugguucgugacccagcggaacuucuacgagccccagaucaucaccacccacaacaccuucgugagcggcaacugcgacguggugaucggcaucgugaacaacaccguguacgacccccugcagcccgagcuggacagcuucaaggaggagcuggacaaguacuucaagaaccacaccagcccugacguggaucugggcgacaucagcggcaucaacgccagcguggugaacauccagaaggagaucgaccggcugaacgagguggccaagaaccugaacgagagccugaucgaccugcaggagcugggcaaguacgagcaguacaucaaguggcccugguacaucuggcugggcuucaucgccggccugaucgccaucgugauggugaccaucaugcugugcugcaugaccagcugcuguagcugccugaagggcugcugcagcugcggcagcugcugcaaguucgacgaggacgacagcgagcccgugcugaagggcgugaagcugcacuacaccugaggacuaguuauaagacugacuagcccgaugggccucccaacgggcccuccuccccuccuugcaccgagauuaaucaaaggcucuuuucagagccaccaaaaaaaaaaaaaaaaaaaaaaaaaaaaaaaaaaaaaaaaaaaaaaaaaaaaaaaaaaaaaaaaaaaaaaaaaaaaaaaaaaaaaaaaaaaaaaaaaaaaa

SEQ ID NO: 24136 - RNA, 4035 nt, Artificial Sequence
  SARS-CoV-2/Wuhan/WIV05/2019__EPI_ISL_402128 spike protein mRNA gc (1-1273)(K417N_E484K_N501Y_D614G)
aggagaaagcuuaccauguucguguuccuggugcugcugccccuggugagcagccagugcgugaaccugaccacccggacccagcugcccccugccuacaccaacagcuucacccggggcguguacuaccccgacaagguguuccggagcagcgugcugcacagcacccaggaccuguuccugcccuucuucagcaacgugaccugguuccacgccauccacgugagcggcaccaacggcaccaagcgguucgacaacccagugcugcccuucaacgacggcguguacuucgccagcaccgagaagucaaacaucauccggggcuggaucuucggcaccacccuggacagcaagacacagagccugcugaucgugaacaacgccaccaacguggugaucaaggugugcgaguuucaguucugcaacgaccccuuccugggcguguacuaccacaagaacaacaagagcuggauggagagcgaguuccgggucuacagcagcgcuaacaauugcaccuucgaguacgugagccagcccuuccugauggaccucgagggcaagcagggcaacuucaagaaccugcgggaguucguguucaagaacaucgauggcuacuucaagaucuacagcaagcacacccccaucaaccuggugcgggaccugccccagggauucagcgcccuggagccucugguggaccugcccaucggcaucaacaucaccagguuccagacccugcuggcccugcaccggagcuaccugacccccggcgacagcagcagcggcuggaccgccggcgccgccgcauacuacgugggcuaccugcagccacggaccuuccugcugaaguacaacgagaacggcaccaucaccgacgccguggacugcgcccuggacccccugagcgagaccaagugcacccuaaagagcuucaccguggagaagggcaucuaccagaccagcaacuuccgggugcagcccacugagagcaucgugcgguuccccaacauuaccaaccugugucccuucggcgagguguucaacgccacccgguucgccagcguguacgccuggaaccggaagcggaucagcaacugcguggccgacuacagcgugcuguacaacagcgccagcuucagcaccuucaagugcuacggcgugagcccuaccaagcugaacgaccugugcuucaccaacguguacgcugacagcuucgugauccggggcgacgaggugcggcagaucgcccccggccagaccggcaacaucgccgacuacaacuacaagcugcccgacgacuucaccggcugcgugaucgccuggaacagcaacaaccuggacagcaaggugggcggcaacuacaacuaccuguaccggcuguuccguaagagcaaccugaagccauucgagcgggacaucagcaccgagaucuaccaggccggcagcacccccugcaacggugugaagggcuuuaacugcuacuucccccugcagagcuacggcuuccagcccaccuacggcgugggcuaccagcccuaccgggugguggugcugagcuucgagcugcugcacgcccccgccaccgugugcggcccuaaaaagagcaccaaccuggugaagaacaagugcgugaacuucaauuucaacggccugaccggcaccggcgugcugaccgagagcaacaagaaguuccugcccuuccagcaguucggccgggauaucgccgacaccaccgacgcagugcgggacccccagacccuggagauccuggacaucaccccaugcagcuucggcggcgugagcgucaucacccccggcacaaacaccagcaaccagguggccgugcuguaccagggagugaacugcaccgaggugcccguggccauccacgccgaccagcugacccccaccuggcggguguacagcaccggcagcaacguguuccagacccgggccggcugccugaucggcgccgagcacgugaacaacuccuacgagugcgacauccccaucggcgcuggcaucugcgccagcuaccagacccagaccaacagcccccggcgggcccggagcguggccagccagagcaucaucgccuacaccaugagcuuaggcgccgagaacagcguggccuacagcaacaacagcaucgcgaucccuaccaacuucaccaucagcgugaccaccgagauacugcccgugagcaugaccaagaccagcguggacuguaccauguacaucugcggcgacagcaccgagugcagcaaccugcugcugcaguacggcagcuucugcacccagcugaaccgggcccugaccggcaucgccguggagcaggacaagaacacccaagagguguucgcccaggugaagcagaucuacaagacucccccaaucaaggacuucggcggcuucaacuucagccagauccugcccgaccccagcaagcccagcaagcggagcuucaucgaggaccugcuguucaacaaggugacccuggccgacgccggcuucaucaagcaguacggcgacugccugggggauaucgccgcucgggaccugaucugcgcccagaaguucaacggccugaccgugcugcccccucugcugaccgacgagaugaucgcccaguacaccagcgcccugcuugccggcaccaucaccagcggcuggaccuucggcgccggcgcagcccugcagauccccuucgccaugcagauggccuaccgguucaacggcaucggcgugacccagaacgugcuguacgagaaccagaagcugaucgccaaccaguucaacagcgccaucggcaagauccaggacagccugagcagcaccgccagcgcccugggcaagcugcaggacguggugaaccagaacgcucaggcccugaacacccuggugaagcagcugagcagcaacuucggcgccaucagcucagugcugaaugacauccugagcaggcuggacaagguggaggccgaggugcagaucgaccggcugaucaccggccggcugcagagccugcagaccuacgugacccagcagcugauccgggccgccgagauccgggccagcgccaaccuggcagccaccaagaugagcgagugcgugcugggccagagcaagcggguggacuuuugcggcaagggcuaccaccugaugagcuucccccagagcgccccacacggcgugguguuccuccacgucacauacgugcccgcccaggagaagaacuucaccaccgcccccgccauuugccacgacggcaaggcucacuucccccgggagggaguguucgugagcaacggcacccacugguucgugacccagcggaacuucuacgagccccagaucaucaccaccgacaacaccuucgugagcggcaacugcgacguggugaucggcaucgugaacaacaccguguacgacccccugcagccugagcuggacagcuucaaggaggagcuggacaaguacuucaagaaccacaccagccccgacguggaucugggcgacaucagcggcaucaacgccagcguggugaacauccagaaggagaucgaccggcugaacgagguggccaagaaccugaacgagagccugaucgaccugcaggagcugggcaaguacgagcaguacaucaaguggcccugguacaucuggcugggcuucaucgccggccugaucgccaucgugauggugaccaucaugcugugcugcaugaccagcugcuguagcugccugaagggcugcugcagcugcggcagcugcugcaaguucgacgaggacgacagcgagccagugcugaagggcgugaagcugcacuacaccugaggacuaguuauaagacugacuagcccgaugggccucccaacgggcccuccuccccuccuugcaccgagauuaaucaaaggcucuuuucagagccaccaaaaaaaaaaaaaaaaaaaaaaaaaaaaaaaaaaaaaaaaaaaaaaaaaaaaaaaaaaaaaaaaaaaaaaaaaaaaaaaaaaaaaaaaaaaaaaaaaaaaa

SEQ ID NO: 24137 - RNA, 4026 nt, Artificial Sequence
  SARS-CoV-2/Wuhan/WIV05/2019__EPI_ISL_402128 spike protein mRNA gc (1-1273)(L18F_D80A_D215G_L242del_A243del_L244del_R246I_K417N_E484 K_N501Y_D614G_A701V)
aggagaaagcuuaccauguucguguuccuggugcugcugccccuggugagcagccagugcgugaacuucaccacccggacccagcugcccccugccuacaccaacagcuucacccggggcguguacuaccccgacaagguguuccggagcagcgugcugcacagcacccaggaccuguuccugcccuucuucagcaacgugaccugguuccacgccauccacgugagcggcaccaacggcaccaagcgguucgccaacccagugcugcccuucaacgacggcguguacuucgccagcaccgagaagucaaacaucauccggggcuggaucuuuggcaccacccuggacagcaagacacagagccugcugaucgugaacaacgcuaccaacguggugaucaaggugugcgaguuccaguucugcaacgaccccuuccugggcguguacuaccacaagaacaacaagagcuggauggagagcgaguuccgggucuacagcagcgccaacaauugcaccuucgaguacgugagccagcccuuccugauggaccuggagggcaagcagggcaacuucaagaaccuccgggaguucguguucaagaacaucgacggcuacuucaagaucuacagcaagcacacccccaucaaccuggugcggggacugccccagggcuucagcgcccuggagccucugguggaucugcccaucggcaucaacaucaccagguuccagacccugcacaucagcuaccugacccccggcgacagcagcagcggcuggaccgccggcgccgccgcauacuacgugggcuaccugcagccacggaccuuccugcugaaguacaacgagaacggcaccaucaccgacgccguggacugcgcccuggacccccugagcgagaccaagugcacccuuaagagcuucaccguggagaagggcaucuaccagaccagcaacuuccgggugcagcccacugagagcauugugcgguuccccaacaucaccaaccugugucccuucggcgagguguucaacgccacccgguucgccagcguguacgccuggaaccggaagcggaucagcaacugcguggccgacuacagcgugcuguacaacagcgccagcuucagcaccuucaagugcuacggcgugagcccuaccaagcugaacgaccugugcuucaccaacguguacgcugacagcuucgugauccggggcgacgaggugcggcagaucgcccccggccagaccggcaacaucgccgacuacaacuacaagcugcccgacgacuucaccggcugcgugaucgccuggaacagcaacaaccuggacagcaaggugggcggcaacuacaacuaccuguaccggcuauuccguaagagcaaccugaagccauuugagcgggacaucagcaccgagaucuaccaggccgguagcacccccugcaacggcgugaagggcuucaacugcuacuucccccugcagagcuacggcuuccagcccaccuacggcgugggcuaccagcccuaccgggugguggugcugagcuucgagcugcugcacgcccccgccaccgugugcggcccuaaaaagagcaccaaccuggugaagaacaagugcgugaacuucaauuucaacggccugaccggcaccggcgugcugaccgagagcaacaagaaguuccugcccuuccagcaguucggccgggacaucgccgacaccaccgaugcagugcgggacccccagacccuggagauccuggacaucaccccaugcagcuucggcggcgugagcgucaucacccccggaacaaacaccagcaaccagguggccgugcuguaccagggcgugaacugcaccgaggugcccguggccauccacgccgaccagcugacccccaccuggcggguguacagcaccggcagcaacguguuccagacccgggccggcugccugaucggcgccgagcacgugaacaacuccuacgagugcgacauccccaucggcgcuggcaucugcgccagcuaccagacccagaccaacagcccccggcgggcccggagcguggccagccagagcaucaucgccuacaccaugagccugggcguggagaacagcguggccuacagcaacaacagcaucgccaucccuaccaacuucaccauaagcgugaccaccgagauccugcccgugagcaugaccaagaccagcguggacuguaccauguacaucugcggcgacagcaccgagugcagcaaccuguuacugcaguacggcagcuucugcacccagcugaaccgggcgcugaccggcaucgccguggagcaggacaagaacacccaagagguguucgcccaggugaagcagaucuacaagacucccccaaucaaggacuucggcggcuucaacuucagccagauccugcccgaccccagcaagcccagcaagcggagcuucaucgaggaccugcuguucaacaaggugacccuggccgacgccggcuucaucaagcaguacggggacugccugggcgacaucgccgcccgggaccugaucugcgcucagaaguucaacggccugaccgugcugcccccucugcugaccgaugagaugaucgcccaguacaccagcgcccugcuggccggcaccaucaccagcggcuggaccuucggcgccggcgccgcacugcagauccccuucgccaugcagauggccuaccgguucaacggcaucggcgugacccagaacgugcuguacgagaaccagaagcugaucgccaaccaguucaacagcgccaucggcaagauccaggacagccugagcagcaccgccagcgcccugggcaagcugcaggacguggugaaccagaacgcccaggcucugaacacccuggugaagcagcugagcagcaacuuuggcgccaucagcucagugcugaaugacauccugagccggcuggacaagguggaggccgaggugcagaucgacaggcugaucaccggccggcugcagagccugcagaccuacgugacccagcagcugauccgggccgccgagauucgggccagcgccaaccuggccgcaaccaagaugagcgagugcgugcugggccagagcaagcggguggacuucugcggcaagggcuaccaccugaugagcuucccccagagcgccccacacggcguggucuuccugcacgugacauacgugcccgcccaggagaagaacuucaccaccgcccccgccaucugccacgacggaaaggcccacuucccccgggagggcguguucgugagcaacggcacccacugguucgugacccagcggaacuucuacgagccccagaucaucaccaccgacaacaccuucgugagcggcaacugcgacguggugaucggcaucgugaacaacaccguguacgacccccugcagccugagcuggacagcuucaaggaggagcucgacaaguacuucaagaaccacaccagccccgacguggaccugggcgacaucagcggcaucaacgcuagcguggugaacauccagaaggagaucgaucggcugaacgagguggccaagaaccugaacgagagccugaucgaccugcaggagcugggcaaguacgagcaguacaucaaguggcccugguacaucuggcugggcuucaucgccggccugaucgccaucgugauggugaccaucaugcugugcugcaugaccagcugcuguagcugccugaagggcugcugcagcugcggcagcugcugcaaguucgacgaggacgacagcgagccagugcugaagggcgugaagcugcacuacaccugaggacuaguuauaagacugacuagcccgaugggccucccaacgggcccuccuccccuccuugcaccgagauuaaucaaaggcucuuuucagagccaccaaaaaaaaaaaaaaaaaaaaaaaaaaaaaaaaaaaaaaaaaaaaaaaaaaaaaaaaaaaaaaaaaaaaaaaaaaaaaaaaaaaaaaaaaaaaaaaaaaaaa

SEQ ID NO: 24138 - RNA, 4035 nt, Artificial Sequence
  SARS-CoV-2/Wuhan/WIV05/2019__EPI_ISL_402128 spike protein mRNA gc (1-1273)(E484K_D614G)
aggagaaagcuuaccauguucguguuccuggugcugcugccccuggugagcagccagugcgugaaccugaccacccggacccagcugcccccugccuacaccaacagcuucacccggggcguguacuaccccgacaagguguuccggagcagcgugcugcacagcacccaggaccuguuccugcccuucuucagcaacgugaccugguuccacgccauccacgugagcggcaccaacggcaccaagcgguucgacaacccagugcugcccuucaacgacggcguguacuucgccagcaccgagaagucaaacaucauccggggcuggaucuucggcaccacccuggacagcaagacacagagccugcugaucgugaacaacgccaccaacguggugaucaaggugugcgaguuucaguucugcaacgaccccuuccugggcguguacuaccacaagaacaacaagagcuggauggagagcgaguuccgggucuacagcagcgcuaacaauugcaccuucgaguacgugagccagcccuuccugauggaccucgagggcaagcagggcaacuucaagaaccugcgggaguucguguucaagaacaucgauggcuacuucaagaucuacagcaagcacacccccaucaaccuggugcgggaccugccccagggauucagcgcccuggagccucugguggaccugcccaucggcaucaacaucaccagguuccagacccugcuggcccugcaccggagcuaccugacccccggcgacagcagcagcggcuggaccgccggcgccgccgcauacuacgugggcuaccugcagccacggaccuuccugcugaaguacaacgagaacggcaccaucaccgacgccguggacugcgcccuggacccccugagcgagaccaagugcacccuaaagagcuucaccguggagaagggcaucuaccagaccagcaacuuccgggugcagcccacugagagcaucgugcgguuccccaacauuaccaaccugugucccuucggcgagguguucaacgccacccgguucgccagcguguacgccuggaaccggaagcggaucagcaacugcguggccgacuacagcgugcuguacaacagcgccagcuucagcaccuucaagugcuacggcgugagcccuaccaagcugaacgaccugugcuucaccaacguguacgcugacagcuucgugauccggggcgacgaggugcggcagaucgcccccggccagaccggcaagaucgccgacuacaacuacaagcugcccgacgacuucaccggcugcgugaucgccuggaacagcaacaaccuggacagcaaggugggcggcaacuacaacuaccuguaccggcuguuccguaagagcaaccugaagccauucgagcgggacaucagcaccgagaucuaccaggccggcagcacccccugcaacggugugaagggcuuuaacugcuacuucccccugcagagcuacggcuuccagcccaccaacggcgugggcuaccagcccuaccgggugguggugcugagcuucgagcugcugcacgcccccgccaccgugugcggcccuaaaaagagcaccaaccuggugaagaacaagugcgugaacuucaauuucaacggccugaccggcaccggcgugcugaccgagagcaacaagaaguuccugcccuuccagcaguucggccgggauaucgccgacaccaccgacgcagugcgggacccccagacccuggagauccuggacaucaccccaugcagcuucggcggcgugagcgucaucacccccggcacaaacaccagcaaccagguggccgugcuguaccagggagugaacugcaccgaggugcccguggccauccacgccgaccagcugacccccaccuggcggguguacagcaccggcagcaacguguuccagacccgggccggcugccugaucggcgccgagcacgugaacaacuccuacgagugcgacauccccaucggcgcuggcaucugcgccagcuaccagacccagaccaacagcccccggcgggcccggagcguggccagccagagcaucaucgccuacaccaugagcuuaggcgccgagaacagcguggccuacagcaacaacagcaucgcgaucccuaccaacuucaccaucagcgugaccaccgagauacugcccgugagcaugaccaagaccagcguggacuguaccauguacaucugcggcgacagcaccgagugcagcaaccugcugcugcaguacggcagcuucugcacccagcugaaccgggcccugaccggcaucgccguggagcaggacaagaacacccaagagguguucgcccaggugaagcagaucuacaagacucccccaaucaaggacuucggcggcuucaacuucagccagauccugcccgaccccagcaagcccagcaagcggagcuucaucgaggaccugcuguucaacaaggugacccuggccgacgccggcuucaucaagcaguacggcgacugccugggggauaucgccgcucgggaccugaucugcgcccagaaguucaacggccugaccgugcugcccccucugcugaccgacgagaugaucgcccaguacaccagcgcccugcuugccggcaccaucaccagcggcuggaccuucggcgccggcgcagcccugcagauccccuucgccaugcagauggccuaccgguucaacggcaucggcgugacccagaacgugcuguacgagaaccagaagcugaucgccaaccaguucaacagcgccaucggcaagauccaggacagccugagcagcaccgccagcgcccugggcaagcugcaggacguggugaaccagaacgcucaggcccugaacacccuggugaagcagcugagcagcaacuucggcgccaucagcucagugcugaaugacauccugagcaggcuggacaagguggaggccgaggugcagaucgaccggcugaucaccggccggcugcagagccugcagaccuacgugacccagcagcugauccgggccgccgagauccgggccagcgccaaccuggcagccaccaagaugagcgagugcgugcugggccagagcaagcggguggacuuuugcggcaagggcuaccaccugaugagcuucccccagagcgccccacacggcgugguguuccuccacgucacauacgugcccgcccaggagaagaacuucaccaccgcccccgccauuugccacgacggcaaggcucacuucccccgggagggaguguucgugagcaacggcacccacugguucgugacccagcggaacuucuacgagccccagaucaucaccaccgacaacaccuucgugagcggcaacugcgacguggugaucggcaucgugaacaacaccguguacgacccccugcagccugagcuggacagcuucaaggaggagcuggacaaguacuucaagaaccacaccagccccgacguggaucugggcgacaucagcggcaucaacgccagcguggugaacauccagaaggagaucgaccggcugaacgagguggccaagaaccugaacgagagccugaucgaccugcaggagcugggcaaguacgagcaguacaucaaguggcccugguacaucuggcugggcuucaucgccggccugaucgccaucgugauggugaccaucaugcugugcugcaugaccagcugcuguagcugccugaagggcugcugcagcugcggcagcugcugcaaguucgacgaggacgacagcgagccagugcugaagggcgugaagcugcacuacaccugaggacuaguuauaagacugacuagcccgaugggccucccaacgggcccuccuccccuccuugcaccgagauuaaucaaaggcucuuuucagagccaccaaaaaaaaaaaaaaaaaaaaaaaaaaaaaaaaaaaaaaaaaaaaaaaaaaaaaaaaaaaaaaaaaaaaaaaaaaaaaaaaaaaaaaaaaaaaaaaaaaaaa

SEQ ID NO: 24139 - RNA, 4035 nt, Artificial Sequence
  SARS-CoV-2/Wuhan/WIV05/2019__EPI_ISL_402128 spike protein mRNA gc (1-1273)(L18F_T20N_P26S_D138Y_R190S_K417T_E484K_N501Y_D614G_H655Y _T1027I)
aggagaaagcuuaccauguucguguuccuggugcugcugccccuggugagcagccagugcgugaacuucaccaaccggacccagcugcccagcgccuacaccaacagcuucacccggggcguguacuacccugacaagguguuccggagcagcgugcugcacagcacccaggaccuguuccugcccuucuucagcaacgugaccugguuccacgccauccacgugagcggcaccaacggcaccaagcgguucgacaaccccgugcugccauucaacgacggcguguacuucgccagcaccgagaagucaaacaucauccggggcuggaucuuuggcaccacccuggacagcaagacccagagccugcugaucgugaacaacgccacaaacguggugaucaaggugugcgaguuccaguucugcaacuaccccuuccugggcguguacuaccacaagaacaacaagagcuggauggagagcgaguuccgggucuacagcagcgcuaauaacugcaccuucgaguacgugagccagcccuuccugauggaccuggagggcaagcagggcaacuucaagaaccucagcgaguucguguucaagaacaucgacggcuacuucaagaucuacagcaagcacacccccaucaaccuggugcgggaucugccccagggauucagcgcccuggagccccugguggaccugccuaucggcaucaacaucacccgguuccagacccugcuggcccugcacaggagcuaccugacccccggcgacagcagcagcggcuggaccgccggcgccgccgcauacuacgugggcuaccugcagccccggaccuuccugcugaaguacaacgagaacggcaccaucaccgacgccguggacugcgcccuggacccacugagcgagaccaagugcacccuaaagagcuucaccguggagaagggcaucuaccagaccagcaacuuccgggugcagcccaccgagagcaucgugcgguuccccaacauuacuaaccugugucccuucggcgagguguucaacgccacccgguucgccagcguguacgccuggaaccggaagcggaucagcaacugcguggccgacuacagcgugcuguacaacagcgccagcuucagcaccuucaagugcuacggcgugagccccaccaagcugaacgaccugugcuucaccaacguguacgcugacagcuucgugauccggggcgacgaggugcggcagaucgccccuggccagaccggcaccaucgccgacuacaacuacaagcugcccgacgacuucaccggcugcgugaucgccuggaacagcaacaaccuggacagcaaggugggcggcaacuacaacuaccuguaccggcuguuccguaagagcaaccugaagcccuuugagcgggacaucagcaccgagaucuaccaggccggcagcaccccaugcaacggugugaagggcuucaacugcuacuucccccugcagagcuacggcuuccagcccaccuacggcgugggcuaccagcccuaccgggugguggugcugagcuucgagcugcugcacgcccccgccaccgugugcggccccaaaaagagcaccaaccuggugaagaacaagugcgugaacuucaauuucaacggccugaccggcaccggcgugcugaccgagagcaacaagaaguuccugccuuuccagcaguucggccgggacaucgccgauaccaccgacgcagugcgggacccccagacccuggagauccuggacaucacccccugcagcuucggcggcgugagcgucaucaccccaggcacaaacaccagcaaccagguggccgugcuguaccagggagugaacugcaccgaggugcccguggccauccacgccgaccagcugacccccaccuggcggguguacuccaccggcagcaacguguuccagacccgggccggcugccugaucggcgccgaguacgugaacaacagcuacgagugcgacauccccaucggcgcuggcaucugcgccagcuaccagacccagaccaacagcccccggcgggcccggagcguggccagccagagcaucaucgccuacaccaugagccugggcgccgagaacagcguggccuacagcaacaacagcaucgcgauccccaccaacuucaccaucagcgugaccaccgagauauuaccugugagcaugaccaagaccagcguggacuguaccauguacaucugcggcgacagcaccgagugcagcaaccugcugcugcaguacggcagcuucugcacccagcugaaccgggcccugaccggcaucgccguggagcaggacaagaacacccaagagguguucgcccaggugaagcagaucuacaagacuccacccaucaaggacuucggcggcuucaacuucagccagauccugcccgaccccagcaagcccagcaagcggagcuucaucgaggaccugcuguucaacaaggugacccuggccgacgccggcuucaucaagcaguacggcgacugccugggggacaucgccgcucgggaucugaucugcgcccagaaguucaacggccugaccgugcugccuccccugcugaccgacgagaugaucgcccaguacaccagcgcccugcuggccggcaccaucaccagcggcuggaccuucggcgccggcgcagcccuucagauccccuucgccaugcagauggccuaccgguucaacggcaucggcgugacccagaacgugcuguacgagaaccagaagcugaucgccaaccaguucaacagcgccaucggcaagauccaggacagccugagcagcaccgccagcgcccugggcaagcugcaggacguggugaaccagaacgcucaggcccugaacacccuggugaagcagcugagcucaaacuuuggcgccaucagcagcgugcugaaugacauccugagccggcuggacaagguggaggccgaggugcagaucgacaggcugaucaccggccggcugcagagccugcagaccuacgugacccagcagcugauccgggccgccgagauccgggccagcgccaaccuggcagccauuaagaugagcgagugcgugcugggccagagcaagcggguggacuucugcggcaagggcuaccaccugaugagcuucccccagagcgcuccccacggcgugguguuccugcacgucaccuacgugccagcccaggagaagaacuucacaaccgcccccgccaucugccacgacggcaaggcccacuucccccgggagggaguguucgugagcaacggcacccacugguucgugacccagcggaacuucuacgagccccagaucaucaccaccgacaacaccuucgugagcggcaacugcgacguggugaucggcaucgugaacaacaccguguacgacccccuccagcccgagcuggacagcuucaaggaggagcuggacaaguacuucaagaaccacaccagcccugacguggaccugggcgauaucagcggcaucaacgccagcguggugaacauccagaaggagaucgaccggcugaacgagguggccaagaaccugaacgagagccugaucgaccugcaggagcugggcaaguacgagcaguacaucaaguggcccugguacaucuggcugggcuucaucgccggccugaucgccaucgugauggugaccaucaugcugugcugcaugaccagcugcuguagcugccugaagggcugcugcagcugcggcagcugcugcaaguucgacgaggacgacagcgagcccgugcugaagggcgugaagcugcacuacaccugaggacuaguuauaagacugacuagcccgaugggccucccaacgggcccuccuccccuccuugcaccgagauuaaucaaaggcucuuuucagagccaccaaaaaaaaaaaaaaaaaaaaaaaaaaaaaaaaaaaaaaaaaaaaaaaaaaaaaaaaaaaaaaaaaaaaaaaaaaaaaaaaaaaaaaaaaaaaaaaaaaaaa

SEQ ID NO: 24140 - RNA, 4035 nt, Artificial Sequence
  SARS-CoV-2/Wuhan/WIV05/2019__EPI_ISL_402128 spike protein mRNA gc (1-1273)(S13I_W152C_L452R_D614G)
aggagaaagcuuaccauguucguguuccuggugcugcugccccuggugagcauccagugcgugaaccugaccacccggacccagcugcccccugccuacaccaacagcuucacccggggcguguacuaccccgacaagguguuccggagcagcgugcugcacagcacccaggaccuguuccugcccuucuucagcaacgugaccugguuccacgccauccacgugagcggcaccaacggcaccaagcgguucgacaacccagugcugcccuucaacgacggcguguacuucgccagcaccgagaagucaaacaucauccggggcuggaucuucggcaccacccuggacagcaagacacagagccugcugaucgugaacaacgccaccaacguggugaucaaggugugcgaguuucaguucugcaacgaccccuuccugggcguguacuaccacaagaacaacaagagcugcauggagagcgaguuccgggucuacagcagcgcuaacaauugcaccuucgaguacgugagccagcccuuccugauggaccucgagggcaagcagggcaacuucaagaaccugcgggaguucguguucaagaacaucgauggcuacuucaagaucuacagcaagcacacccccaucaaccuggugcgggaccugccccagggauucagcgcccuggagccucugguggaccugcccaucggcaucaacaucaccagguuccagacccugcuggcccugcaccggagcuaccugacccccggcgacagcagcagcggcuggaccgccggcgccgccgcauacuacgugggcuaccugcagccacggaccuuccugcugaaguacaacgagaacggcaccaucaccgacgccguggacugcgcccuggacccccugagcgagaccaaguguacccuaaagagcuucaccguggagaagggcaucuaccagaccagcaacuuccgggugcagcccacugagagcauugugcgguuccccaacaucaccaaccugugccccuucggcgagguguucaacgccacccgguucgccagcguguacgccuggaaccggaagcggaucagcaacugcguggccgacuacagcgugcuguacaacagcgccagcuucagcaccuucaagugcuacggcgugagcccuaccaagcugaacgaccugugcuucaccaacguguacgcugacagcuucgugauccggggcgacgaggugcggcagaucgcccccggccagaccggcaagaucgccgacuacaacuacaagcugcccgacgacuucaccggcugcgugaucgccuggaacagcaacaaccuggacagcaaggugggcggcaacuacaacuaccgguaccggcuguuccguaagagcaaccugaagccauucgagcgggacaucagcaccgagaucuaccaggccggcagcacccccugcaacgguguggagggcuuuaacugcuacuucccccugcagagcuacggcuuccagcccaccaacggcgugggcuaccagcccuaccgggugguggugcugagcuucgagcugcugcacgcccccgccaccgugugcggcccuaaaaagagcaccaaccuggugaagaacaagugcgugaacuucaauuucaacggccugaccggcaccggcgugcugaccgagagcaacaagaaguuccugcccuuccagcaguucggccgggauaucgccgacaccaccgacgcagugcgggacccccagacccuggagauccuggacaucaccccaugcagcuucggcggcgugagcgucaucacccccggcacaaacaccagcaaccagguggccgugcuguaccagggagugaacugcaccgaggugcccguggccauccacgccgaccagcugacccccaccuggcggguguacagcaccggcagcaacguguuccagacccgggccggcugccugaucggcgccgagcacgugaacaacagcuacgagugcgacauccccaucggcgcuggcaucugugccuccuaccagacccagaccaacagcccccggcgggcccggagcguggccagccagagcaucaucgccuacaccaugagccugggcgccgagaacagcguggccuacagcaacaacagcaucgcgaucccuaccaacuucaccauaagcgugaccaccgagaucuuacccgugagcaugaccaagaccagcguggacugcaccauguacaucugcggcgacagcaccgagugcagcaaccugcugcugcaguacggcagcuucugcacccagcugaaccgggcccugaccggcaucgccguggagcaggacaagaacacccaagagguguucgcccaggugaagcagaucuacaagacucccccaaucaaggacuucggcggcuucaacuucagccagauccugcccgaccccagcaagcccagcaagcggagcuucaucgaggaccugcuguucaacaaggugacccuggccgacgccggcuucaucaagcaguacggcgacugccugggggauaucgccgcucgggaccugaucugcgcccagaaguucaacggccugaccgugcugcccccucugcugaccgacgagaugaucgcccaguacaccagcgcccugcuggccggcaccaucaccagcggcuggaccuucggcgccggcgcagcccuucagauccccuucgccaugcagauggccuacagguucaacggcaucggcgugacccagaacgugcuguacgagaaccagaagcugaucgccaaccaguucaacagcgccaucggcaagauccaggacagccugagcagcaccgccagcgcccugggcaagcugcaggacguggugaaccagaacgcucaggcccugaacacccuggugaagcagcugagcagcaacuucggcgccaucagcagcgugcugaaugacauccugucacggcuggacaagguggaggccgaggugcagaucgaccggcugaucaccggccggcugcagagccugcagaccuacgugacccagcagcugauccgggccgccgagauucgggccagcgccaaccuggcagccaccaagaugagcgagugcgugcugggccagagcaagcggguggacuuuugcggcaagggcuaccaccugaugagcuucccccagagcgccccacacggcgugguguuccugcacgucacauacgugcccgcccaggagaagaacuucaccaccgcccccgccaucugccacgacggcaaggcucacuucccccgggagggaguguucgugagcaacggcacccacugguucgugacccagcggaacuucuacgagccccagaucaucaccaccgacaacaccuucgugagcggcaacugcgacguggugaucggcaucgugaacaacaccguguacgacccccuccagccugagcuggacagcuucaaggaggagcuggacaaguacuucaagaaccacaccagccccgacguggaucugggcgacaucagcggcaucaacgccagcguggugaacauccagaaggagaucgaccggcugaacgagguggccaagaaccugaacgagagccugaucgaccugcaggagcugggcaaguacgagcaguacaucaaguggcccugguacaucuggcugggcuucaucgccggccugaucgccaucgugauggugaccaucaugcugugcugcaugaccagcuguugcagcugccugaagggcugcugcagcugcggcagcugcugcaaguucgacgaggacgacagcgagccagugcugaagggcgugaagcugcacuacaccugaggacuaguuauaagacugacuagcccgaugggccucccaacgggcccuccuccccuccuugcaccgagauuaaucaaaggcucuuuucagagccaccaaaaaaaaaaaaaaaaaaaaaaaaaaaaaaaaaaaaaaaaaaaaaaaaaaaaaaaaaaaaaaaaaaaaaaaaaaaaaaaaaaaaaaaaaaaaaaaaaaaaa

SEQ ID NO: 24141 - RNA, 4035 nt, Artificial Sequence
  SARS-CoV-2/Wuhan/WIV05/2019__EPI_ISL_402128 spike protein mRNA gc mod (1-1273)
aggagaaagcuuaccauguucguguuucuggugcugcugccccugguguccagccagugugugaaccugaccaccagaacacagcugccuccagccuacaccaacagcuucaccagaggcguguacuaccccgacaagguguucagauccagcgugcugcacucuacccaggaccuguuccugccuuucuucagcaacgugaccugguuccacgccauccacguguccggcaccaauggcaccaagagauucgacaaccccgugcugcccuucaacgacgggguguacuuugccagcaccgagaaguccaacaucaucagaggcuggaucuucggcaccacacuggacagcaagacccagagccugcugaucgugaacaacgccaccaacguggucaucaaagugugcgaguuccaguucugcaacgaccccuuccugggcgucuacuaccacaagaacaacaagagcuggauggaaagcgaguuccggguguacagcagcgccaacaacugcaccuucgaguacgugucccagccuuuccugauggaccuggaaggcaagcagggcaacuucaagaaccugcgcgaguucguguucaagaacaucgacggcuacuucaaaaucuacagcaagcacaccccuaucaaccucgugcgggaucugccucagggcuucucugcucuggaaccccugguggaucugcccaucggcaucaacaucacccgguuucagacacugcuggcccugcacagaagcuaccugacaccuggcgauagcagcagcggauggacagcuggugccgccgcuuacuaugugggcuaccugcagccuagaaccuuccugcugaaguacaacgagaacggcaccaucaccgacgccguggauugugcucuggauccucugagcgagacaaagugcacccugaaguccuucaccguggaaaagggcaucuaccagaccagcaacuuccgggugcagcccaccgaauccaucgugcgguuccccaauaucaccaaucugugccccuucggcgagguguucaaugccaccagauucgccucuguguacgccuggaaccggaagcggaucagcaauugcguggccgacuacuccgugcuguacaacuccgccagcuucagcaccuucaagugcuacggcguguccccuaccaagcugaacgaccugugcuucacaaacguguacgccgacagcuucgugauccggggagaugaagugcggcagauugccccuggacagacaggcaagaucgccgacuacaacuacaagcugcccgacgacuucaccggcugugugauugccuggaacagcaacaaccuggacuccaaagucggcggcaacuacaauuaccuguaccggcuguuccggaaguccaaucugaagcccuucgagcgggacaucagcaccgaaaucuaucaggccggcagcaccccuugcaacggcguggaaggcuucaacugcuacuucccacugcaguccuacggcuuucagcccacaaauggcgugggcuaucagcccuacagagugguggugcugagcuucgaacugcugcaugcuccugccacagugugcggcccuaagaaaagcaccaaucucgugaagaacaaaugcgugaacuucaacuucaacggccugaccggcaccggcgugcugacagagagcaacaagaaguuccugccauuccagcaguuuggccgggauaucgccgauaccacagacgccguuagagauccccagacacuggaaauccuggacaucaccccaugcagcuucggcggagugucugugaucaccccuggcaccaacaccagcaaucagguggcagugcuguaccaggacgugaacuguaccgaagugcccguggccauucacgccgaucagcugacaccuacauggcggguguacuccaccggcagcaauguguuucagaccagagccggcugucugaucggagccgagcacgugaacaauagcuacgagugcgacauccccaucggcgcuggcaucugugccagcuaccagacacagacaaacagccccagacgggcuagaagcguggccagccagagcaucauugccuacacaaugucucugggcgccgagaacagcguggccuacuccaacaacucuaucgcuauccccaccaacuucaccaucagcgugaccaccgagauccugccuguguccaugaccaagaccagcguggacugcaccauguacaucugcggcgauuccaccgagugcuccaaccugcugcugcaguacggcagcuucugcacccagcugaauagagcccugacagggaucgccguggaacaggacaagaacacccaagagguguucgcccaagugaagcaaaucuacaagaccccuccuaucaaggacuucggcggcuucaauuucagccagauucugcccgauccuagcaagcccagcaagcggagcuucaucgaggaccugcuguucaacaaagugacacuggccgacgccggcuucaucaagcaguauggcgauugucugggcgacauugccgccagggaucugauuugcgcccagaaguuuaacggacugacagugcugccuccucugcugaccgaugagaugaucgcccaguacacaucugcccugcuggccggcacaaucacaagcggcuggacauuuggagcuggcgccgcucugcagauccccuuugcuaugcagauggccuaccgguucaacggcaucggagugacccagaaugugcuguacgagaaccagaagcugaucgccaaccaguucaacagcgccaucggcaagauccaggacagccugagcagcacagcaagcgcccugggaaagcugcaggacguggucaaccagaaugcccaggcacugaacacccuggucaagcagcuguccuccaacuucggcgccaucagcucugugcugaacgauauccugagcagacuggacaaggucgaggccgaggugcagaucgacagacugaucacaggcagacugcagagccuccagacauacgugacccagcagcugaucagagccgccgagauuagagccucugccaaucuggccgccaccaagaugucugagugugugcugggccagagcaagagaguggacuuuugcggcaagggcuaccaccugaugagcuucccucagucugccccucacggcgugguguuucugcacgugacauaugugcccgcucaagagaagaauuucaccaccgcuccagccaucugccacgacggcaaagcccacuuuccuagagaaggcguguucguguccaacggcacccauugguucgugacacagcggaacuucuacgagccccagaucaucaccaccgacaacaccuucgugucuggcaacugcgacguugugaucggcauugugaacaauaccguguacgacccucugcagcccgagcuggacagcuucaaagaggaacuggacaaguacuuuaagaaccacacaagccccgacguggaccugggcgauaucagcggaaucaaugccagcgucgugaacauccagaaagagaucgaccggcugaacgagguggccaagaaucugaacgagagccugaucgaccugcaagaacuggggaaguacgagcaguacaucaaguggcccugguacaucuggcugggcuuuaucgccggacugauugccaucgugauggucacaaucaugcuguguugcaugaccagcugcuguagcugccugaagggcuguuguagcuguggcagcugcugcaaguucgacgaggacgauucugagcccgugcugaagggcgugaaacugcacuacaccugaggacuaguuauaagacugacuagcccgaugggccucccaacgggcccuccuccccuccuugcaccgagauuaaucaaaggcucuuuucagagccaccaaaaaaaaaaaaaaaaaaaaaaaaaaaaaaaaaaaaaaaaaaaaaaaaaaaaaaaaaaaaaaaaaaaaaaaaaaaaaaaaaaaaaaaaaaaaaaaaaaaaa

SEQ ID NO: 24142 - RNA, 4035 nt, Artificial Sequence
  SARS-CoV-2/Wuhan/WIV05/2019__EPI_ISL_402128 spike protein mRNA gc mod (1-1273)(D614G)
aggagaaagcuuaccauguucguguuucuggugcugcugccccugguguccagccagugugugaaccugaccaccagaacacagcugccuccagccuacaccaacagcuucaccagaggcguguacuaccccgacaagguguucagauccagcgugcugcacucuacccaggaccuguuccugccuuucuucagcaacgugaccugguuccacgccauccacguguccggcaccaauggcaccaagagauucgacaaccccgugcugcccuucaacgacgggguguacuuugccagcaccgagaaguccaacaucaucagaggcuggaucuucggcaccacacuggacagcaagacccagagccugcugaucgugaacaacgccaccaacguggucaucaaagugugcgaguuccaguucugcaacgaccccuuccugggcgucuacuaccacaagaacaacaagagcuggauggaaagcgaguuccggguguacagcagcgccaacaacugcaccuucgaguacgugucccagccuuuccugauggaccuggaaggcaagcagggcaacuucaagaaccugcgcgaguucguguucaagaacaucgacggcuacuucaaaaucuacagcaagcacaccccuaucaaccucgugcgggaucugccucagggcuucucugcucuggaaccccugguggaucugcccaucggcaucaacaucacccgguuucagacacugcuggcccugcacagaagcuaccugacaccuggcgauagcagcagcggauggacagcuggugccgccgcuuacuaugugggcuaccugcagccuagaaccuuccugcugaaguacaacgagaacggcaccaucaccgacgccguggauugugcucuggauccucugagcgagacaaagugcacccugaaguccuucaccguggaaaagggcaucuaccagaccagcaacuuccgggugcagcccaccgaauccaucgugcgguuccccaauaucaccaaucugugccccuucggcgagguguucaaugccaccagauucgccucuguguacgccuggaaccggaagcggaucagcaauugcguggccgacuacuccgugcuguacaacuccgccagcuucagcaccuucaagugcuacggcguguccccuaccaagcugaacgaccugugcuucacaaacguguacgccgacagcuucgugauccggggagaugaagugcggcagauugccccuggacagacaggcaagaucgccgacuacaacuacaagcugcccgacgacuucaccggcugugugauugccuggaacagcaacaaccuggacuccaaagucggcggcaacuacaauuaccuguaccggcuguuccggaaguccaaucugaagcccuucgagcgggacaucagcaccgaaaucuaucaggccggcagcaccccuugcaacggcguggaaggcuucaacugcuacuucccacugcaguccuacggcuuucagcccacaaauggcgugggcuaucagcccuacagagugguggugcugagcuucgaacugcugcaugcuccugccacagugugcggcccuaagaaaagcaccaaucucgugaagaacaaaugcgugaacuucaacuucaacggccugaccggcaccggcgugcugacagagagcaacaagaaguuccugccauuccagcaguuuggccgggauaucgccgauaccacagacgccguuagagauccccagacacuggaaauccuggacaucaccccaugcagcuucggcggagugucugugaucaccccuggcaccaacaccagcaaucagguggcagugcuguaccagggcgugaacuguaccgaagugcccguggccauucacgccgaucagcugacaccuacauggcggguguacuccaccggcagcaauguguuucagaccagagccggcugucugaucggagccgagcacgugaacaauagcuacgagugcgacauccccaucggcgcuggcaucugugccagcuaccagacacagacaaacagccccagacgggcuagaagcguggccagccagagcaucauugccuacacaaugucucugggcgccgagaacagcguggccuacuccaacaacucuaucgcuauccccaccaacuucaccaucagcgugaccaccgagauccugccuguguccaugaccaagaccagcguggacugcaccauguacaucugcggcgauuccaccgagugcuccaaccugcugcugcaguacggcagcuucugcacccagcugaauagagcccugacagggaucgccguggaacaggacaagaacacccaagagguguucgcccaagugaagcaaaucuacaagaccccuccuaucaaggacuucggcggcuucaauuucagccagauucugcccgauccuagcaagcccagcaagcggagcuucaucgaggaccugcuguucaacaaagugacacuggccgacgccggcuucaucaagcaguauggcgauugucugggcgacauugccgccagggaucugauuugcgcccagaaguuuaacggacugacagugcugccuccucugcugaccgaugagaugaucgcccaguacacaucugcccugcuggccggcacaaucacaagcggcuggacauuuggagcuggcgccgcucugcagauccccuuugcuaugcagauggccuaccgguucaacggcaucggagugacccagaaugugcuguacgagaaccagaagcugaucgccaaccaguucaacagcgccaucggcaagauccaggacagccugagcagcacagcaagcgcccugggaaagcugcaggacguggucaaccagaaugcccaggcacugaacacccuggucaagcagcuguccuccaacuucggcgccaucagcucugugcugaacgauauccugagcagacuggacaaggucgaggccgaggugcagaucgacagacugaucacaggcagacugcagagccuccagacauacgugacccagcagcugaucagagccgccgagauuagagccucugccaaucuggccgccaccaagaugucugagugugugcugggccagagcaagagaguggacuuuugcggcaagggcuaccaccugaugagcuucccucagucugccccucacggcgugguguuucugcacgugacauaugugcccgcucaagagaagaauuucaccaccgcuccagccaucugccacgacggcaaagcccacuuuccuagagaaggcguguucguguccaacggcacccauugguucgugacacagcggaacuucuacgagccccagaucaucaccaccgacaacaccuucgugucuggcaacugcgacguugugaucggcauugugaacaauaccguguacgacccucugcagcccgagcuggacagcuucaaagaggaacuggacaaguacuuuaagaaccacacaagccccgacguggaccugggcgauaucagcggaaucaaugccagcgucgugaacauccagaaagagaucgaccggcugaacgagguggccaagaaucugaacgagagccugaucgaccugcaagaacuggggaaguacgagcaguacaucaaguggcccugguacaucuggcugggcuuuaucgccggacugauugccaucgugauggucacaaucaugcuguguugcaugaccagcugcuguagcugccugaagggcuguuguagcuguggcagcugcugcaaguucgacgaggacgauucugagcccgugcugaagggcgugaaacugcacuacaccugaggacuaguuauaagacugacuagcccgaugggccucccaacgggcccuccuccccuccuugcaccgagauuaaucaaaggcucuuuucagagccaccaaaaaaaaaaaaaaaaaaaaaaaaaaaaaaaaaaaaaaaaaaaaaaaaaaaaaaaaaaaaaaaaaaaaaaaaaaaaaaaaaaaaaaaaaaaaaaaaaaaaa

SEQ ID NO: 24143 - RNA, 4035 nt, Artificial Sequence
  SARS-CoV-2/Wuhan/WIV05/2019__EPI_ISL_402128 spike protein mRNA gc mod (1-1273)(A222V_D614G)
aggagaaagcuuaccauguucguguuucuggugcugcugccccugguguccagccagugugugaaccugaccaccagaacacagcugccuccagccuacaccaacagcuucaccagaggcguguacuaccccgacaagguguucagauccagcgugcugcacucuacccaggaccuguuccugccuuucuucagcaacgugaccugguuccacgccauccacguguccggcaccaauggcaccaagagauucgacaaccccgugcugcccuucaacgacgggguguacuuugccagcaccgagaaguccaacaucaucagaggcuggaucuucggcaccacacuggacagcaagacccagagccugcugaucgugaacaacgccaccaacguggucaucaaagugugcgaguuccaguucugcaacgaccccuuccugggcgucuacuaccacaagaacaacaagagcuggauggaaagcgaguuccggguguacagcagcgccaacaacugcaccuucgaguacgugucccagccuuuccugauggaccuggaaggcaagcagggcaacuucaagaaccugcgcgaguucguguucaagaacaucgacggcuacuucaaaaucuacagcaagcacaccccuaucaaccucgugcgggaucugccucagggcuucucugugcuggaaccccugguggaucugcccaucggcaucaacaucacccgguuucagacacugcuggcccugcacagaagcuaccugacaccuggcgauagcagcagcggauggacagcuggugccgccgcuuacuaugugggcuaccugcagccuagaaccuuccugcugaaguacaacgagaacggcaccaucaccgacgccguggauugugcucuggauccucugagcgagacaaagugcacccugaaguccuucaccguggaaaagggcaucuaccagaccagcaacuuccgggugcagcccaccgaauccaucgugcgguuccccaauaucaccaaucugugccccuucggcgagguguucaaugccaccagauucgccucuguguacgccuggaaccggaagcggaucagcaauugcguggccgacuacuccgugcuguacaacuccgccagcuucagcaccuucaagugcuacggcguguccccuaccaagcugaacgaccugugcuucacaaacguguacgccgacagcuucgugauccggggagaugaagugcggcagauugccccuggacagacaggcaagaucgccgacuacaacuacaagcugcccgacgacuucaccggcugugugauugccuggaacagcaacaaccuggacuccaaagucggcggcaacuacaauuaccuguaccggcuguuccggaaguccaaucugaagcccuucgagcgggacaucagcaccgaaaucuaucaggccggcagcaccccuugcaacggcguggaaggcuucaacugcuacuucccacugcaguccuacggcuuucagcccacaaauggcgugggcuaucagcccuacagagugguggugcugagcuucgaacugcugcaugcuccugccacagugugcggcccuaagaaaagcaccaaucucgugaagaacaaaugcgugaacuucaacuucaacggccugaccggcaccggcgugcugacagagagcaacaagaaguuccugccauuccagcaguuuggccgggauaucgccgauaccacagacgccguuagagauccccagacacuggaaauccuggacaucaccccaugcagcuucggcggagugucugugaucaccccuggcaccaacaccagcaaucagguggcagugcuguaccagggcgugaacuguaccgaagugcccguggccauucacgccgaucagcugacaccuacauggcggguguacuccaccggcagcaauguguuucagaccagagccggcugucugaucggagccgagcacgugaacaauagcuacgagugcgacauccccaucggcgcuggcaucugugccagcuaccagacacagacaaacagccccagacgggcuagaagcguggccagccagagcaucauugccuacacaaugucucugggcgccgagaacagcguggccuacuccaacaacucuaucgcuauccccaccaacuucaccaucagcgugaccaccgagauccugccuguguccaugaccaagaccagcguggacugcaccauguacaucugcggcgauuccaccgagugcuccaaccugcugcugcaguacggcagcuucugcacccagcugaauagagcccugacagggaucgccguggaacaggacaagaacacccaagagguguucgcccaagugaagcaaaucuacaagaccccuccuaucaaggacuucggcggcuucaauuucagccagauucugcccgauccuagcaagcccagcaagcggagcuucaucgaggaccugcuguucaacaaagugacacuggccgacgccggcuucaucaagcaguauggcgauugucugggcgacauugccgccagggaucugauuugcgcccagaaguuuaacggacugacagugcugccuccucugcugaccgaugagaugaucgcccaguacacaucugcccugcuggccggcacaaucacaagcggcuggacauuuggagcuggcgccgcucugcagauccccuuugcuaugcagauggccuaccgguucaacggcaucggagugacccagaaugugcuguacgagaaccagaagcugaucgccaaccaguucaacagcgccaucggcaagauccaggacagccugagcagcacagcaagcgcccugggaaagcugcaggacguggucaaccagaaugcccaggcacugaacacccuggucaagcagcuguccuccaacuucggcgccaucagcucugugcugaacgauauccugagcagacuggacaaggucgaggccgaggugcagaucgacagacugaucacaggcagacugcagagccuccagacauacgugacccagcagcugaucagagccgccgagauuagagccucugccaaucuggccgccaccaagaugucugagugugugcugggccagagcaagagaguggacuuuugcggcaagggcuaccaccugaugagcuucccucagucugccccucacggcgugguguuucugcacgugacauaugugcccgcucaagagaagaauuucaccaccgcuccagccaucugccacgacggcaaagcccacuuuccuagagaaggcguguucguguccaacggcacccauugguucgugacacagcggaacuucuacgagccccagaucaucaccaccgacaacaccuucgugucuggcaacugcgacguugugaucggcauugugaacaauaccguguacgacccucugcagcccgagcuggacagcuucaaagaggaacuggacaaguacuuuaagaaccacacaagccccgacguggaccugggcgauaucagcggaaucaaugccagcgucgugaacauccagaaagagaucgaccggcugaacgagguggccaagaaucugaacgagagccugaucgaccugcaagaacuggggaaguacgagcaguacaucaaguggcccugguacaucuggcugggcuuuaucgccggacugauugccaucgugauggucacaaucaugcuguguugcaugaccagcugcuguagcugccugaagggcuguuguagcuguggcagcugcugcaaguucgacgaggacgauucugagcccgugcugaagggcgugaaacugcacuacaccugaggacuaguuauaagacugacuagcccgaugggccucccaacgggcccuccuccccuccuugcaccgagauuaaucaaaggcucuuuucagagccaccaaaaaaaaaaaaaaaaaaaaaaaaaaaaaaaaaaaaaaaaaaaaaaaaaaaaaaaaaaaaaaaaaaaaaaaaaaaaaaaaaaaaaaaaaaaaaaaaaaaaa

SEQ ID NO: 24144 - RNA, 4035 nt, Artificial Sequence
  SARS-CoV-2/Wuhan/WIV05/2019__EPI_ISL_402128 spike protein mRNA gc mod (1-1273)(N439K_D614G)
aggagaaagcuuaccauguucguguuucuggugcugcugccccugguguccagccagugugugaaccugaccaccagaacacagcugccuccagccuacaccaacagcuucaccagaggcguguacuaccccgacaagguguucagauccagcgugcugcacucuacccaggaccuguuccugccuuucuucagcaacgugaccugguuccacgccauccacguguccggcaccaauggcaccaagagauucgacaaccccgugcugcccuucaacgacgggguguacuuugccagcaccgagaaguccaacaucaucagaggcuggaucuucggcaccacacuggacagcaagacccagagccugcugaucgugaacaacgccaccaacguggucaucaaagugugcgaguuccaguucugcaacgaccccuuccugggcgucuacuaccacaagaacaacaagagcuggauggaaagcgaguuccggguguacagcagcgccaacaacugcaccuucgaguacgugucccagccuuuccugauggaccuggaaggcaagcagggcaacuucaagaaccugcgcgaguucguguucaagaacaucgacggcuacuucaaaaucuacagcaagcacaccccuaucaaccucgugcgggaucugccucagggcuucucugcucuggaaccccugguggaucugcccaucggcaucaacaucacccgguuucagacacugcuggcccugcacagaagcuaccugacaccuggcgauagcagcagcggauggacagcuggugccgccgcuuacuaugugggcuaccugcagccuagaaccuuccugcugaaguacaacgagaacggcaccaucaccgacgccguggauugugcucuggauccucugagcgagacaaagugcacccugaaguccuucaccguggaaaagggcaucuaccagaccagcaacuuccgggugcagcccaccgaauccaucgugcgguuccccaauaucaccaaucugugccccuucggcgagguguucaaugccaccagauucgccucuguguacgccuggaaccggaagcggaucagcaauugcguggccgacuacuccgugcuguacaacuccgccagcuucagcaccuucaagugcuacggcguguccccuaccaagcugaacgaccugugcuucacaaacguguacgccgacagcuucgugauccggggagaugaagugcggcagauugccccuggacagacaggcaagaucgccgacuacaacuacaagcugcccgacgacuucaccggcugugugauugccuggaacagcaagaaccuggacuccaaagucggcggcaacuacaauuaccuguaccggcuguuccggaaguccaaucugaagcccuucgagcgggacaucagcaccgaaaucuaucaggccggcagcaccccuugcaacggcguggaaggcuucaacugcuacuucccacugcaguccuacggcuuucagcccacaaauggcgugggcuaucagcccuacagagugguggugcugagcuucgaacugcugcaugcuccugccacagugugcggcccuaagaaaagcaccaaucucgugaagaacaaaugcgugaacuucaacuucaacggccugaccggcaccggcgugcugacagagagcaacaagaaguuccugccauuccagcaguuuggccgggauaucgccgauaccacagacgccguuagagauccccagacacuggaaauccuggacaucaccccaugcagcuucggcggagugucugugaucaccccuggcaccaacaccagcaaucagguggcagugcuguaccagggcgugaacuguaccgaagugcccguggccauucacgccgaucagcugacaccuacauggcggguguacuccaccggcagcaauguguuucagaccagagccggcugucugaucggagccgagcacgugaacaauagcuacgagugcgacauccccaucggcgcuggcaucugugccagcuaccagacacagacaaacagccccagacgggcuagaagcguggccagccagagcaucauugccuacacaaugucucugggcgccgagaacagcguggccuacuccaacaacucuaucgcuauccccaccaacuucaccaucagcgugaccaccgagauccugccuguguccaugaccaagaccagcguggacugcaccauguacaucugcggcgauuccaccgagugcuccaaccugcugcugcaguacggcagcuucugcacccagcugaauagagcccugacagggaucgccguggaacaggacaagaacacccaagagguguucgcccaagugaagcaaaucuacaagaccccuccuaucaaggacuucggcggcuucaauuucagccagauucugcccgauccuagcaagcccagcaagcggagcuucaucgaggaccugcuguucaacaaagugacacuggccgacgccggcuucaucaagcaguauggcgauugucugggcgacauugccgccagggaucugauuugcgcccagaaguuuaacggacugacagugcugccuccucugcugaccgaugagaugaucgcccaguacacaucugcccugcuggccggcacaaucacaagcggcuggacauuuggagcuggcgccgcucugcagauccccuuugcuaugcagauggccuaccgguucaacggcaucggagugacccagaaugugcuguacgagaaccagaagcugaucgccaaccaguucaacagcgccaucggcaagauccaggacagccugagcagcacagcaagcgcccugggaaagcugcaggacguggucaaccagaaugcccaggcacugaacacccuggucaagcagcuguccuccaacuucggcgccaucagcucugugcugaacgauauccugagcagacuggacaaggucgaggccgaggugcagaucgacagacugaucacaggcagacugcagagccuccagacauacgugacccagcagcugaucagagccgccgagauuagagccucugccaaucuggccgccaccaagaugucugagugugugcugggccagagcaagagaguggacuuuugcggcaagggcuaccaccugaugagcuucccucagucugccccucacggcgugguguuucugcacgugacauaugugcccgcucaagagaagaauuucaccaccgcuccagccaucugccacgacggcaaagcccacuuuccuagagaaggcguguucguguccaacggcacccauugguucgugacacagcggaacuucuacgagccccagaucaucaccaccgacaacaccuucgugucuggcaacugcgacguugugaucggcauugugaacaauaccguguacgacccucugcagcccgagcuggacagcuucaaagaggaacuggacaaguacuuuaagaaccacacaagccccgacguggaccugggcgauaucagcggaaucaaugccagcgucgugaacauccagaaagagaucgaccggcugaacgagguggccaagaaucugaacgagagccugaucgaccugcaagaacuggggaaguacgagcaguacaucaaguggcccugguacaucuggcugggcuuuaucgccggacugauugccaucgugauggucacaaucaugcuguguugcaugaccagcugcuguagcugccugaagggcuguuguagcuguggcagcugcugcaaguucgacgaggacgauucugagcccgugcugaagggcgugaaacugcacuacaccugaggacuaguuauaagacugacuagcccgaugggccucccaacgggcccuccuccccuccuugcaccgagauuaaucaaaggcucuuuucagagccaccaaaaaaaaaaaaaaaaaaaaaaaaaaaaaaaaaaaaaaaaaaaaaaaaaaaaaaaaaaaaaaaaaaaaaaaaaaaaaaaaaaaaaaaaaaaaaaaaaaaaa

SEQ ID NO: 24145 - RNA, 4035 nt, Artificial Sequence
  SARS-CoV-2/Wuhan/WIV05/2019__EPI_ISL_402128 spike protein mRNA gc mod (1-1273)(S477N_D614G)
aggagaaagcuuaccauguucguguuucuggugcugcugccccugguguccagccagugugugaaccugaccaccagaacacagcugccuccagccuacaccaacagcuucaccagaggcguguacuaccccgacaagguguucagauccagcgugcugcacucuacccaggaccuguuccugccuuucuucagcaacgugaccugguuccacgccauccacguguccggcaccaauggcaccaagagauucgacaaccccgugcugcccuucaacgacgggguguacuuugccagcaccgagaaguccaacaucaucagaggcuggaucuucggcaccacacuggacagcaagacccagagccugcugaucgugaacaacgccaccaacguggucaucaaagugugcgaguuccaguucugcaacgaccccuuccugggcgucuacuaccacaagaacaacaagagcuggauggaaagcgaguuccggguguacagcagcgccaacaacugcaccuucgaguacgugucccagccuuuccugauggaccuggaaggcaagcagggcaacuucaagaaccugcgcgaguucguguucaagaacaucgacggcuacuucaaaaucuacagcaagcacaccccuaucaaccucgugcgggaucugccucagggcuucucugcucuggaaccccugguggaucugcccaucggcaucaacaucacccgguuucagacacugcuggcccugcacagaagcuaccugacaccuggcgauagcagcagcggauggacagcuggugccgccgcuuacuaugugggcuaccugcagccuagaaccuuccugcugaaguacaacgagaacggcaccaucaccgacgccguggauugugcucuggauccucugagcgagacaaagugcacccugaaguccuucaccguggaaaagggcaucuaccagaccagcaacuuccgggugcagcccaccgaauccaucgugcgguuccccaauaucaccaaucugugccccuucggcgagguguucaaugccaccagauucgccucuguguacgccuggaaccggaagcggaucagcaauugcguggccgacuacuccgugcuguacaacuccgccagcuucagcaccuucaagugcuacggcguguccccuaccaagcugaacgaccugugcuucacaaacguguacgccgacagcuucgugauccggggagaugaagugcggcagauugccccuggacagacaggcaagaucgccgacuacaacuacaagcugcccgacgacuucaccggcugugugauugccuggaacagcaacaaccuggacuccaaagucggcggcaacuacaauuaccuguaccggcuguuccggaaguccaaucugaagcccuucgagcgggacaucagcaccgaaaucuaucaggccggcaacaccccuugcaacggcguggaaggcuucaacugcuacuucccacugcaguccuacggcuuucagcccacaaauggcgugggcuaucagcccuacagagugguggugcugagcuucgaacugcugcaugcuccugccacagugugcggcccuaagaaaagcaccaaucucgugaagaacaaaugcgugaacuucaacuucaacggccugaccggcaccggcgugcugacagagagcaacaagaaguuccugccauuccagcaguuuggccgggauaucgccgauaccacagacgccguuagagauccccagacacuggaaauccuggacaucaccccaugcagcuucggcggagugucugugaucaccccuggcaccaacaccagcaaucagguggcagugcuguaccagggcgugaacuguaccgaagugcccguggccauucacgccgaucagcugacaccuacauggcggguguacuccaccggcagcaauguguuucagaccagagccggcugucugaucggagccgagcacgugaacaauagcuacgagugcgacauccccaucggcgcuggcaucugugccagcuaccagacacagacaaacagccccagacgggcuagaagcguggccagccagagcaucauugccuacacaaugucucugggcgccgagaacagcguggccuacuccaacaacucuaucgcuauccccaccaacuucaccaucagcgugaccaccgagauccugccuguguccaugaccaagaccagcguggacugcaccauguacaucugcggcgauuccaccgagugcuccaaccugcugcugcaguacggcagcuucugcacccagcugaauagagcccugacagggaucgccguggaacaggacaagaacacccaagagguguucgcccaagugaagcaaaucuacaagaccccuccuaucaaggacuucggcggcuucaauuucagccagauucugcccgauccuagcaagcccagcaagcggagcuucaucgaggaccugcuguucaacaaagugacacuggccgacgccggcuucaucaagcaguauggcgauugucugggcgacauugccgccagggaucugauuugcgcccagaaguuuaacggacugacagugcugccuccucugcugaccgaugagaugaucgcccaguacacaucugcccugcuggccggcacaaucacaagcggcuggacauuuggagcuggcgccgcucugcagauccccuuugcuaugcagauggccuaccgguucaacggcaucggagugacccagaaugugcuguacgagaaccagaagcugaucgccaaccaguucaacagcgccaucggcaagauccaggacagccugagcagcacagcaagcgcccugggaaagcugcaggacguggucaaccagaaugcccaggcacugaacacccuggucaagcagcuguccuccaacuucggcgccaucagcucugugcugaacgauauccugagcagacuggacaaggucgaggccgaggugcagaucgacagacugaucacaggcagacugcagagccuccagacauacgugacccagcagcugaucagagccgccgagauuagagccucugccaaucuggccgccaccaagaugucugagugugugcugggccagagcaagagaguggacuuuugcggcaagggcuaccaccugaugagcuucccucagucugccccucacggcgugguguuucugcacgugacauaugugcccgcucaagagaagaauuucaccaccgcuccagccaucugccacgacggcaaagcccacuuuccuagagaaggcguguucguguccaacggcacccauugguucgugacacagcggaacuucuacgagccccagaucaucaccaccgacaacaccuucgugucuggcaacugcgacguugugaucggcauugugaacaauaccguguacgacccucugcagcccgagcuggacagcuucaaagaggaacuggacaaguacuuuaagaaccacacaagccccgacguggaccugggcgauaucagcggaaucaaugccagcgucgugaacauccagaaagagaucgaccggcugaacgagguggccaagaaucugaacgagagccugaucgaccugcaagaacuggggaaguacgagcaguacaucaaguggcccugguacaucuggcugggcuuuaucgccggacugauugccaucgugauggucacaaucaugcuguguugcaugaccagcugcuguagcugccugaagggcuguuguagcuguggcagcugcugcaaguucgacgaggacgauucugagcccgugcugaagggcgugaaacugcacuacaccugaggacuaguuauaagacugacuagcccgaugggccucccaacgggcccuccuccccuccuugcaccgagauuaaucaaaggcucuuuucagagccaccaaaaaaaaaaaaaaaaaaaaaaaaaaaaaaaaaaaaaaaaaaaaaaaaaaaaaaaaaaaaaaaaaaaaaaaaaaaaaaaaaaaaaaaaaaaaaaaaaaaaa

SEQ ID NO: 24146 - RNA, 4035 nt, Artificial Sequence
  SARS-CoV-2/Wuhan/WIV05/2019__EPI_ISL_402128 spike protein mRNA gc mod (1-1273)(N501Y_D614G)
aggagaaagcuuaccauguucguguuucuggugcugcugccccugguguccagccagugugugaaccugaccaccagaacacagcugccuccagccuacaccaacagcuucaccagaggcguguacuaccccgacaagguguucagauccagcgugcugcacucuacccaggaccuguuccugccuuucuucagcaacgugaccugguuccacgccauccacguguccggcaccaauggcaccaagagauucgacaaccccgugcugcccuucaacgacgggguguacuuugccagcaccgagaaguccaacaucaucagaggcuggaucuucggcaccacacuggacagcaagacccagagccugcugaucgugaacaacgccaccaacguggucaucaaagugugcgaguuccaguucugcaacgaccccuuccugggcgucuacuaccacaagaacaacaagagcuggauggaaagcgaguuccggguguacagcagcgccaacaacugcaccuucgaguacgugucccagccuuuccugauggaccuggaaggcaagcagggcaacuucaagaaccugcgcgaguucguguucaagaacaucgacggcuacuucaaaaucuacagcaagcacaccccuaucaaccucgugcgggaucugccucagggcuucucugcucuggaaccccugguggaucugcccaucggcaucaacaucacccgguuucagacacugcuggcccugcacagaagcuaccugacaccuggcgauagcagcagcggauggacagcuggugccgccgcuuacuaugugggcuaccugcagccuagaaccuuccugcugaaguacaacgagaacggcaccaucaccgacgccguggauugugcucuggauccucugagcgagacaaagugcacccugaaguccuucaccguggaaaagggcaucuaccagaccagcaacuuccgggugcagcccaccgaauccaucgugcgguuccccaauaucaccaaucugugccccuucggcgagguguucaaugccaccagauucgccucuguguacgccuggaaccggaagcggaucagcaauugcguggccgacuacuccgugcuguacaacuccgccagcuucagcaccuucaagugcuacggcguguccccuaccaagcugaacgaccugugcuucacaaacguguacgccgacagcuucgugauccggggagaugaagugcggcagauugccccuggacagacaggcaagaucgccgacuacaacuacaagcugcccgacgacuucaccggcugugugauugccuggaacagcaacaaccuggacuccaaagucggcggcaacuacaauuaccuguaccggcuguuccggaaguccaaucugaagcccuucgagcgggacaucagcaccgaaaucuaucaggccggcagcaccccuugcaacggcguggaaggcuucaacugcuacuucccacugcaguccuacggcuuucagcccacauacggcgugggcuaucagcccuacagagugguggugcugagcuucgaacugcugcaugcuccugccacagugugcggcccuaagaaaagcaccaaucucgugaagaacaaaugcgugaacuucaacuucaacggccugaccggcaccggcgugcugacagagagcaacaagaaguuccugccauuccagcaguuuggccgggauaucgccgauaccacagacgccguuagagauccccagacacuggaaauccuggacaucaccccaugcagcuucggcggagugucugugaucaccccuggcaccaacaccagcaaucagguggcagugcuguaccagggcgugaacuguaccgaagugcccguggccauucacgccgaucagcugacaccuacauggcggguguacuccaccggcagcaauguguuucagaccagagccggcugucugaucggagccgagcacgugaacaauagcuacgagugcgacauccccaucggcgcuggcaucugugccagcuaccagacacagacaaacagccccagacgggcuagaagcguggccagccagagcaucauugccuacacaaugucucugggcgccgagaacagcguggccuacuccaacaacucuaucgcuauccccaccaacuucaccaucagcgugaccaccgagauccugccuguguccaugaccaagaccagcguggacugcaccauguacaucugcggcgauuccaccgagugcuccaaccugcugcugcaguacggcagcuucugcacccagcugaauagagcccugacagggaucgccguggaacaggacaagaacacccaagagguguucgcccaagugaagcaaaucuacaagaccccuccuaucaaggacuucggcggcuucaauuucagccagauucugcccgauccuagcaagcccagcaagcggagcuucaucgaggaccugcuguucaacaaagugacacuggccgacgccggcuucaucaagcaguauggcgauugucugggcgacauugccgccagggaucugauuugcgcccagaaguuuaacggacugacagugcugccuccucugcugaccgaugagaugaucgcccaguacacaucugcccugcuggccggcacaaucacaagcggcuggacauuuggagcuggcgccgcucugcagauccccuuugcuaugcagauggccuaccgguucaacggcaucggagugacccagaaugugcuguacgagaaccagaagcugaucgccaaccaguucaacagcgccaucggcaagauccaggacagccugagcagcacagcaagcgcccugggaaagcugcaggacguggucaaccagaaugcccaggcacugaacacccuggucaagcagcuguccuccaacuucggcgccaucagcucugugcugaacgauauccugagcagacuggacaaggucgaggccgaggugcagaucgacagacugaucacaggcagacugcagagccuccagacauacgugacccagcagcugaucagagccgccgagauuagagccucugccaaucuggccgccaccaagaugucugagugugugcugggccagagcaagagaguggacuuuugcggcaagggcuaccaccugaugagcuucccucagucugccccucacggcgugguguuucugcacgugacauaugugcccgcucaagagaagaauuucaccaccgcuccagccaucugccacgacggcaaagcccacuuuccuagagaaggcguguucguguccaacggcacccauugguucgugacacagcggaacuucuacgagccccagaucaucaccaccgacaacaccuucgugucuggcaacugcgacguugugaucggcauugugaacaauaccguguacgacccucugcagcccgagcuggacagcuucaaagaggaacuggacaaguacuuuaagaaccacacaagccccgacguggaccugggcgauaucagcggaaucaaugccagcgucgugaacauccagaaagagaucgaccggcugaacgagguggccaagaaucugaacgagagccugaucgaccugcaagaacuggggaaguacgagcaguacaucaaguggcccugguacaucuggcugggcuuuaucgccggacugauugccaucgugauggucacaaucaugcuguguugcaugaccagcugcuguagcugccugaagggcuguuguagcuguggcagcugcugcaaguucgacgaggacgauucugagcccgugcugaagggcgugaaacugcacuacaccugaggacuaguuauaagacugacuagcccgaugggccucccaacgggcccuccuccccuccuugcaccgagauuaaucaaaggcucuuuucagagccaccaaaaaaaaaaaaaaaaaaaaaaaaaaaaaaaaaaaaaaaaaaaaaaaaaaaaaaaaaaaaaaaaaaaaaaaaaaaaaaaaaaaaaaaaaaaaaaaaaaaaa

SEQ ID NO: 24147 - RNA, 4029 nt, Artificial Sequence
  SARS-CoV-2/Wuhan/WIV05/2019__EPI_ISL_402128 spike protein mRNA gc mod (1-1273)(H69del_V70del_D614G)
aggagaaagcuuaccauguucguguuucuggugcugcugccccugguguccagccagugugugaaccugaccaccagaacacagcugccuccagccuacaccaacagcuucaccagaggcguguacuaccccgacaagguguucagauccagcgugcugcacucuacccaggaccuguuccugccuuucuucagcaacgugaccugguuccacgccaucuccggcaccaauggcaccaagagauucgacaaccccgugcugcccuucaacgacgggguguacuuugccagcaccgagaaguccaacaucaucagaggcuggaucuucggcaccacacuggacagcaagacccagagccugcugaucgugaacaacgccaccaacguggucaucaaagugugcgaguuccaguucugcaacgaccccuuccugggcgucuacuaccacaagaacaacaagagcuggauggaaagcgaguuccggguguacagcagcgccaacaacugcaccuucgaguacgugucccagccuuuccugauggaccuggaaggcaagcagggcaacuucaagaaccugcgcgaguucguguucaagaacaucgacggcuacuucaaaaucuacagcaagcacaccccuaucaaccucgugcgggaucugccucagggcuucucugcucuggaaccccugguggaucugcccaucggcaucaacaucacccgguuucagacacugcuggcccugcacagaagcuaccugacaccuggcgauagcagcagcggauggacagcuggugccgccgcuuacuaugugggcuaccugcagccuagaaccuuccugcugaaguacaacgagaacggcaccaucaccgacgccguggauugugcucuggauccucugagcgagacaaagugcacccugaaguccuucaccguggaaaagggcaucuaccagaccagcaacuuccgggugcagcccaccgaauccaucgugcgguuccccaauaucaccaaucugugccccuucggcgagguguucaaugccaccagauucgccucuguguacgccuggaaccggaagcggaucagcaauugcguggccgacuacuccgugcuguacaacuccgccagcuucagcaccuucaagugcuacggcguguccccuaccaagcugaacgaccugugcuucacaaacguguacgccgacagcuucgugauccggggagaugaagugcggcagauugccccuggacagacaggcaagaucgccgacuacaacuacaagcugcccgacgacuucaccggcugugugauugccuggaacagcaacaaccuggacuccaaagucggcggcaacuacaauuaccuguaccggcuguuccggaaguccaaucugaagcccuucgagcgggacaucagcaccgaaaucuaucaggccggcagcaccccuugcaacggcguggaaggcuucaacugcuacuucccacugcaguccuacggcuuucagcccacaaauggcgugggcuaucagcccuacagagugguggugcugagcuucgaacugcugcaugcuccugccacagugugcggcccuaagaaaagcaccaaucucgugaagaacaaaugcgugaacuucaacuucaacggccugaccggcaccggcgugcugacagagagcaacaagaaguuccugccauuccagcaguuuggccgggauaucgccgauaccacagacgccguuagagauccccagacacuggaaauccuggacaucaccccaugcagcuucggcggagugucugugaucaccccuggcaccaacaccagcaaucagguggcagugcuguaccagggcgugaacuguaccgaagugcccguggccauucacgccgaucagcugacaccuacauggcggguguacuccaccggcagcaauguguuucagaccagagccggcugucugaucggagccgagcacgugaacaauagcuacgagugcgacauccccaucggcgcuggcaucugugccagcuaccagacacagacaaacagccccagacgggcuagaagcguggccagccagagcaucauugccuacacaaugucucugggcgccgagaacagcguggccuacuccaacaacucuaucgcuauccccaccaacuucaccaucagcgugaccaccgagauccugccuguguccaugaccaagaccagcguggacugcaccauguacaucugcggcgauuccaccgagugcuccaaccugcugcugcaguacggcagcuucugcacccagcugaauagagcccugacagggaucgccguggaacaggacaagaacacccaagagguguucgcccaagugaagcaaaucuacaagaccccuccuaucaaggacuucggcggcuucaauuucagccagauucugcccgauccuagcaagcccagcaagcggagcuucaucgaggaccugcuguucaacaaagugacacuggccgacgccggcuucaucaagcaguauggcgauugucugggcgacauugccgccagggaucugauuugcgcccagaaguuuaacggacugacagugcugccuccucugcugaccgaugagaugaucgcccaguacacaucugcccugcuggccggcacaaucacaagcggcuggacauuuggagcuggcgccgcucugcagauccccuuugcuaugcagauggccuaccgguucaacggcaucggagugacccagaaugugcuguacgagaaccagaagcugaucgccaaccaguucaacagcgccaucggcaagauccaggacagccugagcagcacagcaagcgcccugggaaagcugcaggacguggucaaccagaaugcccaggcacugaacacccuggucaagcagcuguccuccaacuucggcgccaucagcucugugcugaacgauauccugagcagacuggacaaggucgaggccgaggugcagaucgacagacugaucacaggcagacugcagagccuccagacauacgugacccagcagcugaucagagccgccgagauuagagccucugccaaucuggccgccaccaagaugucugagugugugcugggccagagcaagagaguggacuuuugcggcaagggcuaccaccugaugagcuucccucagucugccccucacggcgugguguuucugcacgugacauaugugcccgcucaagagaagaauuucaccaccgcuccagccaucugccacgacggcaaagcccacuuuccuagagaaggcguguucguguccaacggcacccauugguucgugacacagcggaacuucuacgagccccagaucaucaccaccgacaacaccuucgugucuggcaacugcgacguugugaucggcauugugaacaauaccguguacgacccucugcagcccgagcuggacagcuucaaagaggaacuggacaaguacuuuaagaaccacacaagccccgacguggaccugggcgauaucagcggaaucaaugccagcgucgugaacauccagaaagagaucgaccggcugaacgagguggccaagaaucugaacgagagccugaucgaccugcaagaacuggggaaguacgagcaguacaucaaguggcccugguacaucuggcugggcuuuaucgccggacugauugccaucgugauggucacaaucaugcuguguugcaugaccagcugcuguagcugccugaagggcuguuguagcuguggcagcugcugcaaguucgacgaggacgauucugagcccgugcugaagggcgugaaacugcacuacaccugaggacuaguuauaagacugacuagcccgaugggccucccaacgggcccuccuccccuccuugcaccgagauuaaucaaaggcucuuuucagagccaccaaaaaaaaaaaaaaaaaaaaaaaaaaaaaaaaaaaaaaaaaaaaaaaaaaaaaaaaaaaaaaaaaaaaaaaaaaaaaaaaaaaaaaaaaaaaaaaaaaaaa

SEQ ID NO: 24148 - RNA, 4035 nt, Artificial Sequence
  SARS-CoV-2/Wuhan/WIV05/2019__EPI_ISL_402128 spike protein mRNA gc mod (1-1273)(Y453F_D614G)
aggagaaagcuuaccauguucguguuucuggugcugcugccccugguguccagccagugugugaaccugaccaccagaacacagcugccuccagccuacaccaacagcuucaccagaggcguguacuaccccgacaagguguucagauccagcgugcugcacucuacccaggaccuguuccugccuuucuucagcaacgugaccugguuccacgccauccacguguccggcaccaauggcaccaagagauucgacaaccccgugcugcccuucaacgacgggguguacuuugccagcaccgagaaguccaacaucaucagaggcuggaucuucggcaccacacuggacagcaagacccagagccugcugaucgugaacaacgccaccaacguggucaucaaagugugcgaguuccaguucugcaacgaccccuuccugggcgucuacuaccacaagaacaacaagagcuggauggaaagcgaguuccggguguacagcagcgccaacaacugcaccuucgaguacgugucccagccuuuccugauggaccuggaaggcaagcagggcaacuucaagaaccugcgcgaguucguguucaagaacaucgacggcuacuucaaaaucuacagcaagcacaccccuaucaaccucgugcgggaucugccucagggcuucucugcucuggaaccccugguggaucugcccaucggcaucaacaucacccgguuucagacacugcuggcccugcacagaagcuaccugacaccuggcgauagcagcagcggauggacagcuggugccgccgcuuacuaugugggcuaccugcagccuagaaccuuccugcugaaguacaacgagaacggcaccaucaccgacgccguggauugugcucuggauccucugagcgagacaaagugcacccugaaguccuucaccguggaaaagggcaucuaccagaccagcaacuuccgggugcagcccaccgaauccaucgugcgguuccccaauaucaccaaucugugccccuucggcgagguguucaaugccaccagauucgccucuguguacgccuggaaccggaagcggaucagcaauugcguggccgacuacuccgugcuguacaacuccgccagcuucagcaccuucaagugcuacggcguguccccuaccaagcugaacgaccugugcuucacaaacguguacgccgacagcuucgugauccggggagaugaagugcggcagauugccccuggacagacaggcaagaucgccgacuacaacuacaagcugcccgacgacuucaccggcugugugauugccuggaacagcaacaaccuggacuccaaagucggcggcaacuacaauuaccuguuccggcuguuccggaaguccaaucugaagcccuucgagcgggacaucagcaccgaaaucuaucaggccggcagcaccccuugcaacggcguggaaggcuucaacugcuacuucccacugcaguccuacggcuuucagcccacaaauggcgugggcuaucagcccuacagagugguggugcugagcuucgaacugcugcaugcuccugccacagugugcggcccuaagaaaagcaccaaucucgugaagaacaaaugcgugaacuucaacuucaacggccugaccggcaccggcgugcugacagagagcaacaagaaguuccugccauuccagcaguuuggccgggauaucgccgauaccacagacgccguuagagauccccagacacuggaaauccuggacaucaccccaugcagcuucggcggagugucugugaucaccccuggcaccaacaccagcaaucagguggcagugcuguaccagggcgugaacuguaccgaagugcccguggccauucacgccgaucagcugacaccuacauggcggguguacuccaccggcagcaauguguuucagaccagagccggcugucugaucggagccgagcacgugaacaauagcuacgagugcgacauccccaucggcgcuggcaucugugccagcuaccagacacagacaaacagccccagacgggcuagaagcguggccagccagagcaucauugccuacacaaugucucugggcgccgagaacagcguggccuacuccaacaacucuaucgcuauccccaccaacuucaccaucagcgugaccaccgagauccugccuguguccaugaccaagaccagcguggacugcaccauguacaucugcggcgauuccaccgagugcuccaaccugcugcugcaguacggcagcuucugcacccagcugaauagagcccugacagggaucgccguggaacaggacaagaacacccaagagguguucgcccaagugaagcaaaucuacaagaccccuccuaucaaggacuucggcggcuucaauuucagccagauucugcccgauccuagcaagcccagcaagcggagcuucaucgaggaccugcuguucaacaaagugacacuggccgacgccggcuucaucaagcaguauggcgauugucugggcgacauugccgccagggaucugauuugcgcccagaaguuuaacggacugacagugcugccuccucugcugaccgaugagaugaucgcccaguacacaucugcccugcuggccggcacaaucacaagcggcuggacauuuggagcuggcgccgcucugcagauccccuuugcuaugcagauggccuaccgguucaacggcaucggagugacccagaaugugcuguacgagaaccagaagcugaucgccaaccaguucaacagcgccaucggcaagauccaggacagccugagcagcacagcaagcgcccugggaaagcugcaggacguggucaaccagaaugcccaggcacugaacacccuggucaagcagcuguccuccaacuucggcgccaucagcucugugcugaacgauauccugagcagacuggacaaggucgaggccgaggugcagaucgacagacugaucacaggcagacugcagagccuccagacauacgugacccagcagcugaucagagccgccgagauuagagccucugccaaucuggccgccaccaagaugucugagugugugcugggccagagcaagagaguggacuuuugcggcaagggcuaccaccugaugagcuucccucagucugccccucacggcgugguguuucugcacgugacauaugugcccgcucaagagaagaauuucaccaccgcuccagccaucugccacgacggcaaagcccacuuuccuagagaaggcguguucguguccaacggcacccauugguucgugacacagcggaacuucuacgagccccagaucaucaccaccgacaacaccuucgugucuggcaacugcgacguugugaucggcauugugaacaauaccguguacgacccucugcagcccgagcuggacagcuucaaagaggaacuggacaaguacuuuaagaaccacacaagccccgacguggaccugggcgauaucagcggaaucaaugccagcgucgugaacauccagaaagagaucgaccggcugaacgagguggccaagaaucugaacgagagccugaucgaccugcaagaacuggggaaguacgagcaguacaucaaguggcccugguacaucuggcugggcuuuaucgccggacugauugccaucgugauggucacaaucaugcuguguugcaugaccagcugcuguagcugccugaagggcuguuguagcuguggcagcugcugcaaguucgacgaggacgauucugagcccgugcugaagggcgugaaacugcacuacaccugaggacuaguuauaagacugacuagcccgaugggccucccaacgggcccuccuccccuccuugcaccgagauuaaucaaaggcucuuuucagagccaccaaaaaaaaaaaaaaaaaaaaaaaaaaaaaaaaaaaaaaaaaaaaaaaaaaaaaaaaaaaaaaaaaaaaaaaaaaaaaaaaaaaaaaaaaaaaaaaaaaaaa

SEQ ID NO: 24149 - RNA, 4035 nt, Artificial Sequence
  SARS-CoV-2/Wuhan/WIV05/2019__EPI_ISL_402128 spike protein mRNA gc mod (1-1273)(D614G_I692V)
aggagaaagcuuaccauguucguguuucuggugcugcugccccugguguccagccagugugugaaccugaccaccagaacacagcugccuccagccuacaccaacagcuucaccagaggcguguacuaccccgacaagguguucagauccagcgugcugcacucuacccaggaccuguuccugccuuucuucagcaacgugaccugguuccacgccauccacguguccggcaccaauggcaccaagagauucgacaaccccgugcugcccuucaacgacgggguguacuuugccagcaccgagaaguccaacaucaucagaggcuggaucuucggcaccacacuggacagcaagacccagagccugcugaucgugaacaacgccaccaacguggucaucaaagugugcgaguuccaguucugcaacgaccccuuccugggcgucuacuaccacaagaacaacaagagcuggauggaaagcgaguuccggguguacagcagcgccaacaacugcaccuucgaguacgugucccagccuuuccugauggaccuggaaggcaagcagggcaacuucaagaaccugcgcgaguucguguucaagaacaucgacggcuacuucaaaaucuacagcaagcacaccccuaucaaccucgugcgggaucugccucagggcuucucugcucuggaaccccugguggaucugcccaucggcaucaacaucacccgguuucagacacugcuggcccugcacagaagcuaccugacaccuggcgauagcagcagcggauggacagcuggugccgccgcuuacuaugugggcuaccugcagccuagaaccuuccugcugaaguacaacgagaacggcaccaucaccgacgccguggauugugcucuggauccucugagcgagacaaagugcacccugaaguccuucaccguggaaaagggcaucuaccagaccagcaacuuccgggugcagcccaccgaauccaucgugcgguuccccaauaucaccaaucugugccccuucggcgagguguucaaugccaccagauucgccucuguguacgccuggaaccggaagcggaucagcaauugcguggccgacuacuccgugcuguacaacuccgccagcuucagcaccuucaagugcuacggcguguccccuaccaagcugaacgaccugugcuucacaaacguguacgccgacagcuucgugauccggggagaugaagugcggcagauugccccuggacagacaggcaagaucgccgacuacaacuacaagcugcccgacgacuucaccggcugugugauugccuggaacagcaacaaccuggacuccaaagucggcggcaacuacaauuaccuguaccggcuguuccggaaguccaaucugaagcccuucgagcgggacaucagcaccgaaaucuaucaggccggcagcaccccuugcaacggcguggaaggcuucaacugcuacuucccacugcaguccuacggcuuucagcccacaaauggcgugggcuaucagcccuacagagugguggugcugagcuucgaacugcugcaugcuccugccacagugugcggcccuaagaaaagcaccaaucucgugaagaacaaaugcgugaacuucaacuucaacggccugaccggcaccggcgugcugacagagagcaacaagaaguuccugccauuccagcaguuuggccgggauaucgccgauaccacagacgccguuagagauccccagacacuggaaauccuggacaucaccccaugcagcuucggcggagugucugugaucaccccuggcaccaacaccagcaaucagguggcagugcuguaccagggcgugaacuguaccgaagugcccguggccauucacgccgaucagcugacaccuacauggcggguguacuccaccggcagcaauguguuucagaccagagccggcugucugaucggagccgagcacgugaacaauagcuacgagugcgacauccccaucggcgcuggcaucugugccagcuaccagacacagacaaacagccccagacgggcuagaagcguggccagccagagcgugauugccuacacaaugucucugggcgccgagaacagcguggccuacuccaacaacucuaucgcuauccccaccaacuucaccaucagcgugaccaccgagauccugccuguguccaugaccaagaccagcguggacugcaccauguacaucugcggcgauuccaccgagugcuccaaccugcugcugcaguacggcagcuucugcacccagcugaauagagcccugacagggaucgccguggaacaggacaagaacacccaagagguguucgcccaagugaagcaaaucuacaagaccccuccuaucaaggacuucggcggcuucaauuucagccagauucugcccgauccuagcaagcccagcaagcggagcuucaucgaggaccugcuguucaacaaagugacacuggccgacgccggcuucaucaagcaguauggcgauugucugggcgacauugccgccagggaucugauuugcgcccagaaguuuaacggacugacagugcugccuccucugcugaccgaugagaugaucgcccaguacacaucugcccugcuggccggcacaaucacaagcggcuggacauuuggagcuggcgccgcucugcagauccccuuugcuaugcagauggccuaccgguucaacggcaucggagugacccagaaugugcuguacgagaaccagaagcugaucgccaaccaguucaacagcgccaucggcaagauccaggacagccugagcagcacagcaagcgcccugggaaagcugcaggacguggucaaccagaaugcccaggcacugaacacccuggucaagcagcuguccuccaacuucggcgccaucagcucugugcugaacgauauccugagcagacuggacaaggucgaggccgaggugcagaucgacagacugaucacaggcagacugcagagccuccagacauacgugacccagcagcugaucagagccgccgagauuagagccucugccaaucuggccgccaccaagaugucugagugugugcugggccagagcaagagaguggacuuuugcggcaagggcuaccaccugaugagcuucccucagucugccccucacggcgugguguuucugcacgugacauaugugcccgcucaagagaagaauuucaccaccgcuccagccaucugccacgacggcaaagcccacuuuccuagagaaggcguguucguguccaacggcacccauugguucgugacacagcggaacuucuacgagccccagaucaucaccaccgacaacaccuucgugucuggcaacugcgacguugugaucggcauugugaacaauaccguguacgacccucugcagcccgagcuggacagcuucaaagaggaacuggacaaguacuuuaagaaccacacaagccccgacguggaccugggcgauaucagcggaaucaaugccagcgucgugaacauccagaaagagaucgaccggcugaacgagguggccaagaaucugaacgagagccugaucgaccugcaagaacuggggaaguacgagcaguacaucaaguggcccugguacaucuggcugggcuuuaucgccggacugauugccaucgugauggucacaaucaugcuguguugcaugaccagcugcuguagcugccugaagggcuguuguagcuguggcagcugcugcaaguucgacgaggacgauucugagcccgugcugaagggcgugaaacugcacuacaccugaggacuaguuauaagacugacuagcccgaugggccucccaacgggcccuccuccccuccuugcaccgagauuaaucaaaggcucuuuucagagccaccaaaaaaaaaaaaaaaaaaaaaaaaaaaaaaaaaaaaaaaaaaaaaaaaaaaaaaaaaaaaaaaaaaaaaaaaaaaaaaaaaaaaaaaaaaaaaaaaaaaaa

SEQ ID NO: 24150 - RNA, 4035 nt, Artificial Sequence
  SARS-CoV-2/Wuhan/WIV05/2019__EPI_ISL_402128 spike protein mRNA gc mod (1-1273)(D614G_M1229I)
aggagaaagcuuaccauguucguguuucuggugcugcugccccugguguccagccagugugugaaccugaccaccagaacacagcugccuccagccuacaccaacagcuucaccagaggcguguacuaccccgacaagguguucagauccagcgugcugcacucuacccaggaccuguuccugccuuucuucagcaacgugaccugguuccacgccauccacguguccggcaccaauggcaccaagagauucgacaaccccgugcugcccuucaacgacgggguguacuuugccagcaccgagaaguccaacaucaucagaggcuggaucuucggcaccacacuggacagcaagacccagagccugcugaucgugaacaacgccaccaacguggucaucaaagugugcgaguuccaguucugcaacgaccccuuccugggcgucuacuaccacaagaacaacaagagcuggauggaaagcgaguuccggguguacagcagcgccaacaacugcaccuucgaguacgugucccagccuuuccugauggaccuggaaggcaagcagggcaacuucaagaaccugcgcgaguucguguucaagaacaucgacggcuacuucaaaaucuacagcaagcacaccccuaucaaccucgugcgggaucugccucagggcuucucugcucuggaaccccugguggaucugcccaucggcaucaacaucacccgguuucagacacugcuggcccugcacagaagcuaccugacaccuggcgauagcagcagcggauggacagcuggugccgccgcuuacuaugugggcuaccugcagccuagaaccuuccugcugaaguacaacgagaacggcaccaucaccgacgccguggauugugcucuggauccucugagcgagacaaagugcacccugaaguccuucaccguggaaaagggcaucuaccagaccagcaacuuccgggugcagcccaccgaauccaucgugcgguuccccaauaucaccaaucugugccccuucggcgagguguucaaugccaccagauucgccucuguguacgccuggaaccggaagcggaucagcaauugcguggccgacuacuccgugcuguacaacuccgccagcuucagcaccuucaagugcuacggcguguccccuaccaagcugaacgaccugugcuucacaaacguguacgccgacagcuucgugauccggggagaugaagugcggcagauugccccuggacagacaggcaagaucgccgacuacaacuacaagcugcccgacgacuucaccggcugugugauugccuggaacagcaacaaccuggacuccaaagucggcggcaacuacaauuaccuguaccggcuguuccggaaguccaaucugaagcccuucgagcgggacaucagcaccgaaaucuaucaggccggcagcaccccuugcaacggcguggaaggcuucaacugcuacuucccacugcaguccuacggcuuucagcccacaaauggcgugggcuaucagcccuacagagugguggugcugagcuucgaacugcugcaugcuccugccacagugugcggcccuaagaaaagcaccaaucucgugaagaacaaaugcgugaacuucaacuucaacggccugaccggcaccggcgugcugacagagagcaacaagaaguuccugccauuccagcaguuuggccgggauaucgccgauaccacagacgccguuagagauccccagacacuggaaauccuggacaucaccccaugcagcuucggcggagugucugugaucaccccuggcaccaacaccagcaaucagguggcagugcuguaccagggcgugaacuguaccgaagugcccguggccauucacgccgaucagcugacaccuacauggcggguguacuccaccggcagcaauguguuucagaccagagccggcugucugaucggagccgagcacgugaacaauagcuacgagugcgacauccccaucggcgcuggcaucugugccagcuaccagacacagacaaacagccccagacgggcuagaagcguggccagccagagcaucauugccuacacaaugucucugggcgccgagaacagcguggccuacuccaacaacucuaucgcuauccccaccaacuucaccaucagcgugaccaccgagauccugccuguguccaugaccaagaccagcguggacugcaccauguacaucugcggcgauuccaccgagugcuccaaccugcugcugcaguacggcagcuucugcacccagcugaauagagcccugacagggaucgccguggaacaggacaagaacacccaagagguguucgcccaagugaagcaaaucuacaagaccccuccuaucaaggacuucggcggcuucaauuucagccagauucugcccgauccuagcaagcccagcaagcggagcuucaucgaggaccugcuguucaacaaagugacacuggccgacgccggcuucaucaagcaguauggcgauugucugggcgacauugccgccagggaucugauuugcgcccagaaguuuaacggacugacagugcugccuccucugcugaccgaugagaugaucgcccaguacacaucugcccugcuggccggcacaaucacaagcggcuggacauuuggagcuggcgccgcucugcagauccccuuugcuaugcagauggccuaccgguucaacggcaucggagugacccagaaugugcuguacgagaaccagaagcugaucgccaaccaguucaacagcgccaucggcaagauccaggacagccugagcagcacagcaagcgcccugggaaagcugcaggacguggucaaccagaaugcccaggcacugaacacccuggucaagcagcuguccuccaacuucggcgccaucagcucugugcugaacgauauccugagcagacuggacaaggucgaggccgaggugcagaucgacagacugaucacaggcagacugcagagccuccagacauacgugacccagcagcugaucagagccgccgagauuagagccucugccaaucuggccgccaccaagaugucugagugugugcugggccagagcaagagaguggacuuuugcggcaagggcuaccaccugaugagcuucccucagucugccccucacggcgugguguuucugcacgugacauaugugcccgcucaagagaagaauuucaccaccgcuccagccaucugccacgacggcaaagcccacuuuccuagagaaggcguguucguguccaacggcacccauugguucgugacacagcggaacuucuacgagccccagaucaucaccaccgacaacaccuucgugucuggcaacugcgacguugugaucggcauugugaacaauaccguguacgacccucugcagcccgagcuggacagcuucaaagaggaacuggacaaguacuuuaagaaccacacaagccccgacguggaccugggcgauaucagcggaaucaaugccagcgucgugaacauccagaaagagaucgaccggcugaacgagguggccaagaaucugaacgagagccugaucgaccugcaagaacuggggaaguacgagcaguacaucaaguggcccugguacaucuggcugggcuuuaucgccggacugauugccaucgugaucgucacaaucaugcuguguugcaugaccagcugcuguagcugccugaagggcuguuguagcuguggcagcugcugcaaguucgacgaggacgauucugagcccgugcugaagggcgugaaacugcacuacaccugaggacuaguuauaagacugacuagcccgaugggccucccaacgggcccuccuccccuccuugcaccgagauuaaucaaaggcucuuuucagagccaccaaaaaaaaaaaaaaaaaaaaaaaaaaaaaaaaaaaaaaaaaaaaaaaaaaaaaaaaaaaaaaaaaaaaaaaaaaaaaaaaaaaaaaaaaaaaaaaaaaaaa

SEQ ID NO: 24151 - RNA, 4029 nt, Artificial Sequence
  SARS-CoV-2/Wuhan/WIV05/2019__EPI_ISL_402128 spike protein mRNA gc mod (1-1273)(H69del_V70del_A222V_Y453F_S477N_D614G_I692V)
aggagaaagcuuaccauguucguguuucuggugcugcugccccugguguccagccagugugugaaccugaccaccagaacacagcugccuccagccuacaccaacagcuucaccagaggcguguacuaccccgacaagguguucagauccagcgugcugcacucuacccaggaccuguuccugccuuucuucagcaacgugaccugguuccacgccaucuccggcaccaauggcaccaagagauucgacaaccccgugcugcccuucaacgacgggguguacuuugccagcaccgagaaguccaacaucaucagaggcuggaucuucggcaccacacuggacagcaagacccagagccugcugaucgugaacaacgccaccaacguggucaucaaagugugcgaguuccaguucugcaacgaccccuuccugggcgucuacuaccacaagaacaacaagagcuggauggaaagcgaguuccggguguacagcagcgccaacaacugcaccuucgaguacgugucccagccuuuccugauggaccuggaaggcaagcagggcaacuucaagaaccugcgcgaguucguguucaagaacaucgacggcuacuucaaaaucuacagcaagcacaccccuaucaaccucgugcgggaucugccucagggcuucucugugcuggaaccccugguggaucugcccaucggcaucaacaucacccgguuucagacacugcuggcccugcacagaagcuaccugacaccuggcgauagcagcagcggauggacagcuggugccgccgcuuacuaugugggcuaccugcagccuagaaccuuccugcugaaguacaacgagaacggcaccaucaccgacgccguggauugugcucuggauccucugagcgagacaaagugcacccugaaguccuucaccguggaaaagggcaucuaccagaccagcaacuuccgggugcagcccaccgaauccaucgugcgguuccccaauaucaccaaucugugccccuucggcgagguguucaaugccaccagauucgccucuguguacgccuggaaccggaagcggaucagcaauugcguggccgacuacuccgugcuguacaacuccgccagcuucagcaccuucaagugcuacggcguguccccuaccaagcugaacgaccugugcuucacaaacguguacgccgacagcuucgugauccggggagaugaagugcggcagauugccccuggacagacaggcaagaucgccgacuacaacuacaagcugcccgacgacuucaccggcugugugauugccuggaacagcaacaaccuggacuccaaagucggcggcaacuacaauuaccuguuccggcuguuccggaaguccaaucugaagcccuucgagcgggacaucagcaccgaaaucuaucaggccggcaacaccccuugcaacggcguggaaggcuucaacugcuacuucccacugcaguccuacggcuuucagcccacaaauggcgugggcuaucagcccuacagagugguggugcugagcuucgaacugcugcaugcuccugccacagugugcggcccuaagaaaagcaccaaucucgugaagaacaaaugcgugaacuucaacuucaacggccugaccggcaccggcgugcugacagagagcaacaagaaguuccugccauuccagcaguuuggccgggauaucgccgauaccacagacgccguuagagauccccagacacuggaaauccuggacaucaccccaugcagcuucggcggagugucugugaucaccccuggcaccaacaccagcaaucagguggcagugcuguaccagggcgugaacuguaccgaagugcccguggccauucacgccgaucagcugacaccuacauggcggguguacuccaccggcagcaauguguuucagaccagagccggcugucugaucggagccgagcacgugaacaauagcuacgagugcgacauccccaucggcgcuggcaucugugccagcuaccagacacagacaaacagccccagacgggcuagaagcguggccagccagagcgugauugccuacacaaugucucugggcgccgagaacagcguggccuacuccaacaacucuaucgcuauccccaccaacuucaccaucagcgugaccaccgagauccugccuguguccaugaccaagaccagcguggacugcaccauguacaucugcggcgauuccaccgagugcuccaaccugcugcugcaguacggcagcuucugcacccagcugaauagagcccugacagggaucgccguggaacaggacaagaacacccaagagguguucgcccaagugaagcaaaucuacaagaccccuccuaucaaggacuucggcggcuucaauuucagccagauucugcccgauccuagcaagcccagcaagcggagcuucaucgaggaccugcuguucaacaaagugacacuggccgacgccggcuucaucaagcaguauggcgauugucugggcgacauugccgccagggaucugauuugcgcccagaaguuuaacggacugacagugcugccuccucugcugaccgaugagaugaucgcccaguacacaucugcccugcuggccggcacaaucacaagcggcuggacauuuggagcuggcgccgcucugcagauccccuuugcuaugcagauggccuaccgguucaacggcaucggagugacccagaaugugcuguacgagaaccagaagcugaucgccaaccaguucaacagcgccaucggcaagauccaggacagccugagcagcacagcaagcgcccugggaaagcugcaggacguggucaaccagaaugcccaggcacugaacacccuggucaagcagcuguccuccaacuucggcgccaucagcucugugcugaacgauauccugagcagacuggacaaggucgaggccgaggugcagaucgacagacugaucacaggcagacugcagagccuccagacauacgugacccagcagcugaucagagccgccgagauuagagccucugccaaucuggccgccaccaagaugucugagugugugcugggccagagcaagagaguggacuuuugcggcaagggcuaccaccugaugagcuucccucagucugccccucacggcgugguguuucugcacgugacauaugugcccgcucaagagaagaauuucaccaccgcuccagccaucugccacgacggcaaagcccacuuuccuagagaaggcguguucguguccaacggcacccauugguucgugacacagcggaacuucuacgagccccagaucaucaccaccgacaacaccuucgugucuggcaacugcgacguugugaucggcauugugaacaauaccguguacgacccucugcagcccgagcuggacagcuucaaagaggaacuggacaaguacuuuaagaaccacacaagccccgacguggaccugggcgauaucagcggaaucaaugccagcgucgugaacauccagaaagagaucgaccggcugaacgagguggccaagaaucugaacgagagccugaucgaccugcaagaacuggggaaguacgagcaguacaucaaguggcccugguacaucuggcugggcuuuaucgccggacugauugccaucgugauggucacaaucaugcuguguugcaugaccagcugcuguagcugccugaagggcuguuguagcuguggcagcugcugcaaguucgacgaggacgauucugagcccgugcugaagggcgugaaacugcacuacaccugaggacuaguuauaagacugacuagcccgaugggccucccaacgggcccuccuccccuccuugcaccgagauuaaucaaaggcucuuuucagagccaccaaaaaaaaaaaaaaaaaaaaaaaaaaaaaaaaaaaaaaaaaaaaaaaaaaaaaaaaaaaaaaaaaaaaaaaaaaaaaaaaaaaaaaaaaaaaaaaaaaaaa

SEQ ID NO: 24152 - RNA, 4029 nt, Artificial Sequence
  SARS-CoV-2/Wuhan/WIV05/2019__EPI_ISL_402128 spike protein mRNA gc mod (1-1273)(H69del_V70del_Y453F_D614G_I692V_M1229I)
aggagaaagcuuaccauguucguguuucuggugcugcugccccugguguccagccagugugugaaccugaccaccagaacacagcugccuccagccuacaccaacagcuucaccagaggcguguacuaccccgacaagguguucagauccagcgugcugcacucuacccaggaccuguuccugccuuucuucagcaacgugaccugguuccacgccaucuccggcaccaauggcaccaagagauucgacaaccccgugcugcccuucaacgacgggguguacuuugccagcaccgagaaguccaacaucaucagaggcuggaucuucggcaccacacuggacagcaagacccagagccugcugaucgugaacaacgccaccaacguggucaucaaagugugcgaguuccaguucugcaacgaccccuuccugggcgucuacuaccacaagaacaacaagagcuggauggaaagcgaguuccggguguacagcagcgccaacaacugcaccuucgaguacgugucccagccuuuccugauggaccuggaaggcaagcagggcaacuucaagaaccugcgcgaguucguguucaagaacaucgacggcuacuucaaaaucuacagcaagcacaccccuaucaaccucgugcgggaucugccucagggcuucucugcucuggaaccccugguggaucugcccaucggcaucaacaucacccgguuucagacacugcuggcccugcacagaagcuaccugacaccuggcgauagcagcagcggauggacagcuggugccgccgcuuacuaugugggcuaccugcagccuagaaccuuccugcugaaguacaacgagaacggcaccaucaccgacgccguggauugugcucuggauccucugagcgagacaaagugcacccugaaguccuucaccguggaaaagggcaucuaccagaccagcaacuuccgggugcagcccaccgaauccaucgugcgguuccccaauaucaccaaucugugccccuucggcgagguguucaaugccaccagauucgccucuguguacgccuggaaccggaagcggaucagcaauugcguggccgacuacuccgugcuguacaacuccgccagcuucagcaccuucaagugcuacggcguguccccuaccaagcugaacgaccugugcuucacaaacguguacgccgacagcuucgugauccggggagaugaagugcggcagauugccccuggacagacaggcaagaucgccgacuacaacuacaagcugcccgacgacuucaccggcugugugauugccuggaacagcaacaaccuggacuccaaagucggcggcaacuacaauuaccuguuccggcuguuccggaaguccaaucugaagcccuucgagcgggacaucagcaccgaaaucuaucaggccggcagcaccccuugcaacggcguggaaggcuucaacugcuacuucccacugcaguccuacggcuuucagcccacaaauggcgugggcuaucagcccuacagagugguggugcugagcuucgaacugcugcaugcuccugccacagugugcggcccuaagaaaagcaccaaucucgugaagaacaaaugcgugaacuucaacuucaacggccugaccggcaccggcgugcugacagagagcaacaagaaguuccugccauuccagcaguuuggccgggauaucgccgauaccacagacgccguuagagauccccagacacuggaaauccuggacaucaccccaugcagcuucggcggagugucugugaucaccccuggcaccaacaccagcaaucagguggcagugcuguaccagggcgugaacuguaccgaagugcccguggccauucacgccgaucagcugacaccuacauggcggguguacuccaccggcagcaauguguuucagaccagagccggcugucugaucggagccgagcacgugaacaauagcuacgagugcgacauccccaucggcgcuggcaucugugccagcuaccagacacagacaaacagccccagacgggcuagaagcguggccagccagagcgugauugccuacacaaugucucugggcgccgagaacagcguggccuacuccaacaacucuaucgcuauccccaccaacuucaccaucagcgugaccaccgagauccugccuguguccaugaccaagaccagcguggacugcaccauguacaucugcggcgauuccaccgagugcuccaaccugcugcugcaguacggcagcuucugcacccagcugaauagagcccugacagggaucgccguggaacaggacaagaacacccaagagguguucgcccaagugaagcaaaucuacaagaccccuccuaucaaggacuucggcggcuucaauuucagccagauucugcccgauccuagcaagcccagcaagcggagcuucaucgaggaccugcuguucaacaaagugacacuggccgacgccggcuucaucaagcaguauggcgauugucugggcgacauugccgccagggaucugauuugcgcccagaaguuuaacggacugacagugcugccuccucugcugaccgaugagaugaucgcccaguacacaucugcccugcuggccggcacaaucacaagcggcuggacauuuggagcuggcgccgcucugcagauccccuuugcuaugcagauggccuaccgguucaacggcaucggagugacccagaaugugcuguacgagaaccagaagcugaucgccaaccaguucaacagcgccaucggcaagauccaggacagccugagcagcacagcaagcgcccugggaaagcugcaggacguggucaaccagaaugcccaggcacugaacacccuggucaagcagcuguccuccaacuucggcgccaucagcucugugcugaacgauauccugagcagacuggacaaggucgaggccgaggugcagaucgacagacugaucacaggcagacugcagagccuccagacauacgugacccagcagcugaucagagccgccgagauuagagccucugccaaucuggccgccaccaagaugucugagugugugcugggccagagcaagagaguggacuuuugcggcaagggcuaccaccugaugagcuucccucagucugccccucacggcgugguguuucugcacgugacauaugugcccgcucaagagaagaauuucaccaccgcuccagccaucugccacgacggcaaagcccacuuuccuagagaaggcguguucguguccaacggcacccauugguucgugacacagcggaacuucuacgagccccagaucaucaccaccgacaacaccuucgugucuggcaacugcgacguugugaucggcauugugaacaauaccguguacgacccucugcagcccgagcuggacagcuucaaagaggaacuggacaaguacuuuaagaaccacacaagccccgacguggaccugggcgauaucagcggaaucaaugccagcgucgugaacauccagaaagagaucgaccggcugaacgagguggccaagaaucugaacgagagccugaucgaccugcaagaacuggggaaguacgagcaguacaucaaguggcccugguacaucuggcugggcuuuaucgccggacugauugccaucgugaucgucacaaucaugcuguguugcaugaccagcugcuguagcugccugaagggcuguuguagcuguggcagcugcugcaaguucgacgaggacgauucugagcccgugcugaagggcgugaaacugcacuacaccugaggacuaguuauaagacugacuagcccgaugggccucccaacgggcccuccuccccuccuugcaccgagauuaaucaaaggcucuuuucagagccaccaaaaaaaaaaaaaaaaaaaaaaaaaaaaaaaaaaaaaaaaaaaaaaaaaaaaaaaaaaaaaaaaaaaaaaaaaaaaaaaaaaaaaaaaaaaaaaaaaaaaa

SEQ ID NO: 24153 - RNA, 4026 nt, Artificial Sequence
  SARS-CoV-2/Wuhan/WIV05/2019__EPI_ISL_402128 spike protein mRNA gc mod (1-1273)(H69del_V70del_Y144del_N501Y_A570D_D614G_P681H_T716I_S982 A_D1118H)
aggagaaagcuuaccauguucguguuucuggugcugcugccccugguguccagccagugugugaaccugaccaccagaacacagcugccuccagccuacaccaacagcuucaccagaggcguguacuaccccgacaagguguucagauccagcgugcugcacucuacccaggaccuguuccugccuuucuucagcaacgugaccugguuccacgccaucuccggcaccaauggcaccaagagauucgacaaccccgugcugcccuucaacgacgggguguacuuugccagcaccgagaaguccaacaucaucagaggcuggaucuucggcaccacacuggacagcaagacccagagccugcugaucgugaacaacgccaccaacguggucaucaaagugugcgaguuccaguucugcaacgaccccuuccugggcgucuaccacaagaacaacaagagcuggauggaaagcgaguuccggguguacagcagcgccaacaacugcaccuucgaguacgugucccagccuuuccugauggaccuggaaggcaagcagggcaacuucaagaaccugcgcgaguucguguucaagaacaucgacggcuacuucaaaaucuacagcaagcacaccccuaucaaccucgugcgggaucugccucagggcuucucugcucuggaaccccugguggaucugcccaucggcaucaacaucacccgguuucagacacugcuggcccugcacagaagcuaccugacaccuggcgauagcagcagcggauggacagcuggugccgccgcuuacuaugugggcuaccugcagccuagaaccuuccugcugaaguacaacgagaacggcaccaucaccgacgccguggauugugcucuggauccucugagcgagacaaagugcacccugaaguccuucaccguggaaaagggcaucuaccagaccagcaacuuccgggugcagcccaccgaauccaucgugcgguuccccaauaucaccaaucugugccccuucggcgagguguucaaugccaccagauucgccucuguguacgccuggaaccggaagcggaucagcaauugcguggccgacuacuccgugcuguacaacuccgccagcuucagcaccuucaagugcuacggcguguccccuaccaagcugaacgaccugugcuucacaaacguguacgccgacagcuucgugauccggggagaugaagugcggcagauugccccuggacagacaggcaagaucgccgacuacaacuacaagcugcccgacgacuucaccggcugugugauugccuggaacagcaacaaccuggacuccaaagucggcggcaacuacaauuaccuguaccggcuguuccggaaguccaaucugaagcccuucgagcgggacaucagcaccgaaaucuaucaggccggcagcaccccuugcaacggcguggaaggcuucaacugcuacuucccacugcaguccuacggcuuucagcccacauacggcgugggcuaucagcccuacagagugguggugcugagcuucgaacugcugcaugcuccugccacagugugcggcccuaagaaaagcaccaaucucgugaagaacaaaugcgugaacuucaacuucaacggccugaccggcaccggcgugcugacagagagcaacaagaaguuccugccauuccagcaguuuggccgggauaucgacgauaccacagacgccguuagagauccccagacacuggaaauccuggacaucaccccaugcagcuucggcggagugucugugaucaccccuggcaccaacaccagcaaucagguggcagugcuguaccagggcgugaacuguaccgaagugcccguggccauucacgccgaucagcugacaccuacauggcggguguacuccaccggcagcaauguguuucagaccagagccggcugucugaucggagccgagcacgugaacaauagcuacgagugcgacauccccaucggcgcuggcaucugugccagcuaccagacacagacaaacagccacagacgggcuagaagcguggccagccagagcaucauugccuacacaaugucucugggcgccgagaacagcguggccuacuccaacaacucuaucgcuauccccaucaacuucaccaucagcgugaccaccgagauccugccuguguccaugaccaagaccagcguggacugcaccauguacaucugcggcgauuccaccgagugcuccaaccugcugcugcaguacggcagcuucugcacccagcugaauagagcccugacagggaucgccguggaacaggacaagaacacccaagagguguucgcccaagugaagcaaaucuacaagaccccuccuaucaaggacuucggcggcuucaauuucagccagauucugcccgauccuagcaagcccagcaagcggagcuucaucgaggaccugcuguucaacaaagugacacuggccgacgccggcuucaucaagcaguauggcgauugucugggcgacauugccgccagggaucugauuugcgcccagaaguuuaacggacugacagugcugccuccucugcugaccgaugagaugaucgcccaguacacaucugcccugcuggccggcacaaucacaagcggcuggacauuuggagcuggcgccgcucugcagauccccuuugcuaugcagauggccuaccgguucaacggcaucggagugacccagaaugugcuguacgagaaccagaagcugaucgccaaccaguucaacagcgccaucggcaagauccaggacagccugagcagcacagcaagcgcccugggaaagcugcaggacguggucaaccagaaugcccaggcacugaacacccuggucaagcagcuguccuccaacuucggcgccaucagcucugugcugaacgauauccuggccagacuggacaaggucgaggccgaggugcagaucgacagacugaucacaggcagacugcagagccuccagacauacgugacccagcagcugaucagagccgccgagauuagagccucugccaaucuggccgccaccaagaugucugagugugugcugggccagagcaagagaguggacuuuugcggcaagggcuaccaccugaugagcuucccucagucugccccucacggcgugguguuucugcacgugacauaugugcccgcucaagagaagaauuucaccaccgcuccagccaucugccacgacggcaaagcccacuuuccuagagaaggcguguucguguccaacggcacccauugguucgugacacagcggaacuucuacgagccccagaucaucaccacccacaacaccuucgugucuggcaacugcgacguugugaucggcauugugaacaauaccguguacgacccucugcagcccgagcuggacagcuucaaagaggaacuggacaaguacuuuaagaaccacacaagccccgacguggaccugggcgauaucagcggaaucaaugccagcgucgugaacauccagaaagagaucgaccggcugaacgagguggccaagaaucugaacgagagccugaucgaccugcaagaacuggggaaguacgagcaguacaucaaguggcccugguacaucuggcugggcuuuaucgccggacugauugccaucgugauggucacaaucaugcuguguugcaugaccagcugcuguagcugccugaagggcuguuguagcuguggcagcugcugcaaguucgacgaggacgauucugagcccgugcugaagggcgugaaacugcacuacaccugaggacuaguuauaagacugacuagcccgaugggccucccaacgggcccuccuccccuccuugcaccgagauuaaucaaaggcucuuuucagagccaccaaaaaaaaaaaaaaaaaaaaaaaaaaaaaaaaaaaaaaaaaaaaaaaaaaaaaaaaaaaaaaaaaaaaaaaaaaaaaaaaaaaaaaaaaaaaaaaaaaaaa

SEQ ID NO: 24154 - RNA, 4035 nt, Artificial Sequence
  SARS-CoV-2/Wuhan/WIV05/2019__EPI_ISL_402128 spike protein mRNA gc mod (1-1273)(K417N_E484K_N501Y_D614G)
aggagaaagcuuaccauguucguguuucuggugcugcugccccugguguccagccagugugugaaccugaccaccagaacacagcugccuccagccuacaccaacagcuucaccagaggcguguacuaccccgacaagguguucagauccagcgugcugcacucuacccaggaccuguuccugccuuucuucagcaacgugaccugguuccacgccauccacguguccggcaccaauggcaccaagagauucgacaaccccgugcugcccuucaacgacgggguguacuuugccagcaccgagaaguccaacaucaucagaggcuggaucuucggcaccacacuggacagcaagacccagagccugcugaucgugaacaacgccaccaacguggucaucaaagugugcgaguuccaguucugcaacgaccccuuccugggcgucuacuaccacaagaacaacaagagcuggauggaaagcgaguuccggguguacagcagcgccaacaacugcaccuucgaguacgugucccagccuuuccugauggaccuggaaggcaagcagggcaacuucaagaaccugcgcgaguucguguucaagaacaucgacggcuacuucaaaaucuacagcaagcacaccccuaucaaccucgugcgggaucugccucagggcuucucugcucuggaaccccugguggaucugcccaucggcaucaacaucacccgguuucagacacugcuggcccugcacagaagcuaccugacaccuggcgauagcagcagcggauggacagcuggugccgccgcuuacuaugugggcuaccugcagccuagaaccuuccugcugaaguacaacgagaacggcaccaucaccgacgccguggauugugcucuggauccucugagcgagacaaagugcacccugaaguccuucaccguggaaaagggcaucuaccagaccagcaacuuccgggugcagcccaccgaauccaucgugcgguuccccaauaucaccaaucugugccccuucggcgagguguucaaugccaccagauucgccucuguguacgccuggaaccggaagcggaucagcaauugcguggccgacuacuccgugcuguacaacuccgccagcuucagcaccuucaagugcuacggcguguccccuaccaagcugaacgaccugugcuucacaaacguguacgccgacagcuucgugauccggggagaugaagugcggcagauugccccuggacagacaggcaacaucgccgacuacaacuacaagcugcccgacgacuucaccggcugugugauugccuggaacagcaacaaccuggacuccaaagucggcggcaacuacaauuaccuguaccggcuguuccggaaguccaaucugaagcccuucgagcgggacaucagcaccgaaaucuaucaggccggcagcaccccuugcaacggcgugaagggcuucaacugcuacuucccacugcaguccuacggcuuucagcccacauacggcgugggcuaucagcccuacagagugguggugcugagcuucgaacugcugcaugcuccugccacagugugcggcccuaagaaaagcaccaaucucgugaagaacaaaugcgugaacuucaacuucaacggccugaccggcaccggcgugcugacagagagcaacaagaaguuccugccauuccagcaguuuggccgggauaucgccgauaccacagacgccguuagagauccccagacacuggaaauccuggacaucaccccaugcagcuucggcggagugucugugaucaccccuggcaccaacaccagcaaucagguggcagugcuguaccagggcgugaacuguaccgaagugcccguggccauucacgccgaucagcugacaccuacauggcggguguacuccaccggcagcaauguguuucagaccagagccggcugucugaucggagccgagcacgugaacaauagcuacgagugcgacauccccaucggcgcuggcaucugugccagcuaccagacacagacaaacagccccagacgggcuagaagcguggccagccagagcaucauugccuacacaaugucucugggcgccgagaacagcguggccuacuccaacaacucuaucgcuauccccaccaacuucaccaucagcgugaccaccgagauccugccuguguccaugaccaagaccagcguggacugcaccauguacaucugcggcgauuccaccgagugcuccaaccugcugcugcaguacggcagcuucugcacccagcugaauagagcccugacagggaucgccguggaacaggacaagaacacccaagagguguucgcccaagugaagcaaaucuacaagaccccuccuaucaaggacuucggcggcuucaauuucagccagauucugcccgauccuagcaagcccagcaagcggagcuucaucgaggaccugcuguucaacaaagugacacuggccgacgccggcuucaucaagcaguauggcgauugucugggcgacauugccgccagggaucugauuugcgcccagaaguuuaacggacugacagugcugccuccucugcugaccgaugagaugaucgcccaguacacaucugcccugcuggccggcacaaucacaagcggcuggacauuuggagcuggcgccgcucugcagauccccuuugcuaugcagauggccuaccgguucaacggcaucggagugacccagaaugugcuguacgagaaccagaagcugaucgccaaccaguucaacagcgccaucggcaagauccaggacagccugagcagcacagcaagcgcccugggaaagcugcaggacguggucaaccagaaugcccaggcacugaacacccuggucaagcagcuguccuccaacuucggcgccaucagcucugugcugaacgauauccugagcagacuggacaaggucgaggccgaggugcagaucgacagacugaucacaggcagacugcagagccuccagacauacgugacccagcagcugaucagagccgccgagauuagagccucugccaaucuggccgccaccaagaugucugagugugugcugggccagagcaagagaguggacuuuugcggcaagggcuaccaccugaugagcuucccucagucugccccucacggcgugguguuucugcacgugacauaugugcccgcucaagagaagaauuucaccaccgcuccagccaucugccacgacggcaaagcccacuuuccuagagaaggcguguucguguccaacggcacccauugguucgugacacagcggaacuucuacgagccccagaucaucaccaccgacaacaccuucgugucuggcaacugcgacguugugaucggcauugugaacaauaccguguacgacccucugcagcccgagcuggacagcuucaaagaggaacuggacaaguacuuuaagaaccacacaagccccgacguggaccugggcgauaucagcggaaucaaugccagcgucgugaacauccagaaagagaucgaccggcugaacgagguggccaagaaucugaacgagagccugaucgaccugcaagaacuggggaaguacgagcaguacaucaaguggcccugguacaucuggcugggcuuuaucgccggacugauugccaucgugauggucacaaucaugcuguguugcaugaccagcugcuguagcugccugaagggcuguuguagcuguggcagcugcugcaaguucgacgaggacgauucugagcccgugcugaagggcgugaaacugcacuacaccugaggacuaguuauaagacugacuagcccgaugggccucccaacgggcccuccuccccuccuugcaccgagauuaaucaaaggcucuuuucagagccaccaaaaaaaaaaaaaaaaaaaaaaaaaaaaaaaaaaaaaaaaaaaaaaaaaaaaaaaaaaaaaaaaaaaaaaaaaaaaaaaaaaaaaaaaaaaaaaaaaaaaa

SEQ ID NO: 24155 - RNA, 4026 nt, Artificial Sequence
  SARS-CoV-2/Wuhan/WIV05/2019__EPI_ISL_402128 spike protein mRNA gc mod (1-1273)(L18F_D80A_D215G_L242del_A243del_L244del_R246I_K417N_E484 K_N501Y_D614G_A701V)
aggagaaagcuuaccauguucguguuucuggugcugcugccccugguguccagccagugugugaacuucaccaccagaacacagcugccuccagccuacaccaacagcuucaccagaggcguguacuaccccgacaagguguucagauccagcgugcugcacucuacccaggaccuguuccugccuuucuucagcaacgugaccugguuccacgccauccacguguccggcaccaauggcaccaagagauucgccaaccccgugcugcccuucaacgacgggguguacuuugccagcaccgagaaguccaacaucaucagaggcuggaucuucggcaccacacuggacagcaagacccagagccugcugaucgugaacaacgccaccaacguggucaucaaagugugcgaguuccaguucugcaacgaccccuuccugggcgucuacuaccacaagaacaacaagagcuggauggaaagcgaguuccggguguacagcagcgccaacaacugcaccuucgaguacgugucccagccuuuccugauggaccuggaaggcaagcagggcaacuucaagaaccugcgcgaguucguguucaagaacaucgacggcuacuucaaaaucuacagcaagcacaccccuaucaaccucgugcggggccugccucagggcuucucugcucuggaaccccugguggaucugcccaucggcaucaacaucacccgguuucagacacugcacaucagcuaccugacaccuggcgauagcagcagcggauggacagcuggugccgccgcuuacuaugugggcuaccugcagccuagaaccuuccugcugaaguacaacgagaacggcaccaucaccgacgccguggauugugcucuggauccucugagcgagacaaagugcacccugaaguccuucaccguggaaaagggcaucuaccagaccagcaacuuccgggugcagcccaccgaauccaucgugcgguuccccaauaucaccaaucugugccccuucggcgagguguucaaugccaccagauucgccucuguguacgccuggaaccggaagcggaucagcaauugcguggccgacuacuccgugcuguacaacuccgccagcuucagcaccuucaagugcuacggcguguccccuaccaagcugaacgaccugugcuucacaaacguguacgccgacagcuucgugauccggggagaugaagugcggcagauugccccuggacagacaggcaacaucgccgacuacaacuacaagcugcccgacgacuucaccggcugugugauugccuggaacagcaacaaccuggacuccaaagucggcggcaacuacaauuaccuguaccggcuguuccggaaguccaaucugaagcccuucgagcgggacaucagcaccgaaaucuaucaggccggcagcaccccuugcaacggcgugaagggcuucaacugcuacuucccacugcaguccuacggcuuucagcccacauacggcgugggcuaucagcccuacagagugguggugcugagcuucgaacugcugcaugcuccugccacagugugcggcccuaagaaaagcaccaaucucgugaagaacaaaugcgugaacuucaacuucaacggccugaccggcaccggcgugcugacagagagcaacaagaaguuccugccauuccagcaguuuggccgggauaucgccgauaccacagacgccguuagagauccccagacacuggaaauccuggacaucaccccaugcagcuucggcggagugucugugaucaccccuggcaccaacaccagcaaucagguggcagugcuguaccagggcgugaacuguaccgaagugcccguggccauucacgccgaucagcugacaccuacauggcggguguacuccaccggcagcaauguguuucagaccagagccggcugucugaucggagccgagcacgugaacaauagcuacgagugcgacauccccaucggcgcuggcaucugugccagcuaccagacacagacaaacagccccagacgggcuagaagcguggccagccagagcaucauugccuacacaaugucucugggcguggagaacagcguggccuacuccaacaacucuaucgcuauccccaccaacuucaccaucagcgugaccaccgagauccugccuguguccaugaccaagaccagcguggacugcaccauguacaucugcggcgauuccaccgagugcuccaaccugcugcugcaguacggcagcuucugcacccagcugaauagagcccugacagggaucgccguggaacaggacaagaacacccaagagguguucgcccaagugaagcaaaucuacaagaccccuccuaucaaggacuucggcggcuucaauuucagccagauucugcccgauccuagcaagcccagcaagcggagcuucaucgaggaccugcuguucaacaaagugacacuggccgacgccggcuucaucaagcaguauggcgauugucugggcgacauugccgccagggaucugauuugcgcccagaaguuuaacggacugacagugcugccuccucugcugaccgaugagaugaucgcccaguacacaucugcccugcuggccggcacaaucacaagcggcuggacauuuggagcuggcgccgcucugcagauccccuuugcuaugcagauggccuaccgguucaacggcaucggagugacccagaaugugcuguacgagaaccagaagcugaucgccaaccaguucaacagcgccaucggcaagauccaggacagccugagcagcacagcaagcgcccugggaaagcugcaggacguggucaaccagaaugcccaggcacugaacacccuggucaagcagcuguccuccaacuucggcgccaucagcucugugcugaacgauauccugagcagacuggacaaggucgaggccgaggugcagaucgacagacugaucacaggcagacugcagagccuccagacauacgugacccagcagcugaucagagccgccgagauuagagccucugccaaucuggccgccaccaagaugucugagugugugcugggccagagcaagagaguggacuuuugcggcaagggcuaccaccugaugagcuucccucagucugccccucacggcgugguguuucugcacgugacauaugugcccgcucaagagaagaauuucaccaccgcuccagccaucugccacgacggcaaagcccacuuuccuagagaaggcguguucguguccaacggcacccauugguucgugacacagcggaacuucuacgagccccagaucaucaccaccgacaacaccuucgugucuggcaacugcgacguugugaucggcauugugaacaauaccguguacgacccucugcagcccgagcuggacagcuucaaagaggaacuggacaaguacuuuaagaaccacacaagccccgacguggaccugggcgauaucagcggaaucaaugccagcgucgugaacauccagaaagagaucgaccggcugaacgagguggccaagaaucugaacgagagccugaucgaccugcaagaacuggggaaguacgagcaguacaucaaguggcccugguacaucuggcugggcuuuaucgccggacugauugccaucgugauggucacaaucaugcuguguugcaugaccagcugcuguagcugccugaagggcuguuguagcuguggcagcugcugcaaguucgacgaggacgauucugagcccgugcugaagggcgugaaacugcacuacaccugaggacuaguuauaagacugacuagcccgaugggccucccaacgggcccuccuccccuccuugcaccgagauuaaucaaaggcucuuuucagagccaccaaaaaaaaaaaaaaaaaaaaaaaaaaaaaaaaaaaaaaaaaaaaaaaaaaaaaaaaaaaaaaaaaaaaaaaaaaaaaaaaaaaaaaaaaaaaaaaaaaaaa

SEQ ID NO: 24156 - RNA, 4035 nt, Artificial Sequence
  SARS-CoV-2/Wuhan/WIV05/2019__EPI_ISL_402128 spike protein mRNA gc mod (1-1273)(E484K_D614G)
aggagaaagcuuaccauguucguguuucuggugcugcugccccugguguccagccagugugugaaccugaccaccagaacacagcugccuccagccuacaccaacagcuucaccagaggcguguacuaccccgacaagguguucagauccagcgugcugcacucuacccaggaccuguuccugccuuucuucagcaacgugaccugguuccacgccauccacguguccggcaccaauggcaccaagagauucgacaaccccgugcugcccuucaacgacgggguguacuuugccagcaccgagaaguccaacaucaucagaggcuggaucuucggcaccacacuggacagcaagacccagagccugcugaucgugaacaacgccaccaacguggucaucaaagugugcgaguuccaguucugcaacgaccccuuccugggcgucuacuaccacaagaacaacaagagcuggauggaaagcgaguuccggguguacagcagcgccaacaacugcaccuucgaguacgugucccagccuuuccugauggaccuggaaggcaagcagggcaacuucaagaaccugcgcgaguucguguucaagaacaucgacggcuacuucaaaaucuacagcaagcacaccccuaucaaccucgugcgggaucugccucagggcuucucugcucuggaaccccugguggaucugcccaucggcaucaacaucacccgguuucagacacugcuggcccugcacagaagcuaccugacaccuggcgauagcagcagcggauggacagcuggugccgccgcuuacuaugugggcuaccugcagccuagaaccuuccugcugaaguacaacgagaacggcaccaucaccgacgccguggauugugcucuggauccucugagcgagacaaagugcacccugaaguccuucaccguggaaaagggcaucuaccagaccagcaacuuccgggugcagcccaccgaauccaucgugcgguuccccaauaucaccaaucugugccccuucggcgagguguucaaugccaccagauucgccucuguguacgccuggaaccggaagcggaucagcaauugcguggccgacuacuccgugcuguacaacuccgccagcuucagcaccuucaagugcuacggcguguccccuaccaagcugaacgaccugugcuucacaaacguguacgccgacagcuucgugauccggggagaugaagugcggcagauugccccuggacagacaggcaagaucgccgacuacaacuacaagcugcccgacgacuucaccggcugugugauugccuggaacagcaacaaccuggacuccaaagucggcggcaacuacaauuaccuguaccggcuguuccggaaguccaaucugaagcccuucgagcgggacaucagcaccgaaaucuaucaggccggcagcaccccuugcaacggcgugaagggcuucaacugcuacuucccacugcaguccuacggcuuucagcccacaaauggcgugggcuaucagcccuacagagugguggugcugagcuucgaacugcugcaugcuccugccacagugugcggcccuaagaaaagcaccaaucucgugaagaacaaaugcgugaacuucaacuucaacggccugaccggcaccggcgugcugacagagagcaacaagaaguuccugccauuccagcaguuuggccgggauaucgccgauaccacagacgccguuagagauccccagacacuggaaauccuggacaucaccccaugcagcuucggcggagugucugugaucaccccuggcaccaacaccagcaaucagguggcagugcuguaccagggcgugaacuguaccgaagugcccguggccauucacgccgaucagcugacaccuacauggcggguguacuccaccggcagcaauguguuucagaccagagccggcugucugaucggagccgagcacgugaacaauagcuacgagugcgacauccccaucggcgcuggcaucugugccagcuaccagacacagacaaacagccccagacgggcuagaagcguggccagccagagcaucauugccuacacaaugucucugggcgccgagaacagcguggccuacuccaacaacucuaucgcuauccccaccaacuucaccaucagcgugaccaccgagauccugccuguguccaugaccaagaccagcguggacugcaccauguacaucugcggcgauuccaccgagugcuccaaccugcugcugcaguacggcagcuucugcacccagcugaauagagcccugacagggaucgccguggaacaggacaagaacacccaagagguguucgcccaagugaagcaaaucuacaagaccccuccuaucaaggacuucggcggcuucaauuucagccagauucugcccgauccuagcaagcccagcaagcggagcuucaucgaggaccugcuguucaacaaagugacacuggccgacgccggcuucaucaagcaguauggcgauugucugggcgacauugccgccagggaucugauuugcgcccagaaguuuaacggacugacagugcugccuccucugcugaccgaugagaugaucgcccaguacacaucugcccugcuggccggcacaaucacaagcggcuggacauuuggagcuggcgccgcucugcagauccccuuugcuaugcagauggccuaccgguucaacggcaucggagugacccagaaugugcuguacgagaaccagaagcugaucgccaaccaguucaacagcgccaucggcaagauccaggacagccugagcagcacagcaagcgcccugggaaagcugcaggacguggucaaccagaaugcccaggcacugaacacccuggucaagcagcuguccuccaacuucggcgccaucagcucugugcugaacgauauccugagcagacuggacaaggucgaggccgaggugcagaucgacagacugaucacaggcagacugcagagccuccagacauacgugacccagcagcugaucagagccgccgagauuagagccucugccaaucuggccgccaccaagaugucugagugugugcugggccagagcaagagaguggacuuuugcggcaagggcuaccaccugaugagcuucccucagucugccccucacggcgugguguuucugcacgugacauaugugcccgcucaagagaagaauuucaccaccgcuccagccaucugccacgacggcaaagcccacuuuccuagagaaggcguguucguguccaacggcacccauugguucgugacacagcggaacuucuacgagccccagaucaucaccaccgacaacaccuucgugucuggcaacugcgacguugugaucggcauugugaacaauaccguguacgacccucugcagcccgagcuggacagcuucaaagaggaacuggacaaguacuuuaagaaccacacaagccccgacguggaccugggcgauaucagcggaaucaaugccagcgucgugaacauccagaaagagaucgaccggcugaacgagguggccaagaaucugaacgagagccugaucgaccugcaagaacuggggaaguacgagcaguacaucaaguggcccugguacaucuggcugggcuuuaucgccggacugauugccaucgugauggucacaaucaugcuguguugcaugaccagcugcuguagcugccugaagggcuguuguagcuguggcagcugcugcaaguucgacgaggacgauucugagcccgugcugaagggcgugaaacugcacuacaccugaggacuaguuauaagacugacuagcccgaugggccucccaacgggcccuccuccccuccuugcaccgagauuaaucaaaggcucuuuucagagccaccaaaaaaaaaaaaaaaaaaaaaaaaaaaaaaaaaaaaaaaaaaaaaaaaaaaaaaaaaaaaaaaaaaaaaaaaaaaaaaaaaaaaaaaaaaaaaaaaaaaaa

SEQ ID NO: 24157 - RNA, 4035 nt, Artificial Sequence
  SARS-CoV-2/Wuhan/WIV05/2019__EPI_ISL_402128 spike protein mRNA gc mod (1-1273)(L18F_T20N_P26S_D138Y_R190S_K417T_E484K_N501Y_D614G_H655Y _T1027I)
aggagaaagcuuaccauguucguguuucuggugcugcugccccugguguccagccagugugugaacuucaccaacagaacacagcugccuagcgccuacaccaacagcuucaccagaggcguguacuaccccgacaagguguucagauccagcgugcugcacucuacccaggaccuguuccugccuuucuucagcaacgugaccugguuccacgccauccacguguccggcaccaauggcaccaagagauucgacaaccccgugcugcccuucaacgacgggguguacuuugccagcaccgagaaguccaacaucaucagaggcuggaucuucggcaccacacuggacagcaagacccagagccugcugaucgugaacaacgccaccaacguggucaucaaagugugcgaguuccaguucugcaacuaccccuuccugggcgucuacuaccacaagaacaacaagagcuggauggaaagcgaguuccggguguacagcagcgccaacaacugcaccuucgaguacgugucccagccuuuccugauggaccuggaaggcaagcagggcaacuucaagaaccugagcgaguucguguucaagaacaucgacggcuacuucaaaaucuacagcaagcacaccccuaucaaccucgugcgggaucugccucagggcuucucugcucuggaaccccugguggaucugcccaucggcaucaacaucacccgguuucagacacugcuggcccugcacagaagcuaccugacaccuggcgauagcagcagcggauggacagcuggugccgccgcuuacuaugugggcuaccugcagccuagaaccuuccugcugaaguacaacgagaacggcaccaucaccgacgccguggauugugcucuggauccucugagcgagacaaagugcacccugaaguccuucaccguggaaaagggcaucuaccagaccagcaacuuccgggugcagcccaccgaauccaucgugcgguuccccaauaucaccaaucugugccccuucggcgagguguucaaugccaccagauucgccucuguguacgccuggaaccggaagcggaucagcaauugcguggccgacuacuccgugcuguacaacuccgccagcuucagcaccuucaagugcuacggcguguccccuaccaagcugaacgaccugugcuucacaaacguguacgccgacagcuucgugauccggggagaugaagugcggcagauugccccuggacagacaggcaccaucgccgacuacaacuacaagcugcccgacgacuucaccggcugugugauugccuggaacagcaacaaccuggacuccaaagucggcggcaacuacaauuaccuguaccggcuguuccggaaguccaaucugaagcccuucgagcgggacaucagcaccgaaaucuaucaggccggcagcaccccuugcaacggcgugaagggcuucaacugcuacuucccacugcaguccuacggcuuucagcccacauacggcgugggcuaucagcccuacagagugguggugcugagcuucgaacugcugcaugcuccugccacagugugcggcccuaagaaaagcaccaaucucgugaagaacaaaugcgugaacuucaacuucaacggccugaccggcaccggcgugcugacagagagcaacaagaaguuccugccauuccagcaguuuggccgggauaucgccgauaccacagacgccguuagagauccccagacacuggaaauccuggacaucaccccaugcagcuucggcggagugucugugaucaccccuggcaccaacaccagcaaucagguggcagugcuguaccagggcgugaacuguaccgaagugcccguggccauucacgccgaucagcugacaccuacauggcggguguacuccaccggcagcaauguguuucagaccagagccggcugucugaucggagccgaguacgugaacaauagcuacgagugcgacauccccaucggcgcuggcaucugugccagcuaccagacacagacaaacagccccagacgggcuagaagcguggccagccagagcaucauugccuacacaaugucucugggcgccgagaacagcguggccuacuccaacaacucuaucgcuauccccaccaacuucaccaucagcgugaccaccgagauccugccuguguccaugaccaagaccagcguggacugcaccauguacaucugcggcgauuccaccgagugcuccaaccugcugcugcaguacggcagcuucugcacccagcugaauagagcccugacagggaucgccguggaacaggacaagaacacccaagagguguucgcccaagugaagcaaaucuacaagaccccuccuaucaaggacuucggcggcuucaauuucagccagauucugcccgauccuagcaagcccagcaagcggagcuucaucgaggaccugcuguucaacaaagugacacuggccgacgccggcuucaucaagcaguauggcgauugucugggcgacauugccgccagggaucugauuugcgcccagaaguuuaacggacugacagugcugccuccucugcugaccgaugagaugaucgcccaguacacaucugcccugcuggccggcacaaucacaagcggcuggacauuuggagcuggcgccgcucugcagauccccuuugcuaugcagauggccuaccgguucaacggcaucggagugacccagaaugugcuguacgagaaccagaagcugaucgccaaccaguucaacagcgccaucggcaagauccaggacagccugagcagcacagcaagcgcccugggaaagcugcaggacguggucaaccagaaugcccaggcacugaacacccuggucaagcagcuguccuccaacuucggcgccaucagcucugugcugaacgauauccugagcagacuggacaaggucgaggccgaggugcagaucgacagacugaucacaggcagacugcagagccuccagacauacgugacccagcagcugaucagagccgccgagauuagagccucugccaaucuggccgccaucaagaugucugagugugugcugggccagagcaagagaguggacuuuugcggcaagggcuaccaccugaugagcuucccucagucugccccucacggcgugguguuucugcacgugacauaugugcccgcucaagagaagaauuucaccaccgcuccagccaucugccacgacggcaaagcccacuuuccuagagaaggcguguucguguccaacggcacccauugguucgugacacagcggaacuucuacgagccccagaucaucaccaccgacaacaccuucgugucuggcaacugcgacguugugaucggcauugugaacaauaccguguacgacccucugcagcccgagcuggacagcuucaaagaggaacuggacaaguacuuuaagaaccacacaagccccgacguggaccugggcgauaucagcggaaucaaugccagcgucgugaacauccagaaagagaucgaccggcugaacgagguggccaagaaucugaacgagagccugaucgaccugcaagaacuggggaaguacgagcaguacaucaaguggcccugguacaucuggcugggcuuuaucgccggacugauugccaucgugauggucacaaucaugcuguguugcaugaccagcugcuguagcugccugaagggcuguuguagcuguggcagcugcugcaaguucgacgaggacgauucugagcccgugcugaagggcgugaaacugcacuacaccugaggacuaguuauaagacugacuagcccgaugggccucccaacgggcccuccuccccuccuugcaccgagauuaaucaaaggcucuuuucagagccaccaaaaaaaaaaaaaaaaaaaaaaaaaaaaaaaaaaaaaaaaaaaaaaaaaaaaaaaaaaaaaaaaaaaaaaaaaaaaaaaaaaaaaaaaaaaaaaaaaaaaa

SEQ ID NO: 24158 - RNA, 4035 nt, Artificial Sequence
  SARS-CoV-2/Wuhan/WIV05/2019__EPI_ISL_402128 spike protein mRNA gc mod (1-1273)(S13I_W152C_L452R_D614G)
aggagaaagcuuaccauguucguguuucuggugcugcugccccugguguccauccagugugugaaccugaccaccagaacacagcugccuccagccuacaccaacagcuucaccagaggcguguacuaccccgacaagguguucagauccagcgugcugcacucuacccaggaccuguuccugccuuucuucagcaacgugaccugguuccacgccauccacguguccggcaccaauggcaccaagagauucgacaaccccgugcugcccuucaacgacgggguguacuuugccagcaccgagaaguccaacaucaucagaggcuggaucuucggcaccacacuggacagcaagacccagagccugcugaucgugaacaacgccaccaacguggucaucaaagugugcgaguuccaguucugcaacgaccccuuccugggcgucuacuaccacaagaacaacaagagcugcauggaaagcgaguuccggguguacagcagcgccaacaacugcaccuucgaguacgugucccagccuuuccugauggaccuggaaggcaagcagggcaacuucaagaaccugcgcgaguucguguucaagaacaucgacggcuacuucaaaaucuacagcaagcacaccccuaucaaccucgugcgggaucugccucagggcuucucugcucuggaaccccugguggaucugcccaucggcaucaacaucacccgguuucagacacugcuggcccugcacagaagcuaccugacaccuggcgauagcagcagcggauggacagcuggugccgccgcuuacuaugugggcuaccugcagccuagaaccuuccugcugaaguacaacgagaacggcaccaucaccgacgccguggauugugcucuggauccucugagcgagacaaagugcacccugaaguccuucaccguggaaaagggcaucuaccagaccagcaacuuccgggugcagcccaccgaauccaucgugcgguuccccaauaucaccaaucugugccccuucggcgagguguucaaugccaccagauucgccucuguguacgccuggaaccggaagcggaucagcaauugcguggccgacuacuccgugcuguacaacuccgccagcuucagcaccuucaagugcuacggcguguccccuaccaagcugaacgaccugugcuucacaaacguguacgccgacagcuucgugauccggggagaugaagugcggcagauugccccuggacagacaggcaagaucgccgacuacaacuacaagcugcccgacgacuucaccggcugugugauugccuggaacagcaacaaccuggacuccaaagucggcggcaacuacaauuaccgcuaccggcuguuccggaaguccaaucugaagcccuucgagcgggacaucagcaccgaaaucuaucaggccggcagcaccccuugcaacggcguggaaggcuucaacugcuacuucccacugcaguccuacggcuuucagcccacaaauggcgugggcuaucagcccuacagagugguggugcugagcuucgaacugcugcaugcuccugccacagugugcggcccuaagaaaagcaccaaucucgugaagaacaaaugcgugaacuucaacuucaacggccugaccggcaccggcgugcugacagagagcaacaagaaguuccugccauuccagcaguuuggccgggauaucgccgauaccacagacgccguuagagauccccagacacuggaaauccuggacaucaccccaugcagcuucggcggagugucugugaucaccccuggcaccaacaccagcaaucagguggcagugcuguaccagggcgugaacuguaccgaagugcccguggccauucacgccgaucagcugacaccuacauggcggguguacuccaccggcagcaauguguuucagaccagagccggcugucugaucggagccgagcacgugaacaauagcuacgagugcgacauccccaucggcgcuggcaucugugccagcuaccagacacagacaaacagccccagacgggcuagaagcguggccagccagagcaucauugccuacacaaugucucugggcgccgagaacagcguggccuacuccaacaacucuaucgcuauccccaccaacuucaccaucagcgugaccaccgagauccugccuguguccaugaccaagaccagcguggacugcaccauguacaucugcggcgauuccaccgagugcuccaaccugcugcugcaguacggcagcuucugcacccagcugaauagagcccugacagggaucgccguggaacaggacaagaacacccaagagguguucgcccaagugaagcaaaucuacaagaccccuccuaucaaggacuucggcggcuucaauuucagccagauucugcccgauccuagcaagcccagcaagcggagcuucaucgaggaccugcuguucaacaaagugacacuggccgacgccggcuucaucaagcaguauggcgauugucugggcgacauugccgccagggaucugauuugcgcccagaaguuuaacggacugacagugcugccuccucugcugaccgaugagaugaucgcccaguacacaucugcccugcuggccggcacaaucacaagcggcuggacauuuggagcuggcgccgcucugcagauccccuuugcuaugcagauggccuaccgguucaacggcaucggagugacccagaaugugcuguacgagaaccagaagcugaucgccaaccaguucaacagcgccaucggcaagauccaggacagccugagcagcacagcaagcgcccugggaaagcugcaggacguggucaaccagaaugcccaggcacugaacacccuggucaagcagcuguccuccaacuucggcgccaucagcucugugcugaacgauauccugagcagacuggacaaggucgaggccgaggugcagaucgacagacugaucacaggcagacugcagagccuccagacauacgugacccagcagcugaucagagccgccgagauuagagccucugccaaucuggccgccaccaagaugucugagugugugcugggccagagcaagagaguggacuuuugcggcaagggcuaccaccugaugagcuucccucagucugccccucacggcgugguguuucugcacgugacauaugugcccgcucaagagaagaauuucaccaccgcuccagccaucugccacgacggcaaagcccacuuuccuagagaaggcguguucguguccaacggcacccauugguucgugacacagcggaacuucuacgagccccagaucaucaccaccgacaacaccuucgugucuggcaacugcgacguugugaucggcauugugaacaauaccguguacgacccucugcagcccgagcuggacagcuucaaagaggaacuggacaaguacuuuaagaaccacacaagccccgacguggaccugggcgauaucagcggaaucaaugccagcgucgugaacauccagaaagagaucgaccggcugaacgagguggccaagaaucugaacgagagccugaucgaccugcaagaacuggggaaguacgagcaguacaucaaguggcccugguacaucuggcugggcuuuaucgccggacugauugccaucgugauggucacaaucaugcuguguugcaugaccagcugcuguagcugccugaagggcuguuguagcuguggcagcugcugcaaguucgacgaggacgauucugagcccgugcugaagggcgugaaacugcacuacaccugaggacuaguuauaagacugacuagcccgaugggccucccaacgggcccuccuccccuccuugcaccgagauuaaucaaaggcucuuuucagagccaccaaaaaaaaaaaaaaaaaaaaaaaaaaaaaaaaaaaaaaaaaaaaaaaaaaaaaaaaaaaaaaaaaaaaaaaaaaaaaaaaaaaaaaaaaaaaaaaaaaaaa

SEQ ID NO: 24159 - RNA, 4035 nt, Artificial Sequence
  SARS-CoV-2/Wuhan/WIV05/2019__EPI_ISL_402128 spike protein mRNA gc mod (1-1273)
aggagaaagcuuaccauguucguguuccuggugcugcugccucugguguccagccagugugugaaccugaccaccagaacacagcugccuccagccuacaccaacagcuuuaccagaggcguguacuaccccgacaagguguucagauccagcgugcugcacucuacccaggaccuguuccugccuuucuucagcaacgugaccugguuccacgccauccacguguccggcaccaauggcaccaagagauucgacaaccccgugcugcccuucaacgacgggguguacuuugccagcaccgagaaguccaacaucaucagaggcuggaucuucggcaccacacuggacagcaagacccagagccugcugaucgugaacaacgccaccaacguggucaucaaagugugcgaguuccaguucugcaacgaccccuuccugggcgucuacuaccacaagaacaacaagagcuggauggaaagcgaguuccggguguacagcagcgccaacaacugcaccuucgaguacgugucccagccuuuccugauggaccuggaaggcaagcagggcaacuucaagaaccugcgcgaguucguguuuaagaacaucgacggcuacuucaagaucuacagcaagcacaccccuaucaaccucgugcgggaucugccucagggcuucucugcucuggaaccccugguggaucugcccaucggcaucaacaucacccgguuucagacacugcuggcccugcacagaagcuaccugacaccuggcgauagcagcagcggauggacagcuggugccgccgcuuacuaugugggcuaccugcagccuagaaccuuccugcugaaguacaacgagaacggcaccaucaccgacgccguggauugugcucuggauccucugagcgagacaaagugcacccugaaguccuucaccguggaaaagggcaucuaccagaccagcaacuuccgggugcagcccaccgaauccaucgugcgguuccccaauaucaccaaucugugccccuucggcgagguguucaaugccaccagauucgccucuguguacgccuggaaccggaagcggaucagcaauugcguggccgacuacuccgugcuguacaacuccgccagcuucagcaccuucaagugcuacggcguguccccuaccaagcugaacgaccugugcuucacaaacguguacgccgacagcuucgugauccggggagaugaagugcggcagauugccccuggacagacaggcaagaucgccgacuacaacuacaagcugcccgacgacuucaccggcugugugauugccuggaacagcaacaaccuggacuccaaagucggcggcaacuacaauuaccuguaccggcuguuccggaaguccaaucugaagcccuucgagcgggacaucuccaccgagaucuaucaggccggcagcaccccuuguaacggcguggaaggcuucaacugcuacuucccacugcaguccuacggcuuucagcccacaaauggcgugggcuaucagcccuacagagugguggugcugagcuucgaacugcugcaugccccugccacagugugcggcccuaagaaaagcaccaaucucgugaagaacaaaugcgugaacuucaacuucaacggccugaccggcaccggcgugcugacagagagcaacaagaaguuccugccauuccagcaguuuggccgggauaucgccgauaccacagacgccguuagagauccccagacacuggaaauccuggacaucaccccuugcagcuucggcggagugucugugaucaccccuggcaccaacaccagcaaucagguggcagugcuguaccaggacgugaacuguaccgaagugcccguggccauucacgccgaucagcugacaccuacauggcggguguacuccaccggcagcaauguguuucagaccagagccggcugucugaucggagccgagcacgugaacaauagcuacgagugcgacauccccaucggcgcuggaaucugcgccagcuaccagacacagacaaacagcccucggagagccagaagcguggccagccagagcaucauugccuacacaaugucucugggcgccgagaacagcguggccuacuccaacaacucuaucgcuauccccaccaacuucaccaucagcgugaccacagagauccugccuguguccaugaccaagaccagcguggacugcaccauguacaucugcggcgauuccaccgagugcuccaaccugcugcugcaguacggcagcuucugcacccagcugaauagagcccugacagggaucgccguggaacaggacaagaacacccaagagguguucgcccaagugaagcagaucuacaagaccccuccuaucaaggacuucggcggcuucaauuucagccagauucugcccgauccuagcaagcccagcaagcggagcuucaucgaggaccugcuguucaacaaagugacacuggccgacgccggcuucaucaagcaguauggcgauugucugggcgacauugccgccagggaucugauuugcgcccagaaguuuaacggacugacagugcugccuccucugcugaccgaugagaugaucgcccaguacacaucugcccugcuggccggcacaaucacaagcggcuggacauuuggagcaggcgccgcucugcagauccccuuugcuaugcagauggccuaccgguucaacggcaucggagugacccagaaugugcuguacgagaaccagaagcugaucgccaaccaguucaacagcgccaucggcaagauccaggacagccugagcagcacagcaagcgcccugggaaagcugcaggacguggucaaccagaaugcccaggcacugaacacccuggucaagcagcuguccuccaacuucggcgccaucagcucugugcugaacgauauccugagcagacuggacaaggucgaggccgaggugcagaucgacagacugaucacaggcagacugcagagccuccagacauacgugacccagcagcugaucagagccgccgagauuagagccucugccaaucuggccgccaccaagaugucugagugugugcugggccagagcaagagaguggacuuuugcggcaagggcuaccaccugaugagcuucccucagucugccccucacggcgugguguuucugcacgugacauaugugcccgcucaagagaagaauuucaccaccgcuccagccaucugccacgacggcaaagcccacuuuccuagagaaggcguguucguguccaacggcacccauugguucgugacacagcggaacuucuacgagccccagaucaucaccaccgacaacaccuucgugucuggcaacugcgacgucgugaucggcauugugaacaauaccguguacgacccucugcagcccgagcuggacagcuucaaagaggaacuggacaaguacuuuaagaaccacacaagccccgacguggaccugggcgauaucagcggaaucaaugccagcgucgugaacauccagaaagagaucgaccggcugaacgagguggccaagaaucugaacgagagccugaucgaccugcaagaacuggggaaguacgagcaguacaucaaguggcccugguacaucuggcugggcuuuaucgccggacugauugccaucgugauggucacaaucaugcuguguugcaugaccagcugcuguagcugccugaagggcuguuguagcuguggcagcugcugcaaguucgacgaggacgauucugagcccgugcugaagggcgugaaacugcacuacacaugaggacuaguuauaagacugacuagcccgaugggccucccaacgggcccuccuccccuccuugcaccgagauuaaucaaaggcucuuuucagagccaccaaaaaaaaaaaaaaaaaaaaaaaaaaaaaaaaaaaaaaaaaaaaaaaaaaaaaaaaaaaaaaaaaaaaaaaaaaaaaaaaaaaaaaaaaaaaaaaaaaaaa

SEQ ID NO: 24160 - RNA, 4035 nt, Artificial Sequence
  SARS-CoV-2/Wuhan/WIV05/2019__EPI_ISL_402128 spike protein mRNA gc mod (1-1273)(D614G)
aggagaaagcuuaccauguucguguuccuggugcugcugccucugguguccagccagugugugaaccugaccaccagaacacagcugccuccagccuacaccaacagcuuuaccagaggcguguacuaccccgacaagguguucagauccagcgugcugcacucuacccaggaccuguuccugccuuucuucagcaacgugaccugguuccacgccauccacguguccggcaccaauggcaccaagagauucgacaaccccgugcugcccuucaacgacgggguguacuuugccagcaccgagaaguccaacaucaucagaggcuggaucuucggcaccacacuggacagcaagacccagagccugcugaucgugaacaacgccaccaacguggucaucaaagugugcgaguuccaguucugcaacgaccccuuccugggcgucuacuaccacaagaacaacaagagcuggauggaaagcgaguuccggguguacagcagcgccaacaacugcaccuucgaguacgugucccagccuuuccugauggaccuggaaggcaagcagggcaacuucaagaaccugcgcgaguucguguuuaagaacaucgacggcuacuucaagaucuacagcaagcacaccccuaucaaccucgugcgggaucugccucagggcuucucugcucuggaaccccugguggaucugcccaucggcaucaacaucacccgguuucagacacugcuggcccugcacagaagcuaccugacaccuggcgauagcagcagcggauggacagcuggugccgccgcuuacuaugugggcuaccugcagccuagaaccuuccugcugaaguacaacgagaacggcaccaucaccgacgccguggauugugcucuggauccucugagcgagacaaagugcacccugaaguccuucaccguggaaaagggcaucuaccagaccagcaacuuccgggugcagcccaccgaauccaucgugcgguuccccaauaucaccaaucugugccccuucggcgagguguucaaugccaccagauucgccucuguguacgccuggaaccggaagcggaucagcaauugcguggccgacuacuccgugcuguacaacuccgccagcuucagcaccuucaagugcuacggcguguccccuaccaagcugaacgaccugugcuucacaaacguguacgccgacagcuucgugauccggggagaugaagugcggcagauugccccuggacagacaggcaagaucgccgacuacaacuacaagcugcccgacgacuucaccggcugugugauugccuggaacagcaacaaccuggacuccaaagucggcggcaacuacaauuaccuguaccggcuguuccggaaguccaaucugaagcccuucgagcgggacaucuccaccgagaucuaucaggccggcagcaccccuuguaacggcguggaaggcuucaacugcuacuucccacugcaguccuacggcuuucagcccacaaauggcgugggcuaucagcccuacagagugguggugcugagcuucgaacugcugcaugccccugccacagugugcggcccuaagaaaagcaccaaucucgugaagaacaaaugcgugaacuucaacuucaacggccugaccggcaccggcgugcugacagagagcaacaagaaguuccugccauuccagcaguuuggccgggauaucgccgauaccacagacgccguuagagauccccagacacuggaaauccuggacaucaccccuugcagcuucggcggagugucugugaucaccccuggcaccaacaccagcaaucagguggcagugcuguaccagggcgugaacuguaccgaagugcccguggccauucacgccgaucagcugacaccuacauggcggguguacuccaccggcagcaauguguuucagaccagagccggcugucugaucggagccgagcacgugaacaauagcuacgagugcgacauccccaucggcgcuggaaucugcgccagcuaccagacacagacaaacagcccucggagagccagaagcguggccagccagagcaucauugccuacacaaugucucugggcgccgagaacagcguggccuacuccaacaacucuaucgcuauccccaccaacuucaccaucagcgugaccacagagauccugccuguguccaugaccaagaccagcguggacugcaccauguacaucugcggcgauuccaccgagugcuccaaccugcugcugcaguacggcagcuucugcacccagcugaauagagcccugacagggaucgccguggaacaggacaagaacacccaagagguguucgcccaagugaagcagaucuacaagaccccuccuaucaaggacuucggcggcuucaauuucagccagauucugcccgauccuagcaagcccagcaagcggagcuucaucgaggaccugcuguucaacaaagugacacuggccgacgccggcuucaucaagcaguauggcgauugucugggcgacauugccgccagggaucugauuugcgcccagaaguuuaacggacugacagugcugccuccucugcugaccgaugagaugaucgcccaguacacaucugcccugcuggccggcacaaucacaagcggcuggacauuuggagcaggcgccgcucugcagauccccuuugcuaugcagauggccuaccgguucaacggcaucggagugacccagaaugugcuguacgagaaccagaagcugaucgccaaccaguucaacagcgccaucggcaagauccaggacagccugagcagcacagcaagcgcccugggaaagcugcaggacguggucaaccagaaugcccaggcacugaacacccuggucaagcagcuguccuccaacuucggcgccaucagcucugugcugaacgauauccugagcagacuggacaaggucgaggccgaggugcagaucgacagacugaucacaggcagacugcagagccuccagacauacgugacccagcagcugaucagagccgccgagauuagagccucugccaaucuggccgccaccaagaugucugagugugugcugggccagagcaagagaguggacuuuugcggcaagggcuaccaccugaugagcuucccucagucugccccucacggcgugguguuucugcacgugacauaugugcccgcucaagagaagaauuucaccaccgcuccagccaucugccacgacggcaaagcccacuuuccuagagaaggcguguucguguccaacggcacccauugguucgugacacagcggaacuucuacgagccccagaucaucaccaccgacaacaccuucgugucuggcaacugcgacgucgugaucggcauugugaacaauaccguguacgacccucugcagcccgagcuggacagcuucaaagaggaacuggacaaguacuuuaagaaccacacaagccccgacguggaccugggcgauaucagcggaaucaaugccagcgucgugaacauccagaaagagaucgaccggcugaacgagguggccaagaaucugaacgagagccugaucgaccugcaagaacuggggaaguacgagcaguacaucaaguggcccugguacaucuggcugggcuuuaucgccggacugauugccaucgugauggucacaaucaugcuguguugcaugaccagcugcuguagcugccugaagggcuguuguagcuguggcagcugcugcaaguucgacgaggacgauucugagcccgugcugaagggcgugaaacugcacuacacaugaggacuaguuauaagacugacuagcccgaugggccucccaacgggcccuccuccccuccuugcaccgagauuaaucaaaggcucuuuucagagccaccaaaaaaaaaaaaaaaaaaaaaaaaaaaaaaaaaaaaaaaaaaaaaaaaaaaaaaaaaaaaaaaaaaaaaaaaaaaaaaaaaaaaaaaaaaaaaaaaaaaaa

SEQ ID NO: 24161 - RNA, 4035 nt, Artificial Sequence
  SARS-CoV-2/Wuhan/WIV05/2019__EPI_ISL_402128 spike protein mRNA gc mod (1-1273)(A222V_D614G)
aggagaaagcuuaccauguucguguuccuggugcugcugccucugguguccagccagugugugaaccugaccaccagaacacagcugccuccagccuacaccaacagcuuuaccagaggcguguacuaccccgacaagguguucagauccagcgugcugcacucuacccaggaccuguuccugccuuucuucagcaacgugaccugguuccacgccauccacguguccggcaccaauggcaccaagagauucgacaaccccgugcugcccuucaacgacgggguguacuuugccagcaccgagaaguccaacaucaucagaggcuggaucuucggcaccacacuggacagcaagacccagagccugcugaucgugaacaacgccaccaacguggucaucaaagugugcgaguuccaguucugcaacgaccccuuccugggcgucuacuaccacaagaacaacaagagcuggauggaaagcgaguuccggguguacagcagcgccaacaacugcaccuucgaguacgugucccagccuuuccugauggaccuggaaggcaagcagggcaacuucaagaaccugcgcgaguucguguuuaagaacaucgacggcuacuucaagaucuacagcaagcacaccccuaucaaccucgugcgggaucugccucagggcuucucugugcuggaaccccugguggaucugcccaucggcaucaacaucacccgguuucagacacugcuggcccugcacagaagcuaccugacaccuggcgauagcagcagcggauggacagcuggugccgccgcuuacuaugugggcuaccugcagccuagaaccuuccugcugaaguacaacgagaacggcaccaucaccgacgccguggauugugcucuggauccucugagcgagacaaagugcacccugaaguccuucaccguggaaaagggcaucuaccagaccagcaacuuccgggugcagcccaccgaauccaucgugcgguuccccaauaucaccaaucugugccccuucggcgagguguucaaugccaccagauucgccucuguguacgccuggaaccggaagcggaucagcaauugcguggccgacuacuccgugcuguacaacuccgccagcuucagcaccuucaagugcuacggcguguccccuaccaagcugaacgaccugugcuucacaaacguguacgccgacagcuucgugauccggggagaugaagugcggcagauugccccuggacagacaggcaagaucgccgacuacaacuacaagcugcccgacgacuucaccggcugugugauugccuggaacagcaacaaccuggacuccaaagucggcggcaacuacaauuaccuguaccggcuguuccggaaguccaaucugaagcccuucgagcgggacaucuccaccgagaucuaucaggccggcagcaccccuuguaacggcguggaaggcuucaacugcuacuucccacugcaguccuacggcuuucagcccacaaauggcgugggcuaucagcccuacagagugguggugcugagcuucgaacugcugcaugccccugccacagugugcggcccuaagaaaagcaccaaucucgugaagaacaaaugcgugaacuucaacuucaacggccugaccggcaccggcgugcugacagagagcaacaagaaguuccugccauuccagcaguuuggccgggauaucgccgauaccacagacgccguuagagauccccagacacuggaaauccuggacaucaccccuugcagcuucggcggagugucugugaucaccccuggcaccaacaccagcaaucagguggcagugcuguaccagggcgugaacuguaccgaagugcccguggccauucacgccgaucagcugacaccuacauggcggguguacuccaccggcagcaauguguuucagaccagagccggcugucugaucggagccgagcacgugaacaauagcuacgagugcgacauccccaucggcgcuggaaucugcgccagcuaccagacacagacaaacagcccucggagagccagaagcguggccagccagagcaucauugccuacacaaugucucugggcgccgagaacagcguggccuacuccaacaacucuaucgcuauccccaccaacuucaccaucagcgugaccacagagauccugccuguguccaugaccaagaccagcguggacugcaccauguacaucugcggcgauuccaccgagugcuccaaccugcugcugcaguacggcagcuucugcacccagcugaauagagcccugacagggaucgccguggaacaggacaagaacacccaagagguguucgcccaagugaagcagaucuacaagaccccuccuaucaaggacuucggcggcuucaauuucagccagauucugcccgauccuagcaagcccagcaagcggagcuucaucgaggaccugcuguucaacaaagugacacuggccgacgccggcuucaucaagcaguauggcgauugucugggcgacauugccgccagggaucugauuugcgcccagaaguuuaacggacugacagugcugccuccucugcugaccgaugagaugaucgcccaguacacaucugcccugcuggccggcacaaucacaagcggcuggacauuuggagcaggcgccgcucugcagauccccuuugcuaugcagauggccuaccgguucaacggcaucggagugacccagaaugugcuguacgagaaccagaagcugaucgccaaccaguucaacagcgccaucggcaagauccaggacagccugagcagcacagcaagcgcccugggaaagcugcaggacguggucaaccagaaugcccaggcacugaacacccuggucaagcagcuguccuccaacuucggcgccaucagcucugugcugaacgauauccugagcagacuggacaaggucgaggccgaggugcagaucgacagacugaucacaggcagacugcagagccuccagacauacgugacccagcagcugaucagagccgccgagauuagagccucugccaaucuggccgccaccaagaugucugagugugugcugggccagagcaagagaguggacuuuugcggcaagggcuaccaccugaugagcuucccucagucugccccucacggcgugguguuucugcacgugacauaugugcccgcucaagagaagaauuucaccaccgcuccagccaucugccacgacggcaaagcccacuuuccuagagaaggcguguucguguccaacggcacccauugguucgugacacagcggaacuucuacgagccccagaucaucaccaccgacaacaccuucgugucuggcaacugcgacgucgugaucggcauugugaacaauaccguguacgacccucugcagcccgagcuggacagcuucaaagaggaacuggacaaguacuuuaagaaccacacaagccccgacguggaccugggcgauaucagcggaaucaaugccagcgucgugaacauccagaaagagaucgaccggcugaacgagguggccaagaaucugaacgagagccugaucgaccugcaagaacuggggaaguacgagcaguacaucaaguggcccugguacaucuggcugggcuuuaucgccggacugauugccaucgugauggucacaaucaugcuguguugcaugaccagcugcuguagcugccugaagggcuguuguagcuguggcagcugcugcaaguucgacgaggacgauucugagcccgugcugaagggcgugaaacugcacuacacaugaggacuaguuauaagacugacuagcccgaugggccucccaacgggcccuccuccccuccuugcaccgagauuaaucaaaggcucuuuucagagccaccaaaaaaaaaaaaaaaaaaaaaaaaaaaaaaaaaaaaaaaaaaaaaaaaaaaaaaaaaaaaaaaaaaaaaaaaaaaaaaaaaaaaaaaaaaaaaaaaaaaaa

SEQ ID NO: 24162 - RNA, 4035 nt, Artificial Sequence
  SARS-CoV-2/Wuhan/WIV05/2019__EPI_ISL_402128 spike protein mRNA gc mod (1-1273)(N439K_D614G)
aggagaaagcuuaccauguucguguuccuggugcugcugccucugguguccagccagugugugaaccugaccaccagaacacagcugccuccagccuacaccaacagcuuuaccagaggcguguacuaccccgacaagguguucagauccagcgugcugcacucuacccaggaccuguuccugccuuucuucagcaacgugaccugguuccacgccauccacguguccggcaccaauggcaccaagagauucgacaaccccgugcugcccuucaacgacgggguguacuuugccagcaccgagaaguccaacaucaucagaggcuggaucuucggcaccacacuggacagcaagacccagagccugcugaucgugaacaacgccaccaacguggucaucaaagugugcgaguuccaguucugcaacgaccccuuccugggcgucuacuaccacaagaacaacaagagcuggauggaaagcgaguuccggguguacagcagcgccaacaacugcaccuucgaguacgugucccagccuuuccugauggaccuggaaggcaagcagggcaacuucaagaaccugcgcgaguucguguuuaagaacaucgacggcuacuucaagaucuacagcaagcacaccccuaucaaccucgugcgggaucugccucagggcuucucugcucuggaaccccugguggaucugcccaucggcaucaacaucacccgguuucagacacugcuggcccugcacagaagcuaccugacaccuggcgauagcagcagcggauggacagcuggugccgccgcuuacuaugugggcuaccugcagccuagaaccuuccugcugaaguacaacgagaacggcaccaucaccgacgccguggauugugcucuggauccucugagcgagacaaagugcacccugaaguccuucaccguggaaaagggcaucuaccagaccagcaacuuccgggugcagcccaccgaauccaucgugcgguuccccaauaucaccaaucugugccccuucggcgagguguucaaugccaccagauucgccucuguguacgccuggaaccggaagcggaucagcaauugcguggccgacuacuccgugcuguacaacuccgccagcuucagcaccuucaagugcuacggcguguccccuaccaagcugaacgaccugugcuucacaaacguguacgccgacagcuucgugauccggggagaugaagugcggcagauugccccuggacagacaggcaagaucgccgacuacaacuacaagcugcccgacgacuucaccggcugugugauugccuggaacagcaagaaccuggacuccaaagucggcggcaacuacaauuaccuguaccggcuguuccggaaguccaaucugaagcccuucgagcgggacaucuccaccgagaucuaucaggccggcagcaccccuuguaacggcguggaaggcuucaacugcuacuucccacugcaguccuacggcuuucagcccacaaauggcgugggcuaucagcccuacagagugguggugcugagcuucgaacugcugcaugccccugccacagugugcggcccuaagaaaagcaccaaucucgugaagaacaaaugcgugaacuucaacuucaacggccugaccggcaccggcgugcugacagagagcaacaagaaguuccugccauuccagcaguuuggccgggauaucgccgauaccacagacgccguuagagauccccagacacuggaaauccuggacaucaccccuugcagcuucggcggagugucugugaucaccccuggcaccaacaccagcaaucagguggcagugcuguaccagggcgugaacuguaccgaagugcccguggccauucacgccgaucagcugacaccuacauggcggguguacuccaccggcagcaauguguuucagaccagagccggcugucugaucggagccgagcacgugaacaauagcuacgagugcgacauccccaucggcgcuggaaucugcgccagcuaccagacacagacaaacagcccucggagagccagaagcguggccagccagagcaucauugccuacacaaugucucugggcgccgagaacagcguggccuacuccaacaacucuaucgcuauccccaccaacuucaccaucagcgugaccacagagauccugccuguguccaugaccaagaccagcguggacugcaccauguacaucugcggcgauuccaccgagugcuccaaccugcugcugcaguacggcagcuucugcacccagcugaauagagcccugacagggaucgccguggaacaggacaagaacacccaagagguguucgcccaagugaagcagaucuacaagaccccuccuaucaaggacuucggcggcuucaauuucagccagauucugcccgauccuagcaagcccagcaagcggagcuucaucgaggaccugcuguucaacaaagugacacuggccgacgccggcuucaucaagcaguauggcgauugucugggcgacauugccgccagggaucugauuugcgcccagaaguuuaacggacugacagugcugccuccucugcugaccgaugagaugaucgcccaguacacaucugcccugcuggccggcacaaucacaagcggcuggacauuuggagcaggcgccgcucugcagauccccuuugcuaugcagauggccuaccgguucaacggcaucggagugacccagaaugugcuguacgagaaccagaagcugaucgccaaccaguucaacagcgccaucggcaagauccaggacagccugagcagcacagcaagcgcccugggaaagcugcaggacguggucaaccagaaugcccaggcacugaacacccuggucaagcagcuguccuccaacuucggcgccaucagcucugugcugaacgauauccugagcagacuggacaaggucgaggccgaggugcagaucgacagacugaucacaggcagacugcagagccuccagacauacgugacccagcagcugaucagagccgccgagauuagagccucugccaaucuggccgccaccaagaugucugagugugugcugggccagagcaagagaguggacuuuugcggcaagggcuaccaccugaugagcuucccucagucugccccucacggcgugguguuucugcacgugacauaugugcccgcucaagagaagaauuucaccaccgcuccagccaucugccacgacggcaaagcccacuuuccuagagaaggcguguucguguccaacggcacccauugguucgugacacagcggaacuucuacgagccccagaucaucaccaccgacaacaccuucgugucuggcaacugcgacgucgugaucggcauugugaacaauaccguguacgacccucugcagcccgagcuggacagcuucaaagaggaacuggacaaguacuuuaagaaccacacaagccccgacguggaccugggcgauaucagcggaaucaaugccagcgucgugaacauccagaaagagaucgaccggcugaacgagguggccaagaaucugaacgagagccugaucgaccugcaagaacuggggaaguacgagcaguacaucaaguggcccugguacaucuggcugggcuuuaucgccggacugauugccaucgugauggucacaaucaugcuguguugcaugaccagcugcuguagcugccugaagggcuguuguagcuguggcagcugcugcaaguucgacgaggacgauucugagcccgugcugaagggcgugaaacugcacuacacaugaggacuaguuauaagacugacuagcccgaugggccucccaacgggcccuccuccccuccuugcaccgagauuaaucaaaggcucuuuucagagccaccaaaaaaaaaaaaaaaaaaaaaaaaaaaaaaaaaaaaaaaaaaaaaaaaaaaaaaaaaaaaaaaaaaaaaaaaaaaaaaaaaaaaaaaaaaaaaaaaaaaaa

SEQ ID NO: 24163 - RNA, 4035 nt, Artificial Sequence
  SARS-CoV-2/Wuhan/WIV05/2019__EPI_ISL_402128 spike protein mRNA gc mod (1-1273)(S477N_D614G)
aggagaaagcuuaccauguucguguuccuggugcugcugccucugguguccagccagugugugaaccugaccaccagaacacagcugccuccagccuacaccaacagcuuuaccagaggcguguacuaccccgacaagguguucagauccagcgugcugcacucuacccaggaccuguuccugccuuucuucagcaacgugaccugguuccacgccauccacguguccggcaccaauggcaccaagagauucgacaaccccgugcugcccuucaacgacgggguguacuuugccagcaccgagaaguccaacaucaucagaggcuggaucuucggcaccacacuggacagcaagacccagagccugcugaucgugaacaacgccaccaacguggucaucaaagugugcgaguuccaguucugcaacgaccccuuccugggcgucuacuaccacaagaacaacaagagcuggauggaaagcgaguuccggguguacagcagcgccaacaacugcaccuucgaguacgugucccagccuuuccugauggaccuggaaggcaagcagggcaacuucaagaaccugcgcgaguucguguuuaagaacaucgacggcuacuucaagaucuacagcaagcacaccccuaucaaccucgugcgggaucugccucagggcuucucugcucuggaaccccugguggaucugcccaucggcaucaacaucacccgguuucagacacugcuggcccugcacagaagcuaccugacaccuggcgauagcagcagcggauggacagcuggugccgccgcuuacuaugugggcuaccugcagccuagaaccuuccugcugaaguacaacgagaacggcaccaucaccgacgccguggauugugcucuggauccucugagcgagacaaagugcacccugaaguccuucaccguggaaaagggcaucuaccagaccagcaacuuccgggugcagcccaccgaauccaucgugcgguuccccaauaucaccaaucugugccccuucggcgagguguucaaugccaccagauucgccucuguguacgccuggaaccggaagcggaucagcaauugcguggccgacuacuccgugcuguacaacuccgccagcuucagcaccuucaagugcuacggcguguccccuaccaagcugaacgaccugugcuucacaaacguguacgccgacagcuucgugauccggggagaugaagugcggcagauugccccuggacagacaggcaagaucgccgacuacaacuacaagcugcccgacgacuucaccggcugugugauugccuggaacagcaacaaccuggacuccaaagucggcggcaacuacaauuaccuguaccggcuguuccggaaguccaaucugaagcccuucgagcgggacaucuccaccgagaucuaucaggccggcaacaccccuuguaacggcguggaaggcuucaacugcuacuucccacugcaguccuacggcuuucagcccacaaauggcgugggcuaucagcccuacagagugguggugcugagcuucgaacugcugcaugccccugccacagugugcggcccuaagaaaagcaccaaucucgugaagaacaaaugcgugaacuucaacuucaacggccugaccggcaccggcgugcugacagagagcaacaagaaguuccugccauuccagcaguuuggccgggauaucgccgauaccacagacgccguuagagauccccagacacuggaaauccuggacaucaccccuugcagcuucggcggagugucugugaucaccccuggcaccaacaccagcaaucagguggcagugcuguaccagggcgugaacuguaccgaagugcccguggccauucacgccgaucagcugacaccuacauggcggguguacuccaccggcagcaauguguuucagaccagagccggcugucugaucggagccgagcacgugaacaauagcuacgagugcgacauccccaucggcgcuggaaucugcgccagcuaccagacacagacaaacagcccucggagagccagaagcguggccagccagagcaucauugccuacacaaugucucugggcgccgagaacagcguggccuacuccaacaacucuaucgcuauccccaccaacuucaccaucagcgugaccacagagauccugccuguguccaugaccaagaccagcguggacugcaccauguacaucugcggcgauuccaccgagugcuccaaccugcugcugcaguacggcagcuucugcacccagcugaauagagcccugacagggaucgccguggaacaggacaagaacacccaagagguguucgcccaagugaagcagaucuacaagaccccuccuaucaaggacuucggcggcuucaauuucagccagauucugcccgauccuagcaagcccagcaagcggagcuucaucgaggaccugcuguucaacaaagugacacuggccgacgccggcuucaucaagcaguauggcgauugucugggcgacauugccgccagggaucugauuugcgcccagaaguuuaacggacugacagugcugccuccucugcugaccgaugagaugaucgcccaguacacaucugcccugcuggccggcacaaucacaagcggcuggacauuuggagcaggcgccgcucugcagauccccuuugcuaugcagauggccuaccgguucaacggcaucggagugacccagaaugugcuguacgagaaccagaagcugaucgccaaccaguucaacagcgccaucggcaagauccaggacagccugagcagcacagcaagcgcccugggaaagcugcaggacguggucaaccagaaugcccaggcacugaacacccuggucaagcagcuguccuccaacuucggcgccaucagcucugugcugaacgauauccugagcagacuggacaaggucgaggccgaggugcagaucgacagacugaucacaggcagacugcagagccuccagacauacgugacccagcagcugaucagagccgccgagauuagagccucugccaaucuggccgccaccaagaugucugagugugugcugggccagagcaagagaguggacuuuugcggcaagggcuaccaccugaugagcuucccucagucugccccucacggcgugguguuucugcacgugacauaugugcccgcucaagagaagaauuucaccaccgcuccagccaucugccacgacggcaaagcccacuuuccuagagaaggcguguucguguccaacggcacccauugguucgugacacagcggaacuucuacgagccccagaucaucaccaccgacaacaccuucgugucuggcaacugcgacgucgugaucggcauugugaacaauaccguguacgacccucugcagcccgagcuggacagcuucaaagaggaacuggacaaguacuuuaagaaccacacaagccccgacguggaccugggcgauaucagcggaaucaaugccagcgucgugaacauccagaaagagaucgaccggcugaacgagguggccaagaaucugaacgagagccugaucgaccugcaagaacuggggaaguacgagcaguacaucaaguggcccugguacaucuggcugggcuuuaucgccggacugauugccaucgugauggucacaaucaugcuguguugcaugaccagcugcuguagcugccugaagggcuguuguagcuguggcagcugcugcaaguucgacgaggacgauucugagcccgugcugaagggcgugaaacugcacuacacaugaggacuaguuauaagacugacuagcccgaugggccucccaacgggcccuccuccccuccuugcaccgagauuaaucaaaggcucuuuucagagccaccaaaaaaaaaaaaaaaaaaaaaaaaaaaaaaaaaaaaaaaaaaaaaaaaaaaaaaaaaaaaaaaaaaaaaaaaaaaaaaaaaaaaaaaaaaaaaaaaaaaaa

SEQ ID NO: 24164 - RNA, 4035 nt, Artificial Sequence
  SARS-CoV-2/Wuhan/WIV05/2019__EPI_ISL_402128 spike protein mRNA gc mod (1-1273)(N501Y_D614G)
aggagaaagcuuaccauguucguguuccuggugcugcugccucugguguccagccagugugugaaccugaccaccagaacacagcugccuccagccuacaccaacagcuuuaccagaggcguguacuaccccgacaagguguucagauccagcgugcugcacucuacccaggaccuguuccugccuuucuucagcaacgugaccugguuccacgccauccacguguccggcaccaauggcaccaagagauucgacaaccccgugcugcccuucaacgacgggguguacuuugccagcaccgagaaguccaacaucaucagaggcuggaucuucggcaccacacuggacagcaagacccagagccugcugaucgugaacaacgccaccaacguggucaucaaagugugcgaguuccaguucugcaacgaccccuuccugggcgucuacuaccacaagaacaacaagagcuggauggaaagcgaguuccggguguacagcagcgccaacaacugcaccuucgaguacgugucccagccuuuccugauggaccuggaaggcaagcagggcaacuucaagaaccugcgcgaguucguguuuaagaacaucgacggcuacuucaagaucuacagcaagcacaccccuaucaaccucgugcgggaucugccucagggcuucucugcucuggaaccccugguggaucugcccaucggcaucaacaucacccgguuucagacacugcuggcccugcacagaagcuaccugacaccuggcgauagcagcagcggauggacagcuggugccgccgcuuacuaugugggcuaccugcagccuagaaccuuccugcugaaguacaacgagaacggcaccaucaccgacgccguggauugugcucuggauccucugagcgagacaaagugcacccugaaguccuucaccguggaaaagggcaucuaccagaccagcaacuuccgggugcagcccaccgaauccaucgugcgguuccccaauaucaccaaucugugccccuucggcgagguguucaaugccaccagauucgccucuguguacgccuggaaccggaagcggaucagcaauugcguggccgacuacuccgugcuguacaacuccgccagcuucagcaccuucaagugcuacggcguguccccuaccaagcugaacgaccugugcuucacaaacguguacgccgacagcuucgugauccggggagaugaagugcggcagauugccccuggacagacaggcaagaucgccgacuacaacuacaagcugcccgacgacuucaccggcugugugauugccuggaacagcaacaaccuggacuccaaagucggcggcaacuacaauuaccuguaccggcuguuccggaaguccaaucugaagcccuucgagcgggacaucuccaccgagaucuaucaggccggcagcaccccuuguaacggcguggaaggcuucaacugcuacuucccacugcaguccuacggcuuucagcccacauacggcgugggcuaucagcccuacagagugguggugcugagcuucgaacugcugcaugccccugccacagugugcggcccuaagaaaagcaccaaucucgugaagaacaaaugcgugaacuucaacuucaacggccugaccggcaccggcgugcugacagagagcaacaagaaguuccugccauuccagcaguuuggccgggauaucgccgauaccacagacgccguuagagauccccagacacuggaaauccuggacaucaccccuugcagcuucggcggagugucugugaucaccccuggcaccaacaccagcaaucagguggcagugcuguaccagggcgugaacuguaccgaagugcccguggccauucacgccgaucagcugacaccuacauggcggguguacuccaccggcagcaauguguuucagaccagagccggcugucugaucggagccgagcacgugaacaauagcuacgagugcgacauccccaucggcgcuggaaucugcgccagcuaccagacacagacaaacagcccucggagagccagaagcguggccagccagagcaucauugccuacacaaugucucugggcgccgagaacagcguggccuacuccaacaacucuaucgcuauccccaccaacuucaccaucagcgugaccacagagauccugccuguguccaugaccaagaccagcguggacugcaccauguacaucugcggcgauuccaccgagugcuccaaccugcugcugcaguacggcagcuucugcacccagcugaauagagcccugacagggaucgccguggaacaggacaagaacacccaagagguguucgcccaagugaagcagaucuacaagaccccuccuaucaaggacuucggcggcuucaauuucagccagauucugcccgauccuagcaagcccagcaagcggagcuucaucgaggaccugcuguucaacaaagugacacuggccgacgccggcuucaucaagcaguauggcgauugucugggcgacauugccgccagggaucugauuugcgcccagaaguuuaacggacugacagugcugccuccucugcugaccgaugagaugaucgcccaguacacaucugcccugcuggccggcacaaucacaagcggcuggacauuuggagcaggcgccgcucugcagauccccuuugcuaugcagauggccuaccgguucaacggcaucggagugacccagaaugugcuguacgagaaccagaagcugaucgccaaccaguucaacagcgccaucggcaagauccaggacagccugagcagcacagcaagcgcccugggaaagcugcaggacguggucaaccagaaugcccaggcacugaacacccuggucaagcagcuguccuccaacuucggcgccaucagcucugugcugaacgauauccugagcagacuggacaaggucgaggccgaggugcagaucgacagacugaucacaggcagacugcagagccuccagacauacgugacccagcagcugaucagagccgccgagauuagagccucugccaaucuggccgccaccaagaugucugagugugugcugggccagagcaagagaguggacuuuugcggcaagggcuaccaccugaugagcuucccucagucugccccucacggcgugguguuucugcacgugacauaugugcccgcucaagagaagaauuucaccaccgcuccagccaucugccacgacggcaaagcccacuuuccuagagaaggcguguucguguccaacggcacccauugguucgugacacagcggaacuucuacgagccccagaucaucaccaccgacaacaccuucgugucuggcaacugcgacgucgugaucggcauugugaacaauaccguguacgacccucugcagcccgagcuggacagcuucaaagaggaacuggacaaguacuuuaagaaccacacaagccccgacguggaccugggcgauaucagcggaaucaaugccagcgucgugaacauccagaaagagaucgaccggcugaacgagguggccaagaaucugaacgagagccugaucgaccugcaagaacuggggaaguacgagcaguacaucaaguggcccugguacaucuggcugggcuuuaucgccggacugauugccaucgugauggucacaaucaugcuguguugcaugaccagcugcuguagcugccugaagggcuguuguagcuguggcagcugcugcaaguucgacgaggacgauucugagcccgugcugaagggcgugaaacugcacuacacaugaggacuaguuauaagacugacuagcccgaugggccucccaacgggcccuccuccccuccuugcaccgagauuaaucaaaggcucuuuucagagccaccaaaaaaaaaaaaaaaaaaaaaaaaaaaaaaaaaaaaaaaaaaaaaaaaaaaaaaaaaaaaaaaaaaaaaaaaaaaaaaaaaaaaaaaaaaaaaaaaaaaaa

SEQ ID NO: 24165 - RNA, 4029 nt, Artificial Sequence
  SARS-CoV-2/Wuhan/WIV05/2019__EPI_ISL_402128 spike protein mRNA gc mod (1-1273)(H69del_V70del_D614G)
aggagaaagcuuaccauguucguguuccuggugcugcugccucugguguccagccagugugugaaccugaccaccagaacacagcugccuccagccuacaccaacagcuuuaccagaggcguguacuaccccgacaagguguucagauccagcgugcugcacucuacccaggaccuguuccugccuuucuucagcaacgugaccugguuccacgccaucuccggcaccaauggcaccaagagauucgacaaccccgugcugcccuucaacgacgggguguacuuugccagcaccgagaaguccaacaucaucagaggcuggaucuucggcaccacacuggacagcaagacccagagccugcugaucgugaacaacgccaccaacguggucaucaaagugugcgaguuccaguucugcaacgaccccuuccugggcgucuacuaccacaagaacaacaagagcuggauggaaagcgaguuccggguguacagcagcgccaacaacugcaccuucgaguacgugucccagccuuuccugauggaccuggaaggcaagcagggcaacuucaagaaccugcgcgaguucguguuuaagaacaucgacggcuacuucaagaucuacagcaagcacaccccuaucaaccucgugcgggaucugccucagggcuucucugcucuggaaccccugguggaucugcccaucggcaucaacaucacccgguuucagacacugcuggcccugcacagaagcuaccugacaccuggcgauagcagcagcggauggacagcuggugccgccgcuuacuaugugggcuaccugcagccuagaaccuuccugcugaaguacaacgagaacggcaccaucaccgacgccguggauugugcucuggauccucugagcgagacaaagugcacccugaaguccuucaccguggaaaagggcaucuaccagaccagcaacuuccgggugcagcccaccgaauccaucgugcgguuccccaauaucaccaaucugugccccuucggcgagguguucaaugccaccagauucgccucuguguacgccuggaaccggaagcggaucagcaauugcguggccgacuacuccgugcuguacaacuccgccagcuucagcaccuucaagugcuacggcguguccccuaccaagcugaacgaccugugcuucacaaacguguacgccgacagcuucgugauccggggagaugaagugcggcagauugccccuggacagacaggcaagaucgccgacuacaacuacaagcugcccgacgacuucaccggcugugugauugccuggaacagcaacaaccuggacuccaaagucggcggcaacuacaauuaccuguaccggcuguuccggaaguccaaucugaagcccuucgagcgggacaucuccaccgagaucuaucaggccggcagcaccccuuguaacggcguggaaggcuucaacugcuacuucccacugcaguccuacggcuuucagcccacaaauggcgugggcuaucagcccuacagagugguggugcugagcuucgaacugcugcaugccccugccacagugugcggcccuaagaaaagcaccaaucucgugaagaacaaaugcgugaacuucaacuucaacggccugaccggcaccggcgugcugacagagagcaacaagaaguuccugccauuccagcaguuuggccgggauaucgccgauaccacagacgccguuagagauccccagacacuggaaauccuggacaucaccccuugcagcuucggcggagugucugugaucaccccuggcaccaacaccagcaaucagguggcagugcuguaccagggcgugaacuguaccgaagugcccguggccauucacgccgaucagcugacaccuacauggcggguguacuccaccggcagcaauguguuucagaccagagccggcugucugaucggagccgagcacgugaacaauagcuacgagugcgacauccccaucggcgcuggaaucugcgccagcuaccagacacagacaaacagcccucggagagccagaagcguggccagccagagcaucauugccuacacaaugucucugggcgccgagaacagcguggccuacuccaacaacucuaucgcuauccccaccaacuucaccaucagcgugaccacagagauccugccuguguccaugaccaagaccagcguggacugcaccauguacaucugcggcgauuccaccgagugcuccaaccugcugcugcaguacggcagcuucugcacccagcugaauagagcccugacagggaucgccguggaacaggacaagaacacccaagagguguucgcccaagugaagcagaucuacaagaccccuccuaucaaggacuucggcggcuucaauuucagccagauucugcccgauccuagcaagcccagcaagcggagcuucaucgaggaccugcuguucaacaaagugacacuggccgacgccggcuucaucaagcaguauggcgauugucugggcgacauugccgccagggaucugauuugcgcccagaaguuuaacggacugacagugcugccuccucugcugaccgaugagaugaucgcccaguacacaucugcccugcuggccggcacaaucacaagcggcuggacauuuggagcaggcgccgcucugcagauccccuuugcuaugcagauggccuaccgguucaacggcaucggagugacccagaaugugcuguacgagaaccagaagcugaucgccaaccaguucaacagcgccaucggcaagauccaggacagccugagcagcacagcaagcgcccugggaaagcugcaggacguggucaaccagaaugcccaggcacugaacacccuggucaagcagcuguccuccaacuucggcgccaucagcucugugcugaacgauauccugagcagacuggacaaggucgaggccgaggugcagaucgacagacugaucacaggcagacugcagagccuccagacauacgugacccagcagcugaucagagccgccgagauuagagccucugccaaucuggccgccaccaagaugucugagugugugcugggccagagcaagagaguggacuuuugcggcaagggcuaccaccugaugagcuucccucagucugccccucacggcgugguguuucugcacgugacauaugugcccgcucaagagaagaauuucaccaccgcuccagccaucugccacgacggcaaagcccacuuuccuagagaaggcguguucguguccaacggcacccauugguucgugacacagcggaacuucuacgagccccagaucaucaccaccgacaacaccuucgugucuggcaacugcgacgucgugaucggcauugugaacaauaccguguacgacccucugcagcccgagcuggacagcuucaaagaggaacuggacaaguacuuuaagaaccacacaagccccgacguggaccugggcgauaucagcggaaucaaugccagcgucgugaacauccagaaagagaucgaccggcugaacgagguggccaagaaucugaacgagagccugaucgaccugcaagaacuggggaaguacgagcaguacaucaaguggcccugguacaucuggcugggcuuuaucgccggacugauugccaucgugauggucacaaucaugcuguguugcaugaccagcugcuguagcugccugaagggcuguuguagcuguggcagcugcugcaaguucgacgaggacgauucugagcccgugcugaagggcgugaaacugcacuacacaugaggacuaguuauaagacugacuagcccgaugggccucccaacgggcccuccuccccuccuugcaccgagauuaaucaaaggcucuuuucagagccaccaaaaaaaaaaaaaaaaaaaaaaaaaaaaaaaaaaaaaaaaaaaaaaaaaaaaaaaaaaaaaaaaaaaaaaaaaaaaaaaaaaaaaaaaaaaaaaaaaaaaa

SEQ ID NO: 24166 - RNA, 4035 nt, Artificial Sequence
  SARS-CoV-2/Wuhan/WIV05/2019__EPI_ISL_402128 spike protein mRNA gc mod (1-1273)(Y453F_D614G)
aggagaaagcuuaccauguucguguuccuggugcugcugccucugguguccagccagugugugaaccugaccaccagaacacagcugccuccagccuacaccaacagcuuuaccagaggcguguacuaccccgacaagguguucagauccagcgugcugcacucuacccaggaccuguuccugccuuucuucagcaacgugaccugguuccacgccauccacguguccggcaccaauggcaccaagagauucgacaaccccgugcugcccuucaacgacgggguguacuuugccagcaccgagaaguccaacaucaucagaggcuggaucuucggcaccacacuggacagcaagacccagagccugcugaucgugaacaacgccaccaacguggucaucaaagugugcgaguuccaguucugcaacgaccccuuccugggcgucuacuaccacaagaacaacaagagcuggauggaaagcgaguuccggguguacagcagcgccaacaacugcaccuucgaguacgugucccagccuuuccugauggaccuggaaggcaagcagggcaacuucaagaaccugcgcgaguucguguuuaagaacaucgacggcuacuucaagaucuacagcaagcacaccccuaucaaccucgugcgggaucugccucagggcuucucugcucuggaaccccugguggaucugcccaucggcaucaacaucacccgguuucagacacugcuggcccugcacagaagcuaccugacaccuggcgauagcagcagcggauggacagcuggugccgccgcuuacuaugugggcuaccugcagccuagaaccuuccugcugaaguacaacgagaacggcaccaucaccgacgccguggauugugcucuggauccucugagcgagacaaagugcacccugaaguccuucaccguggaaaagggcaucuaccagaccagcaacuuccgggugcagcccaccgaauccaucgugcgguuccccaauaucaccaaucugugccccuucggcgagguguucaaugccaccagauucgccucuguguacgccuggaaccggaagcggaucagcaauugcguggccgacuacuccgugcuguacaacuccgccagcuucagcaccuucaagugcuacggcguguccccuaccaagcugaacgaccugugcuucacaaacguguacgccgacagcuucgugauccggggagaugaagugcggcagauugccccuggacagacaggcaagaucgccgacuacaacuacaagcugcccgacgacuucaccggcugugugauugccuggaacagcaacaaccuggacuccaaagucggcggcaacuacaauuaccuguuccggcuguuccggaaguccaaucugaagcccuucgagcgggacaucuccaccgagaucuaucaggccggcagcaccccuuguaacggcguggaaggcuucaacugcuacuucccacugcaguccuacggcuuucagcccacaaauggcgugggcuaucagcccuacagagugguggugcugagcuucgaacugcugcaugccccugccacagugugcggcccuaagaaaagcaccaaucucgugaagaacaaaugcgugaacuucaacuucaacggccugaccggcaccggcgugcugacagagagcaacaagaaguuccugccauuccagcaguuuggccgggauaucgccgauaccacagacgccguuagagauccccagacacuggaaauccuggacaucaccccuugcagcuucggcggagugucugugaucaccccuggcaccaacaccagcaaucagguggcagugcuguaccagggcgugaacuguaccgaagugcccguggccauucacgccgaucagcugacaccuacauggcggguguacuccaccggcagcaauguguuucagaccagagccggcugucugaucggagccgagcacgugaacaauagcuacgagugcgacauccccaucggcgcuggaaucugcgccagcuaccagacacagacaaacagcccucggagagccagaagcguggccagccagagcaucauugccuacacaaugucucugggcgccgagaacagcguggccuacuccaacaacucuaucgcuauccccaccaacuucaccaucagcgugaccacagagauccugccuguguccaugaccaagaccagcguggacugcaccauguacaucugcggcgauuccaccgagugcuccaaccugcugcugcaguacggcagcuucugcacccagcugaauagagcccugacagggaucgccguggaacaggacaagaacacccaagagguguucgcccaagugaagcagaucuacaagaccccuccuaucaaggacuucggcggcuucaauuucagccagauucugcccgauccuagcaagcccagcaagcggagcuucaucgaggaccugcuguucaacaaagugacacuggccgacgccggcuucaucaagcaguauggcgauugucugggcgacauugccgccagggaucugauuugcgcccagaaguuuaacggacugacagugcugccuccucugcugaccgaugagaugaucgcccaguacacaucugcccugcuggccggcacaaucacaagcggcuggacauuuggagcaggcgccgcucugcagauccccuuugcuaugcagauggccuaccgguucaacggcaucggagugacccagaaugugcuguacgagaaccagaagcugaucgccaaccaguucaacagcgccaucggcaagauccaggacagccugagcagcacagcaagcgcccugggaaagcugcaggacguggucaaccagaaugcccaggcacugaacacccuggucaagcagcuguccuccaacuucggcgccaucagcucugugcugaacgauauccugagcagacuggacaaggucgaggccgaggugcagaucgacagacugaucacaggcagacugcagagccuccagacauacgugacccagcagcugaucagagccgccgagauuagagccucugccaaucuggccgccaccaagaugucugagugugugcugggccagagcaagagaguggacuuuugcggcaagggcuaccaccugaugagcuucccucagucugccccucacggcgugguguuucugcacgugacauaugugcccgcucaagagaagaauuucaccaccgcuccagccaucugccacgacggcaaagcccacuuuccuagagaaggcguguucguguccaacggcacccauugguucgugacacagcggaacuucuacgagccccagaucaucaccaccgacaacaccuucgugucuggcaacugcgacgucgugaucggcauugugaacaauaccguguacgacccucugcagcccgagcuggacagcuucaaagaggaacuggacaaguacuuuaagaaccacacaagccccgacguggaccugggcgauaucagcggaaucaaugccagcgucgugaacauccagaaagagaucgaccggcugaacgagguggccaagaaucugaacgagagccugaucgaccugcaagaacuggggaaguacgagcaguacaucaaguggcccugguacaucuggcugggcuuuaucgccggacugauugccaucgugauggucacaaucaugcuguguugcaugaccagcugcuguagcugccugaagggcuguuguagcuguggcagcugcugcaaguucgacgaggacgauucugagcccgugcugaagggcgugaaacugcacuacacaugaggacuaguuauaagacugacuagcccgaugggccucccaacgggcccuccuccccuccuugcaccgagauuaaucaaaggcucuuuucagagccaccaaaaaaaaaaaaaaaaaaaaaaaaaaaaaaaaaaaaaaaaaaaaaaaaaaaaaaaaaaaaaaaaaaaaaaaaaaaaaaaaaaaaaaaaaaaaaaaaaaaaa

SEQ ID NO: 24167 - RNA, 4035 nt, Artificial Sequence
  SARS-CoV-2/Wuhan/WIV05/2019__EPI_ISL_402128 spike protein mRNA gc mod (1-1273)(D614G_I692V)
aggagaaagcuuaccauguucguguuccuggugcugcugccucugguguccagccagugugugaaccugaccaccagaacacagcugccuccagccuacaccaacagcuuuaccagaggcguguacuaccccgacaagguguucagauccagcgugcugcacucuacccaggaccuguuccugccuuucuucagcaacgugaccugguuccacgccauccacguguccggcaccaauggcaccaagagauucgacaaccccgugcugcccuucaacgacgggguguacuuugccagcaccgagaaguccaacaucaucagaggcuggaucuucggcaccacacuggacagcaagacccagagccugcugaucgugaacaacgccaccaacguggucaucaaagugugcgaguuccaguucugcaacgaccccuuccugggcgucuacuaccacaagaacaacaagagcuggauggaaagcgaguuccggguguacagcagcgccaacaacugcaccuucgaguacgugucccagccuuuccugauggaccuggaaggcaagcagggcaacuucaagaaccugcgcgaguucguguuuaagaacaucgacggcuacuucaagaucuacagcaagcacaccccuaucaaccucgugcgggaucugccucagggcuucucugcucuggaaccccugguggaucugcccaucggcaucaacaucacccgguuucagacacugcuggcccugcacagaagcuaccugacaccuggcgauagcagcagcggauggacagcuggugccgccgcuuacuaugugggcuaccugcagccuagaaccuuccugcugaaguacaacgagaacggcaccaucaccgacgccguggauugugcucuggauccucugagcgagacaaagugcacccugaaguccuucaccguggaaaagggcaucuaccagaccagcaacuuccgggugcagcccaccgaauccaucgugcgguuccccaauaucaccaaucugugccccuucggcgagguguucaaugccaccagauucgccucuguguacgccuggaaccggaagcggaucagcaauugcguggccgacuacuccgugcuguacaacuccgccagcuucagcaccuucaagugcuacggcguguccccuaccaagcugaacgaccugugcuucacaaacguguacgccgacagcuucgugauccggggagaugaagugcggcagauugccccuggacagacaggcaagaucgccgacuacaacuacaagcugcccgacgacuucaccggcugugugauugccuggaacagcaacaaccuggacuccaaagucggcggcaacuacaauuaccuguaccggcuguuccggaaguccaaucugaagcccuucgagcgggacaucuccaccgagaucuaucaggccggcagcaccccuuguaacggcguggaaggcuucaacugcuacuucccacugcaguccuacggcuuucagcccacaaauggcgugggcuaucagcccuacagagugguggugcugagcuucgaacugcugcaugccccugccacagugugcggcccuaagaaaagcaccaaucucgugaagaacaaaugcgugaacuucaacuucaacggccugaccggcaccggcgugcugacagagagcaacaagaaguuccugccauuccagcaguuuggccgggauaucgccgauaccacagacgccguuagagauccccagacacuggaaauccuggacaucaccccuugcagcuucggcggagugucugugaucaccccuggcaccaacaccagcaaucagguggcagugcuguaccagggcgugaacuguaccgaagugcccguggccauucacgccgaucagcugacaccuacauggcggguguacuccaccggcagcaauguguuucagaccagagccggcugucugaucggagccgagcacgugaacaauagcuacgagugcgacauccccaucggcgcuggaaucugcgccagcuaccagacacagacaaacagcccucggagagccagaagcguggccagccagagcgugauugccuacacaaugucucugggcgccgagaacagcguggccuacuccaacaacucuaucgcuauccccaccaacuucaccaucagcgugaccacagagauccugccuguguccaugaccaagaccagcguggacugcaccauguacaucugcggcgauuccaccgagugcuccaaccugcugcugcaguacggcagcuucugcacccagcugaauagagcccugacagggaucgccguggaacaggacaagaacacccaagagguguucgcccaagugaagcagaucuacaagaccccuccuaucaaggacuucggcggcuucaauuucagccagauucugcccgauccuagcaagcccagcaagcggagcuucaucgaggaccugcuguucaacaaagugacacuggccgacgccggcuucaucaagcaguauggcgauugucugggcgacauugccgccagggaucugauuugcgcccagaaguuuaacggacugacagugcugccuccucugcugaccgaugagaugaucgcccaguacacaucugcccugcuggccggcacaaucacaagcggcuggacauuuggagcaggcgccgcucugcagauccccuuugcuaugcagauggccuaccgguucaacggcaucggagugacccagaaugugcuguacgagaaccagaagcugaucgccaaccaguucaacagcgccaucggcaagauccaggacagccugagcagcacagcaagcgcccugggaaagcugcaggacguggucaaccagaaugcccaggcacugaacacccuggucaagcagcuguccuccaacuucggcgccaucagcucugugcugaacgauauccugagcagacuggacaaggucgaggccgaggugcagaucgacagacugaucacaggcagacugcagagccuccagacauacgugacccagcagcugaucagagccgccgagauuagagccucugccaaucuggccgccaccaagaugucugagugugugcugggccagagcaagagaguggacuuuugcggcaagggcuaccaccugaugagcuucccucagucugccccucacggcgugguguuucugcacgugacauaugugcccgcucaagagaagaauuucaccaccgcuccagccaucugccacgacggcaaagcccacuuuccuagagaaggcguguucguguccaacggcacccauugguucgugacacagcggaacuucuacgagccccagaucaucaccaccgacaacaccuucgugucuggcaacugcgacgucgugaucggcauugugaacaauaccguguacgacccucugcagcccgagcuggacagcuucaaagaggaacuggacaaguacuuuaagaaccacacaagccccgacguggaccugggcgauaucagcggaaucaaugccagcgucgugaacauccagaaagagaucgaccggcugaacgagguggccaagaaucugaacgagagccugaucgaccugcaagaacuggggaaguacgagcaguacaucaaguggcccugguacaucuggcugggcuuuaucgccggacugauugccaucgugauggucacaaucaugcuguguugcaugaccagcugcuguagcugccugaagggcuguuguagcuguggcagcugcugcaaguucgacgaggacgauucugagcccgugcugaagggcgugaaacugcacuacacaugaggacuaguuauaagacugacuagcccgaugggccucccaacgggcccuccuccccuccuugcaccgagauuaaucaaaggcucuuuucagagccaccaaaaaaaaaaaaaaaaaaaaaaaaaaaaaaaaaaaaaaaaaaaaaaaaaaaaaaaaaaaaaaaaaaaaaaaaaaaaaaaaaaaaaaaaaaaaaaaaaaaaa

SEQ ID NO: 24168 - RNA, 4035 nt, Artificial Sequence
  SARS-CoV-2/Wuhan/WIV05/2019__EPI_ISL_402128 spike protein mRNA gc mod (1-1273)(D614G_M1229I)
aggagaaagcuuaccauguucguguuccuggugcugcugccucugguguccagccagugugugaaccugaccaccagaacacagcugccuccagccuacaccaacagcuuuaccagaggcguguacuaccccgacaagguguucagauccagcgugcugcacucuacccaggaccuguuccugccuuucuucagcaacgugaccugguuccacgccauccacguguccggcaccaauggcaccaagagauucgacaaccccgugcugcccuucaacgacgggguguacuuugccagcaccgagaaguccaacaucaucagaggcuggaucuucggcaccacacuggacagcaagacccagagccugcugaucgugaacaacgccaccaacguggucaucaaagugugcgaguuccaguucugcaacgaccccuuccugggcgucuacuaccacaagaacaacaagagcuggauggaaagcgaguuccggguguacagcagcgccaacaacugcaccuucgaguacgugucccagccuuuccugauggaccuggaaggcaagcagggcaacuucaagaaccugcgcgaguucguguuuaagaacaucgacggcuacuucaagaucuacagcaagcacaccccuaucaaccucgugcgggaucugccucagggcuucucugcucuggaaccccugguggaucugcccaucggcaucaacaucacccgguuucagacacugcuggcccugcacagaagcuaccugacaccuggcgauagcagcagcggauggacagcuggugccgccgcuuacuaugugggcuaccugcagccuagaaccuuccugcugaaguacaacgagaacggcaccaucaccgacgccguggauugugcucuggauccucugagcgagacaaagugcacccugaaguccuucaccguggaaaagggcaucuaccagaccagcaacuuccgggugcagcccaccgaauccaucgugcgguuccccaauaucaccaaucugugccccuucggcgagguguucaaugccaccagauucgccucuguguacgccuggaaccggaagcggaucagcaauugcguggccgacuacuccgugcuguacaacuccgccagcuucagcaccuucaagugcuacggcguguccccuaccaagcugaacgaccugugcuucacaaacguguacgccgacagcuucgugauccggggagaugaagugcggcagauugccccuggacagacaggcaagaucgccgacuacaacuacaagcugcccgacgacuucaccggcugugugauugccuggaacagcaacaaccuggacuccaaagucggcggcaacuacaauuaccuguaccggcuguuccggaaguccaaucugaagcccuucgagcgggacaucuccaccgagaucuaucaggccggcagcaccccuuguaacggcguggaaggcuucaacugcuacuucccacugcaguccuacggcuuucagcccacaaauggcgugggcuaucagcccuacagagugguggugcugagcuucgaacugcugcaugccccugccacagugugcggcccuaagaaaagcaccaaucucgugaagaacaaaugcgugaacuucaacuucaacggccugaccggcaccggcgugcugacagagagcaacaagaaguuccugccauuccagcaguuuggccgggauaucgccgauaccacagacgccguuagagauccccagacacuggaaauccuggacaucaccccuugcagcuucggcggagugucugugaucaccccuggcaccaacaccagcaaucagguggcagugcuguaccagggcgugaacuguaccgaagugcccguggccauucacgccgaucagcugacaccuacauggcggguguacuccaccggcagcaauguguuucagaccagagccggcugucugaucggagccgagcacgugaacaauagcuacgagugcgacauccccaucggcgcuggaaucugcgccagcuaccagacacagacaaacagcccucggagagccagaagcguggccagccagagcaucauugccuacacaaugucucugggcgccgagaacagcguggccuacuccaacaacucuaucgcuauccccaccaacuucaccaucagcgugaccacagagauccugccuguguccaugaccaagaccagcguggacugcaccauguacaucugcggcgauuccaccgagugcuccaaccugcugcugcaguacggcagcuucugcacccagcugaauagagcccugacagggaucgccguggaacaggacaagaacacccaagagguguucgcccaagugaagcagaucuacaagaccccuccuaucaaggacuucggcggcuucaauuucagccagauucugcccgauccuagcaagcccagcaagcggagcuucaucgaggaccugcuguucaacaaagugacacuggccgacgccggcuucaucaagcaguauggcgauugucugggcgacauugccgccagggaucugauuugcgcccagaaguuuaacggacugacagugcugccuccucugcugaccgaugagaugaucgcccaguacacaucugcccugcuggccggcacaaucacaagcggcuggacauuuggagcaggcgccgcucugcagauccccuuugcuaugcagauggccuaccgguucaacggcaucggagugacccagaaugugcuguacgagaaccagaagcugaucgccaaccaguucaacagcgccaucggcaagauccaggacagccugagcagcacagcaagcgcccugggaaagcugcaggacguggucaaccagaaugcccaggcacugaacacccuggucaagcagcuguccuccaacuucggcgccaucagcucugugcugaacgauauccugagcagacuggacaaggucgaggccgaggugcagaucgacagacugaucacaggcagacugcagagccuccagacauacgugacccagcagcugaucagagccgccgagauuagagccucugccaaucuggccgccaccaagaugucugagugugugcugggccagagcaagagaguggacuuuugcggcaagggcuaccaccugaugagcuucccucagucugccccucacggcgugguguuucugcacgugacauaugugcccgcucaagagaagaauuucaccaccgcuccagccaucugccacgacggcaaagcccacuuuccuagagaaggcguguucguguccaacggcacccauugguucgugacacagcggaacuucuacgagccccagaucaucaccaccgacaacaccuucgugucuggcaacugcgacgucgugaucggcauugugaacaauaccguguacgacccucugcagcccgagcuggacagcuucaaagaggaacuggacaaguacuuuaagaaccacacaagccccgacguggaccugggcgauaucagcggaaucaaugccagcgucgugaacauccagaaagagaucgaccggcugaacgagguggccaagaaucugaacgagagccugaucgaccugcaagaacuggggaaguacgagcaguacaucaaguggcccugguacaucuggcugggcuuuaucgccggacugauugccaucgugaucgucacaaucaugcuguguugcaugaccagcugcuguagcugccugaagggcuguuguagcuguggcagcugcugcaaguucgacgaggacgauucugagcccgugcugaagggcgugaaacugcacuacacaugaggacuaguuauaagacugacuagcccgaugggccucccaacgggcccuccuccccuccuugcaccgagauuaaucaaaggcucuuuucagagccaccaaaaaaaaaaaaaaaaaaaaaaaaaaaaaaaaaaaaaaaaaaaaaaaaaaaaaaaaaaaaaaaaaaaaaaaaaaaaaaaaaaaaaaaaaaaaaaaaaaaaa

SEQ ID NO: 24169 - RNA, 4029 nt, Artificial Sequence
  SARS-CoV-2/Wuhan/WIV05/2019__EPI_ISL_402128 spike protein mRNA gc mod (1-1273)(H69del_V70del_A222V_Y453F_S477N_D614G_I692V)
aggagaaagcuuaccauguucguguuccuggugcugcugccucugguguccagccagugugugaaccugaccaccagaacacagcugccuccagccuacaccaacagcuuuaccagaggcguguacuaccccgacaagguguucagauccagcgugcugcacucuacccaggaccuguuccugccuuucuucagcaacgugaccugguuccacgccaucuccggcaccaauggcaccaagagauucgacaaccccgugcugcccuucaacgacgggguguacuuugccagcaccgagaaguccaacaucaucagaggcuggaucuucggcaccacacuggacagcaagacccagagccugcugaucgugaacaacgccaccaacguggucaucaaagugugcgaguuccaguucugcaacgaccccuuccugggcgucuacuaccacaagaacaacaagagcuggauggaaagcgaguuccggguguacagcagcgccaacaacugcaccuucgaguacgugucccagccuuuccugauggaccuggaaggcaagcagggcaacuucaagaaccugcgcgaguucguguuuaagaacaucgacggcuacuucaagaucuacagcaagcacaccccuaucaaccucgugcgggaucugccucagggcuucucugugcuggaaccccugguggaucugcccaucggcaucaacaucacccgguuucagacacugcuggcccugcacagaagcuaccugacaccuggcgauagcagcagcggauggacagcuggugccgccgcuuacuaugugggcuaccugcagccuagaaccuuccugcugaaguacaacgagaacggcaccaucaccgacgccguggauugugcucuggauccucugagcgagacaaagugcacccugaaguccuucaccguggaaaagggcaucuaccagaccagcaacuuccgggugcagcccaccgaauccaucgugcgguuccccaauaucaccaaucugugccccuucggcgagguguucaaugccaccagauucgccucuguguacgccuggaaccggaagcggaucagcaauugcguggccgacuacuccgugcuguacaacuccgccagcuucagcaccuucaagugcuacggcguguccccuaccaagcugaacgaccugugcuucacaaacguguacgccgacagcuucgugauccggggagaugaagugcggcagauugccccuggacagacaggcaagaucgccgacuacaacuacaagcugcccgacgacuucaccggcugugugauugccuggaacagcaacaaccuggacuccaaagucggcggcaacuacaauuaccuguuccggcuguuccggaaguccaaucugaagcccuucgagcgggacaucuccaccgagaucuaucaggccggcaacaccccuuguaacggcguggaaggcuucaacugcuacuucccacugcaguccuacggcuuucagcccacaaauggcgugggcuaucagcccuacagagugguggugcugagcuucgaacugcugcaugccccugccacagugugcggcccuaagaaaagcaccaaucucgugaagaacaaaugcgugaacuucaacuucaacggccugaccggcaccggcgugcugacagagagcaacaagaaguuccugccauuccagcaguuuggccgggauaucgccgauaccacagacgccguuagagauccccagacacuggaaauccuggacaucaccccuugcagcuucggcggagugucugugaucaccccuggcaccaacaccagcaaucagguggcagugcuguaccagggcgugaacuguaccgaagugcccguggccauucacgccgaucagcugacaccuacauggcggguguacuccaccggcagcaauguguuucagaccagagccggcugucugaucggagccgagcacgugaacaauagcuacgagugcgacauccccaucggcgcuggaaucugcgccagcuaccagacacagacaaacagcccucggagagccagaagcguggccagccagagcgugauugccuacacaaugucucugggcgccgagaacagcguggccuacuccaacaacucuaucgcuauccccaccaacuucaccaucagcgugaccacagagauccugccuguguccaugaccaagaccagcguggacugcaccauguacaucugcggcgauuccaccgagugcuccaaccugcugcugcaguacggcagcuucugcacccagcugaauagagcccugacagggaucgccguggaacaggacaagaacacccaagagguguucgcccaagugaagcagaucuacaagaccccuccuaucaaggacuucggcggcuucaauuucagccagauucugcccgauccuagcaagcccagcaagcggagcuucaucgaggaccugcuguucaacaaagugacacuggccgacgccggcuucaucaagcaguauggcgauugucugggcgacauugccgccagggaucugauuugcgcccagaaguuuaacggacugacagugcugccuccucugcugaccgaugagaugaucgcccaguacacaucugcccugcuggccggcacaaucacaagcggcuggacauuuggagcaggcgccgcucugcagauccccuuugcuaugcagauggccuaccgguucaacggcaucggagugacccagaaugugcuguacgagaaccagaagcugaucgccaaccaguucaacagcgccaucggcaagauccaggacagccugagcagcacagcaagcgcccugggaaagcugcaggacguggucaaccagaaugcccaggcacugaacacccuggucaagcagcuguccuccaacuucggcgccaucagcucugugcugaacgauauccugagcagacuggacaaggucgaggccgaggugcagaucgacagacugaucacaggcagacugcagagccuccagacauacgugacccagcagcugaucagagccgccgagauuagagccucugccaaucuggccgccaccaagaugucugagugugugcugggccagagcaagagaguggacuuuugcggcaagggcuaccaccugaugagcuucccucagucugccccucacggcgugguguuucugcacgugacauaugugcccgcucaagagaagaauuucaccaccgcuccagccaucugccacgacggcaaagcccacuuuccuagagaaggcguguucguguccaacggcacccauugguucgugacacagcggaacuucuacgagccccagaucaucaccaccgacaacaccuucgugucuggcaacugcgacgucgugaucggcauugugaacaauaccguguacgacccucugcagcccgagcuggacagcuucaaagaggaacuggacaaguacuuuaagaaccacacaagccccgacguggaccugggcgauaucagcggaaucaaugccagcgucgugaacauccagaaagagaucgaccggcugaacgagguggccaagaaucugaacgagagccugaucgaccugcaagaacuggggaaguacgagcaguacaucaaguggcccugguacaucuggcugggcuuuaucgccggacugauugccaucgugauggucacaaucaugcuguguugcaugaccagcugcuguagcugccugaagggcuguuguagcuguggcagcugcugcaaguucgacgaggacgauucugagcccgugcugaagggcgugaaacugcacuacacaugaggacuaguuauaagacugacuagcccgaugggccucccaacgggcccuccuccccuccuugcaccgagauuaaucaaaggcucuuuucagagccaccaaaaaaaaaaaaaaaaaaaaaaaaaaaaaaaaaaaaaaaaaaaaaaaaaaaaaaaaaaaaaaaaaaaaaaaaaaaaaaaaaaaaaaaaaaaaaaaaaaaaa

SEQ ID NO: 24170 - RNA, 4029 nt, Artificial Sequence
  SARS-CoV-2/Wuhan/WIV05/2019__EPI_ISL_402128 spike protein mRNA gc mod (1-1273)(H69del_V70del_Y453F_D614G_I692V_M1229I)
aggagaaagcuuaccauguucguguuccuggugcugcugccucugguguccagccagugugugaaccugaccaccagaacacagcugccuccagccuacaccaacagcuuuaccagaggcguguacuaccccgacaagguguucagauccagcgugcugcacucuacccaggaccuguuccugccuuucuucagcaacgugaccugguuccacgccaucuccggcaccaauggcaccaagagauucgacaaccccgugcugcccuucaacgacgggguguacuuugccagcaccgagaaguccaacaucaucagaggcuggaucuucggcaccacacuggacagcaagacccagagccugcugaucgugaacaacgccaccaacguggucaucaaagugugcgaguuccaguucugcaacgaccccuuccugggcgucuacuaccacaagaacaacaagagcuggauggaaagcgaguuccggguguacagcagcgccaacaacugcaccuucgaguacgugucccagccuuuccugauggaccuggaaggcaagcagggcaacuucaagaaccugcgcgaguucguguuuaagaacaucgacggcuacuucaagaucuacagcaagcacaccccuaucaaccucgugcgggaucugccucagggcuucucugcucuggaaccccugguggaucugcccaucggcaucaacaucacccgguuucagacacugcuggcccugcacagaagcuaccugacaccuggcgauagcagcagcggauggacagcuggugccgccgcuuacuaugugggcuaccugcagccuagaaccuuccugcugaaguacaacgagaacggcaccaucaccgacgccguggauugugcucuggauccucugagcgagacaaagugcacccugaaguccuucaccguggaaaagggcaucuaccagaccagcaacuuccgggugcagcccaccgaauccaucgugcgguuccccaauaucaccaaucugugccccuucggcgagguguucaaugccaccagauucgccucuguguacgccuggaaccggaagcggaucagcaauugcguggccgacuacuccgugcuguacaacuccgccagcuucagcaccuucaagugcuacggcguguccccuaccaagcugaacgaccugugcuucacaaacguguacgccgacagcuucgugauccggggagaugaagugcggcagauugccccuggacagacaggcaagaucgccgacuacaacuacaagcugcccgacgacuucaccggcugugugauugccuggaacagcaacaaccuggacuccaaagucggcggcaacuacaauuaccuguuccggcuguuccggaaguccaaucugaagcccuucgagcgggacaucuccaccgagaucuaucaggccggcagcaccccuuguaacggcguggaaggcuucaacugcuacuucccacugcaguccuacggcuuucagcccacaaauggcgugggcuaucagcccuacagagugguggugcugagcuucgaacugcugcaugccccugccacagugugcggcccuaagaaaagcaccaaucucgugaagaacaaaugcgugaacuucaacuucaacggccugaccggcaccggcgugcugacagagagcaacaagaaguuccugccauuccagcaguuuggccgggauaucgccgauaccacagacgccguuagagauccccagacacuggaaauccuggacaucaccccuugcagcuucggcggagugucugugaucaccccuggcaccaacaccagcaaucagguggcagugcuguaccagggcgugaacuguaccgaagugcccguggccauucacgccgaucagcugacaccuacauggcggguguacuccaccggcagcaauguguuucagaccagagccggcugucugaucggagccgagcacgugaacaauagcuacgagugcgacauccccaucggcgcuggaaucugcgccagcuaccagacacagacaaacagcccucggagagccagaagcguggccagccagagcgugauugccuacacaaugucucugggcgccgagaacagcguggccuacuccaacaacucuaucgcuauccccaccaacuucaccaucagcgugaccacagagauccugccuguguccaugaccaagaccagcguggacugcaccauguacaucugcggcgauuccaccgagugcuccaaccugcugcugcaguacggcagcuucugcacccagcugaauagagcccugacagggaucgccguggaacaggacaagaacacccaagagguguucgcccaagugaagcagaucuacaagaccccuccuaucaaggacuucggcggcuucaauuucagccagauucugcccgauccuagcaagcccagcaagcggagcuucaucgaggaccugcuguucaacaaagugacacuggccgacgccggcuucaucaagcaguauggcgauugucugggcgacauugccgccagggaucugauuugcgcccagaaguuuaacggacugacagugcugccuccucugcugaccgaugagaugaucgcccaguacacaucugcccugcuggccggcacaaucacaagcggcuggacauuuggagcaggcgccgcucugcagauccccuuugcuaugcagauggccuaccgguucaacggcaucggagugacccagaaugugcuguacgagaaccagaagcugaucgccaaccaguucaacagcgccaucggcaagauccaggacagccugagcagcacagcaagcgcccugggaaagcugcaggacguggucaaccagaaugcccaggcacugaacacccuggucaagcagcuguccuccaacuucggcgccaucagcucugugcugaacgauauccugagcagacuggacaaggucgaggccgaggugcagaucgacagacugaucacaggcagacugcagagccuccagacauacgugacccagcagcugaucagagccgccgagauuagagccucugccaaucuggccgccaccaagaugucugagugugugcugggccagagcaagagaguggacuuuugcggcaagggcuaccaccugaugagcuucccucagucugccccucacggcgugguguuucugcacgugacauaugugcccgcucaagagaagaauuucaccaccgcuccagccaucugccacgacggcaaagcccacuuuccuagagaaggcguguucguguccaacggcacccauugguucgugacacagcggaacuucuacgagccccagaucaucaccaccgacaacaccuucgugucuggcaacugcgacgucgugaucggcauugugaacaauaccguguacgacccucugcagcccgagcuggacagcuucaaagaggaacuggacaaguacuuuaagaaccacacaagccccgacguggaccugggcgauaucagcggaaucaaugccagcgucgugaacauccagaaagagaucgaccggcugaacgagguggccaagaaucugaacgagagccugaucgaccugcaagaacuggggaaguacgagcaguacaucaaguggcccugguacaucuggcugggcuuuaucgccggacugauugccaucgugaucgucacaaucaugcuguguugcaugaccagcugcuguagcugccugaagggcuguuguagcuguggcagcugcugcaaguucgacgaggacgauucugagcccgugcugaagggcgugaaacugcacuacacaugaggacuaguuauaagacugacuagcccgaugggccucccaacgggcccuccuccccuccuugcaccgagauuaaucaaaggcucuuuucagagccaccaaaaaaaaaaaaaaaaaaaaaaaaaaaaaaaaaaaaaaaaaaaaaaaaaaaaaaaaaaaaaaaaaaaaaaaaaaaaaaaaaaaaaaaaaaaaaaaaaaaaa

SEQ ID NO: 24171 - RNA, 4026 nt, Artificial Sequence
  SARS-CoV-2/Wuhan/WIV05/2019__EPI_ISL_402128 spike protein mRNA gc mod (1-1273)(H69del_V70del_Y144del_N501Y_A570D_D614G_P681H_T716I_S982 A_D1118H)
aggagaaagcuuaccauguucguguuccuggugcugcugccucugguguccagccagugugugaaccugaccaccagaacacagcugccuccagccuacaccaacagcuuuaccagaggcguguacuaccccgacaagguguucagauccagcgugcugcacucuacccaggaccuguuccugccuuucuucagcaacgugaccugguuccacgccaucuccggcaccaauggcaccaagagauucgacaaccccgugcugcccuucaacgacgggguguacuuugccagcaccgagaaguccaacaucaucagaggcuggaucuucggcaccacacuggacagcaagacccagagccugcugaucgugaacaacgccaccaacguggucaucaaagugugcgaguuccaguucugcaacgaccccuuccugggcgucuaccacaagaacaacaagagcuggauggaaagcgaguuccggguguacagcagcgccaacaacugcaccuucgaguacgugucccagccuuuccugauggaccuggaaggcaagcagggcaacuucaagaaccugcgcgaguucguguuuaagaacaucgacggcuacuucaagaucuacagcaagcacaccccuaucaaccucgugcgggaucugccucagggcuucucugcucuggaaccccugguggaucugcccaucggcaucaacaucacccgguuucagacacugcuggcccugcacagaagcuaccugacaccuggcgauagcagcagcggauggacagcuggugccgccgcuuacuaugugggcuaccugcagccuagaaccuuccugcugaaguacaacgagaacggcaccaucaccgacgccguggauugugcucuggauccucugagcgagacaaagugcacccugaaguccuucaccguggaaaagggcaucuaccagaccagcaacuuccgggugcagcccaccgaauccaucgugcgguuccccaauaucaccaaucugugccccuucggcgagguguucaaugccaccagauucgccucuguguacgccuggaaccggaagcggaucagcaauugcguggccgacuacuccgugcuguacaacuccgccagcuucagcaccuucaagugcuacggcguguccccuaccaagcugaacgaccugugcuucacaaacguguacgccgacagcuucgugauccggggagaugaagugcggcagauugccccuggacagacaggcaagaucgccgacuacaacuacaagcugcccgacgacuucaccggcugugugauugccuggaacagcaacaaccuggacuccaaagucggcggcaacuacaauuaccuguaccggcuguuccggaaguccaaucugaagcccuucgagcgggacaucuccaccgagaucuaucaggccggcagcaccccuuguaacggcguggaaggcuucaacugcuacuucccacugcaguccuacggcuuucagcccacauacggcgugggcuaucagcccuacagagugguggugcugagcuucgaacugcugcaugccccugccacagugugcggcccuaagaaaagcaccaaucucgugaagaacaaaugcgugaacuucaacuucaacggccugaccggcaccggcgugcugacagagagcaacaagaaguuccugccauuccagcaguuuggccgggauaucgacgauaccacagacgccguuagagauccccagacacuggaaauccuggacaucaccccuugcagcuucggcggagugucugugaucaccccuggcaccaacaccagcaaucagguggcagugcuguaccagggcgugaacuguaccgaagugcccguggccauucacgccgaucagcugacaccuacauggcggguguacuccaccggcagcaauguguuucagaccagagccggcugucugaucggagccgagcacgugaacaauagcuacgagugcgacauccccaucggcgcuggaaucugcgccagcuaccagacacagacaaacagccaccggagagccagaagcguggccagccagagcaucauugccuacacaaugucucugggcgccgagaacagcguggccuacuccaacaacucuaucgcuauccccaucaacuucaccaucagcgugaccacagagauccugccuguguccaugaccaagaccagcguggacugcaccauguacaucugcggcgauuccaccgagugcuccaaccugcugcugcaguacggcagcuucugcacccagcugaauagagcccugacagggaucgccguggaacaggacaagaacacccaagagguguucgcccaagugaagcagaucuacaagaccccuccuaucaaggacuucggcggcuucaauuucagccagauucugcccgauccuagcaagcccagcaagcggagcuucaucgaggaccugcuguucaacaaagugacacuggccgacgccggcuucaucaagcaguauggcgauugucugggcgacauugccgccagggaucugauuugcgcccagaaguuuaacggacugacagugcugccuccucugcugaccgaugagaugaucgcccaguacacaucugcccugcuggccggcacaaucacaagcggcuggacauuuggagcaggcgccgcucugcagauccccuuugcuaugcagauggccuaccgguucaacggcaucggagugacccagaaugugcuguacgagaaccagaagcugaucgccaaccaguucaacagcgccaucggcaagauccaggacagccugagcagcacagcaagcgcccugggaaagcugcaggacguggucaaccagaaugcccaggcacugaacacccuggucaagcagcuguccuccaacuucggcgccaucagcucugugcugaacgauauccuggccagacuggacaaggucgaggccgaggugcagaucgacagacugaucacaggcagacugcagagccuccagacauacgugacccagcagcugaucagagccgccgagauuagagccucugccaaucuggccgccaccaagaugucugagugugugcugggccagagcaagagaguggacuuuugcggcaagggcuaccaccugaugagcuucccucagucugccccucacggcgugguguuucugcacgugacauaugugcccgcucaagagaagaauuucaccaccgcuccagccaucugccacgacggcaaagcccacuuuccuagagaaggcguguucguguccaacggcacccauugguucgugacacagcggaacuucuacgagccccagaucaucaccacccacaacaccuucgugucuggcaacugcgacgucgugaucggcauugugaacaauaccguguacgacccucugcagcccgagcuggacagcuucaaagaggaacuggacaaguacuuuaagaaccacacaagccccgacguggaccugggcgauaucagcggaaucaaugccagcgucgugaacauccagaaagagaucgaccggcugaacgagguggccaagaaucugaacgagagccugaucgaccugcaagaacuggggaaguacgagcaguacaucaaguggcccugguacaucuggcugggcuuuaucgccggacugauugccaucgugauggucacaaucaugcuguguugcaugaccagcugcuguagcugccugaagggcuguuguagcuguggcagcugcugcaaguucgacgaggacgauucugagcccgugcugaagggcgugaaacugcacuacacaugaggacuaguuauaagacugacuagcccgaugggccucccaacgggcccuccuccccuccuugcaccgagauuaaucaaaggcucuuuucagagccaccaaaaaaaaaaaaaaaaaaaaaaaaaaaaaaaaaaaaaaaaaaaaaaaaaaaaaaaaaaaaaaaaaaaaaaaaaaaaaaaaaaaaaaaaaaaaaaaaaaaaa

SEQ ID NO: 24172 - RNA, 4035 nt, Artificial Sequence
  SARS-CoV-2/Wuhan/WIV05/2019__EPI_ISL_402128 spike protein mRNA gc mod (1-1273)(K417N_E484K_N501Y_D614G)
aggagaaagcuuaccauguucguguuccuggugcugcugccucugguguccagccagugugugaaccugaccaccagaacacagcugccuccagccuacaccaacagcuuuaccagaggcguguacuaccccgacaagguguucagauccagcgugcugcacucuacccaggaccuguuccugccuuucuucagcaacgugaccugguuccacgccauccacguguccggcaccaauggcaccaagagauucgacaaccccgugcugcccuucaacgacgggguguacuuugccagcaccgagaaguccaacaucaucagaggcuggaucuucggcaccacacuggacagcaagacccagagccugcugaucgugaacaacgccaccaacguggucaucaaagugugcgaguuccaguucugcaacgaccccuuccugggcgucuacuaccacaagaacaacaagagcuggauggaaagcgaguuccggguguacagcagcgccaacaacugcaccuucgaguacgugucccagccuuuccugauggaccuggaaggcaagcagggcaacuucaagaaccugcgcgaguucguguuuaagaacaucgacggcuacuucaagaucuacagcaagcacaccccuaucaaccucgugcgggaucugccucagggcuucucugcucuggaaccccugguggaucugcccaucggcaucaacaucacccgguuucagacacugcuggcccugcacagaagcuaccugacaccuggcgauagcagcagcggauggacagcuggugccgccgcuuacuaugugggcuaccugcagccuagaaccuuccugcugaaguacaacgagaacggcaccaucaccgacgccguggauugugcucuggauccucugagcgagacaaagugcacccugaaguccuucaccguggaaaagggcaucuaccagaccagcaacuuccgggugcagcccaccgaauccaucgugcgguuccccaauaucaccaaucugugccccuucggcgagguguucaaugccaccagauucgccucuguguacgccuggaaccggaagcggaucagcaauugcguggccgacuacuccgugcuguacaacuccgccagcuucagcaccuucaagugcuacggcguguccccuaccaagcugaacgaccugugcuucacaaacguguacgccgacagcuucgugauccggggagaugaagugcggcagauugccccuggacagacaggcaacaucgccgacuacaacuacaagcugcccgacgacuucaccggcugugugauugccuggaacagcaacaaccuggacuccaaagucggcggcaacuacaauuaccuguaccggcuguuccggaaguccaaucugaagcccuucgagcgggacaucuccaccgagaucuaucaggccggcagcaccccuuguaacggcgugaagggcuucaacugcuacuucccacugcaguccuacggcuuucagcccacauacggcgugggcuaucagcccuacagagugguggugcugagcuucgaacugcugcaugccccugccacagugugcggcccuaagaaaagcaccaaucucgugaagaacaaaugcgugaacuucaacuucaacggccugaccggcaccggcgugcugacagagagcaacaagaaguuccugccauuccagcaguuuggccgggauaucgccgauaccacagacgccguuagagauccccagacacuggaaauccuggacaucaccccuugcagcuucggcggagugucugugaucaccccuggcaccaacaccagcaaucagguggcagugcuguaccagggcgugaacuguaccgaagugcccguggccauucacgccgaucagcugacaccuacauggcggguguacuccaccggcagcaauguguuucagaccagagccggcugucugaucggagccgagcacgugaacaauagcuacgagugcgacauccccaucggcgcuggaaucugcgccagcuaccagacacagacaaacagcccucggagagccagaagcguggccagccagagcaucauugccuacacaaugucucugggcgccgagaacagcguggccuacuccaacaacucuaucgcuauccccaccaacuucaccaucagcgugaccacagagauccugccuguguccaugaccaagaccagcguggacugcaccauguacaucugcggcgauuccaccgagugcuccaaccugcugcugcaguacggcagcuucugcacccagcugaauagagcccugacagggaucgccguggaacaggacaagaacacccaagagguguucgcccaagugaagcagaucuacaagaccccuccuaucaaggacuucggcggcuucaauuucagccagauucugcccgauccuagcaagcccagcaagcggagcuucaucgaggaccugcuguucaacaaagugacacuggccgacgccggcuucaucaagcaguauggcgauugucugggcgacauugccgccagggaucugauuugcgcccagaaguuuaacggacugacagugcugccuccucugcugaccgaugagaugaucgcccaguacacaucugcccugcuggccggcacaaucacaagcggcuggacauuuggagcaggcgccgcucugcagauccccuuugcuaugcagauggccuaccgguucaacggcaucggagugacccagaaugugcuguacgagaaccagaagcugaucgccaaccaguucaacagcgccaucggcaagauccaggacagccugagcagcacagcaagcgcccugggaaagcugcaggacguggucaaccagaaugcccaggcacugaacacccuggucaagcagcuguccuccaacuucggcgccaucagcucugugcugaacgauauccugagcagacuggacaaggucgaggccgaggugcagaucgacagacugaucacaggcagacugcagagccuccagacauacgugacccagcagcugaucagagccgccgagauuagagccucugccaaucuggccgccaccaagaugucugagugugugcugggccagagcaagagaguggacuuuugcggcaagggcuaccaccugaugagcuucccucagucugccccucacggcgugguguuucugcacgugacauaugugcccgcucaagagaagaauuucaccaccgcuccagccaucugccacgacggcaaagcccacuuuccuagagaaggcguguucguguccaacggcacccauugguucgugacacagcggaacuucuacgagccccagaucaucaccaccgacaacaccuucgugucuggcaacugcgacgucgugaucggcauugugaacaauaccguguacgacccucugcagcccgagcuggacagcuucaaagaggaacuggacaaguacuuuaagaaccacacaagccccgacguggaccugggcgauaucagcggaaucaaugccagcgucgugaacauccagaaagagaucgaccggcugaacgagguggccaagaaucugaacgagagccugaucgaccugcaagaacuggggaaguacgagcaguacaucaaguggcccugguacaucuggcugggcuuuaucgccggacugauugccaucgugauggucacaaucaugcuguguugcaugaccagcugcuguagcugccugaagggcuguuguagcuguggcagcugcugcaaguucgacgaggacgauucugagcccgugcugaagggcgugaaacugcacuacacaugaggacuaguuauaagacugacuagcccgaugggccucccaacgggcccuccuccccuccuugcaccgagauuaaucaaaggcucuuuucagagccaccaaaaaaaaaaaaaaaaaaaaaaaaaaaaaaaaaaaaaaaaaaaaaaaaaaaaaaaaaaaaaaaaaaaaaaaaaaaaaaaaaaaaaaaaaaaaaaaaaaaaa

SEQ ID NO: 24173 - RNA, 4026 nt, Artificial Sequence
  SARS-CoV-2/Wuhan/WIV05/2019__EPI_ISL_402128 spike protein mRNA gc mod (1-1273)(L18F_D80A_D215G_L242del_A243del_L244del_R246I_K417N_E484 K_N501Y_D614G_A701V)
aggagaaagcuuaccauguucguguuccuggugcugcugccucugguguccagccagugugugaacuucaccaccagaacacagcugccuccagccuacaccaacagcuuuaccagaggcguguacuaccccgacaagguguucagauccagcgugcugcacucuacccaggaccuguuccugccuuucuucagcaacgugaccugguuccacgccauccacguguccggcaccaauggcaccaagagauucgccaaccccgugcugcccuucaacgacgggguguacuuugccagcaccgagaaguccaacaucaucagaggcuggaucuucggcaccacacuggacagcaagacccagagccugcugaucgugaacaacgccaccaacguggucaucaaagugugcgaguuccaguucugcaacgaccccuuccugggcgucuacuaccacaagaacaacaagagcuggauggaaagcgaguuccggguguacagcagcgccaacaacugcaccuucgaguacgugucccagccuuuccugauggaccuggaaggcaagcagggcaacuucaagaaccugcgcgaguucguguuuaagaacaucgacggcuacuucaagaucuacagcaagcacaccccuaucaaccucgugcggggccugccucagggcuucucugcucuggaaccccugguggaucugcccaucggcaucaacaucacccgguuucagacacugcacaucagcuaccugacaccuggcgauagcagcagcggauggacagcuggugccgccgcuuacuaugugggcuaccugcagccuagaaccuuccugcugaaguacaacgagaacggcaccaucaccgacgccguggauugugcucuggauccucugagcgagacaaagugcacccugaaguccuucaccguggaaaagggcaucuaccagaccagcaacuuccgggugcagcccaccgaauccaucgugcgguuccccaauaucaccaaucugugccccuucggcgagguguucaaugccaccagauucgccucuguguacgccuggaaccggaagcggaucagcaauugcguggccgacuacuccgugcuguacaacuccgccagcuucagcaccuucaagugcuacggcguguccccuaccaagcugaacgaccugugcuucacaaacguguacgccgacagcuucgugauccggggagaugaagugcggcagauugccccuggacagacaggcaacaucgccgacuacaacuacaagcugcccgacgacuucaccggcugugugauugccuggaacagcaacaaccuggacuccaaagucggcggcaacuacaauuaccuguaccggcuguuccggaaguccaaucugaagcccuucgagcgggacaucuccaccgagaucuaucaggccggcagcaccccuuguaacggcgugaagggcuucaacugcuacuucccacugcaguccuacggcuuucagcccacauacggcgugggcuaucagcccuacagagugguggugcugagcuucgaacugcugcaugccccugccacagugugcggcccuaagaaaagcaccaaucucgugaagaacaaaugcgugaacuucaacuucaacggccugaccggcaccggcgugcugacagagagcaacaagaaguuccugccauuccagcaguuuggccgggauaucgccgauaccacagacgccguuagagauccccagacacuggaaauccuggacaucaccccuugcagcuucggcggagugucugugaucaccccuggcaccaacaccagcaaucagguggcagugcuguaccagggcgugaacuguaccgaagugcccguggccauucacgccgaucagcugacaccuacauggcggguguacuccaccggcagcaauguguuucagaccagagccggcugucugaucggagccgagcacgugaacaauagcuacgagugcgacauccccaucggcgcuggaaucugcgccagcuaccagacacagacaaacagcccucggagagccagaagcguggccagccagagcaucauugccuacacaaugucucugggcguggagaacagcguggccuacuccaacaacucuaucgcuauccccaccaacuucaccaucagcgugaccacagagauccugccuguguccaugaccaagaccagcguggacugcaccauguacaucugcggcgauuccaccgagugcuccaaccugcugcugcaguacggcagcuucugcacccagcugaauagagcccugacagggaucgccguggaacaggacaagaacacccaagagguguucgcccaagugaagcagaucuacaagaccccuccuaucaaggacuucggcggcuucaauuucagccagauucugcccgauccuagcaagcccagcaagcggagcuucaucgaggaccugcuguucaacaaagugacacuggccgacgccggcuucaucaagcaguauggcgauugucugggcgacauugccgccagggaucugauuugcgcccagaaguuuaacggacugacagugcugccuccucugcugaccgaugagaugaucgcccaguacacaucugcccugcuggccggcacaaucacaagcggcuggacauuuggagcaggcgccgcucugcagauccccuuugcuaugcagauggccuaccgguucaacggcaucggagugacccagaaugugcuguacgagaaccagaagcugaucgccaaccaguucaacagcgccaucggcaagauccaggacagccugagcagcacagcaagcgcccugggaaagcugcaggacguggucaaccagaaugcccaggcacugaacacccuggucaagcagcuguccuccaacuucggcgccaucagcucugugcugaacgauauccugagcagacuggacaaggucgaggccgaggugcagaucgacagacugaucacaggcagacugcagagccuccagacauacgugacccagcagcugaucagagccgccgagauuagagccucugccaaucuggccgccaccaagaugucugagugugugcugggccagagcaagagaguggacuuuugcggcaagggcuaccaccugaugagcuucccucagucugccccucacggcgugguguuucugcacgugacauaugugcccgcucaagagaagaauuucaccaccgcuccagccaucugccacgacggcaaagcccacuuuccuagagaaggcguguucguguccaacggcacccauugguucgugacacagcggaacuucuacgagccccagaucaucaccaccgacaacaccuucgugucuggcaacugcgacgucgugaucggcauugugaacaauaccguguacgacccucugcagcccgagcuggacagcuucaaagaggaacuggacaaguacuuuaagaaccacacaagccccgacguggaccugggcgauaucagcggaaucaaugccagcgucgugaacauccagaaagagaucgaccggcugaacgagguggccaagaaucugaacgagagccugaucgaccugcaagaacuggggaaguacgagcaguacaucaaguggcccugguacaucuggcugggcuuuaucgccggacugauugccaucgugauggucacaaucaugcuguguugcaugaccagcugcuguagcugccugaagggcuguuguagcuguggcagcugcugcaaguucgacgaggacgauucugagcccgugcugaagggcgugaaacugcacuacacaugaggacuaguuauaagacugacuagcccgaugggccucccaacgggcccuccuccccuccuugcaccgagauuaaucaaaggcucuuuucagagccaccaaaaaaaaaaaaaaaaaaaaaaaaaaaaaaaaaaaaaaaaaaaaaaaaaaaaaaaaaaaaaaaaaaaaaaaaaaaaaaaaaaaaaaaaaaaaaaaaaaaaa

SEQ ID NO: 24174 - RNA, 4035 nt, Artificial Sequence
  SARS-CoV-2/Wuhan/WIV05/2019__EPI_ISL_402128 spike protein mRNA gc mod (1-1273)(E484K_D614G)
aggagaaagcuuaccauguucguguuccuggugcugcugccucugguguccagccagugugugaaccugaccaccagaacacagcugccuccagccuacaccaacagcuuuaccagaggcguguacuaccccgacaagguguucagauccagcgugcugcacucuacccaggaccuguuccugccuuucuucagcaacgugaccugguuccacgccauccacguguccggcaccaauggcaccaagagauucgacaaccccgugcugcccuucaacgacgggguguacuuugccagcaccgagaaguccaacaucaucagaggcuggaucuucggcaccacacuggacagcaagacccagagccugcugaucgugaacaacgccaccaacguggucaucaaagugugcgaguuccaguucugcaacgaccccuuccugggcgucuacuaccacaagaacaacaagagcuggauggaaagcgaguuccggguguacagcagcgccaacaacugcaccuucgaguacgugucccagccuuuccugauggaccuggaaggcaagcagggcaacuucaagaaccugcgcgaguucguguuuaagaacaucgacggcuacuucaagaucuacagcaagcacaccccuaucaaccucgugcgggaucugccucagggcuucucugcucuggaaccccugguggaucugcccaucggcaucaacaucacccgguuucagacacugcuggcccugcacagaagcuaccugacaccuggcgauagcagcagcggauggacagcuggugccgccgcuuacuaugugggcuaccugcagccuagaaccuuccugcugaaguacaacgagaacggcaccaucaccgacgccguggauugugcucuggauccucugagcgagacaaagugcacccugaaguccuucaccguggaaaagggcaucuaccagaccagcaacuuccgggugcagcccaccgaauccaucgugcgguuccccaauaucaccaaucugugccccuucggcgagguguucaaugccaccagauucgccucuguguacgccuggaaccggaagcggaucagcaauugcguggccgacuacuccgugcuguacaacuccgccagcuucagcaccuucaagugcuacggcguguccccuaccaagcugaacgaccugugcuucacaaacguguacgccgacagcuucgugauccggggagaugaagugcggcagauugccccuggacagacaggcaagaucgccgacuacaacuacaagcugcccgacgacuucaccggcugugugauugccuggaacagcaacaaccuggacuccaaagucggcggcaacuacaauuaccuguaccggcuguuccggaaguccaaucugaagcccuucgagcgggacaucuccaccgagaucuaucaggccggcagcaccccuuguaacggcgugaagggcuucaacugcuacuucccacugcaguccuacggcuuucagcccacaaauggcgugggcuaucagcccuacagagugguggugcugagcuucgaacugcugcaugccccugccacagugugcggcccuaagaaaagcaccaaucucgugaagaacaaaugcgugaacuucaacuucaacggccugaccggcaccggcgugcugacagagagcaacaagaaguuccugccauuccagcaguuuggccgggauaucgccgauaccacagacgccguuagagauccccagacacuggaaauccuggacaucaccccuugcagcuucggcggagugucugugaucaccccuggcaccaacaccagcaaucagguggcagugcuguaccagggcgugaacuguaccgaagugcccguggccauucacgccgaucagcugacaccuacauggcggguguacuccaccggcagcaauguguuucagaccagagccggcugucugaucggagccgagcacgugaacaauagcuacgagugcgacauccccaucggcgcuggaaucugcgccagcuaccagacacagacaaacagcccucggagagccagaagcguggccagccagagcaucauugccuacacaaugucucugggcgccgagaacagcguggccuacuccaacaacucuaucgcuauccccaccaacuucaccaucagcgugaccacagagauccugccuguguccaugaccaagaccagcguggacugcaccauguacaucugcggcgauuccaccgagugcuccaaccugcugcugcaguacggcagcuucugcacccagcugaauagagcccugacagggaucgccguggaacaggacaagaacacccaagagguguucgcccaagugaagcagaucuacaagaccccuccuaucaaggacuucggcggcuucaauuucagccagauucugcccgauccuagcaagcccagcaagcggagcuucaucgaggaccugcuguucaacaaagugacacuggccgacgccggcuucaucaagcaguauggcgauugucugggcgacauugccgccagggaucugauuugcgcccagaaguuuaacggacugacagugcugccuccucugcugaccgaugagaugaucgcccaguacacaucugcccugcuggccggcacaaucacaagcggcuggacauuuggagcaggcgccgcucugcagauccccuuugcuaugcagauggccuaccgguucaacggcaucggagugacccagaaugugcuguacgagaaccagaagcugaucgccaaccaguucaacagcgccaucggcaagauccaggacagccugagcagcacagcaagcgcccugggaaagcugcaggacguggucaaccagaaugcccaggcacugaacacccuggucaagcagcuguccuccaacuucggcgccaucagcucugugcugaacgauauccugagcagacuggacaaggucgaggccgaggugcagaucgacagacugaucacaggcagacugcagagccuccagacauacgugacccagcagcugaucagagccgccgagauuagagccucugccaaucuggccgccaccaagaugucugagugugugcugggccagagcaagagaguggacuuuugcggcaagggcuaccaccugaugagcuucccucagucugccccucacggcgugguguuucugcacgugacauaugugcccgcucaagagaagaauuucaccaccgcuccagccaucugccacgacggcaaagcccacuuuccuagagaaggcguguucguguccaacggcacccauugguucgugacacagcggaacuucuacgagccccagaucaucaccaccgacaacaccuucgugucuggcaacugcgacgucgugaucggcauugugaacaauaccguguacgacccucugcagcccgagcuggacagcuucaaagaggaacuggacaaguacuuuaagaaccacacaagccccgacguggaccugggcgauaucagcggaaucaaugccagcgucgugaacauccagaaagagaucgaccggcugaacgagguggccaagaaucugaacgagagccugaucgaccugcaagaacuggggaaguacgagcaguacaucaaguggcccugguacaucuggcugggcuuuaucgccggacugauugccaucgugauggucacaaucaugcuguguugcaugaccagcugcuguagcugccugaagggcuguuguagcuguggcagcugcugcaaguucgacgaggacgauucugagcccgugcugaagggcgugaaacugcacuacacaugaggacuaguuauaagacugacuagcccgaugggccucccaacgggcccuccuccccuccuugcaccgagauuaaucaaaggcucuuuucagagccaccaaaaaaaaaaaaaaaaaaaaaaaaaaaaaaaaaaaaaaaaaaaaaaaaaaaaaaaaaaaaaaaaaaaaaaaaaaaaaaaaaaaaaaaaaaaaaaaaaaaaa

SEQ ID NO: 24175 - RNA, 4035 nt, Artificial Sequence
  SARS-CoV-2/Wuhan/WIV05/2019__EPI_ISL_402128 spike protein mRNA gc mod (1-1273)(L18F_T20N_P26S_D138Y_R190S_K417T_E484K_N501Y_D614G_H655Y _T1027I)
aggagaaagcuuaccauguucguguuccuggugcugcugccucugguguccagccagugugugaacuucaccaacagaacacagcugccuagcgccuacaccaacagcuuuaccagaggcguguacuaccccgacaagguguucagauccagcgugcugcacucuacccaggaccuguuccugccuuucuucagcaacgugaccugguuccacgccauccacguguccggcaccaauggcaccaagagauucgacaaccccgugcugcccuucaacgacgggguguacuuugccagcaccgagaaguccaacaucaucagaggcuggaucuucggcaccacacuggacagcaagacccagagccugcugaucgugaacaacgccaccaacguggucaucaaagugugcgaguuccaguucugcaacuaccccuuccugggcgucuacuaccacaagaacaacaagagcuggauggaaagcgaguuccggguguacagcagcgccaacaacugcaccuucgaguacgugucccagccuuuccugauggaccuggaaggcaagcagggcaacuucaagaaccugagcgaguucguguuuaagaacaucgacggcuacuucaagaucuacagcaagcacaccccuaucaaccucgugcgggaucugccucagggcuucucugcucuggaaccccugguggaucugcccaucggcaucaacaucacccgguuucagacacugcuggcccugcacagaagcuaccugacaccuggcgauagcagcagcggauggacagcuggugccgccgcuuacuaugugggcuaccugcagccuagaaccuuccugcugaaguacaacgagaacggcaccaucaccgacgccguggauugugcucuggauccucugagcgagacaaagugcacccugaaguccuucaccguggaaaagggcaucuaccagaccagcaacuuccgggugcagcccaccgaauccaucgugcgguuccccaauaucaccaaucugugccccuucggcgagguguucaaugccaccagauucgccucuguguacgccuggaaccggaagcggaucagcaauugcguggccgacuacuccgugcuguacaacuccgccagcuucagcaccuucaagugcuacggcguguccccuaccaagcugaacgaccugugcuucacaaacguguacgccgacagcuucgugauccggggagaugaagugcggcagauugccccuggacagacaggcaccaucgccgacuacaacuacaagcugcccgacgacuucaccggcugugugauugccuggaacagcaacaaccuggacuccaaagucggcggcaacuacaauuaccuguaccggcuguuccggaaguccaaucugaagcccuucgagcgggacaucuccaccgagaucuaucaggccggcagcaccccuuguaacggcgugaagggcuucaacugcuacuucccacugcaguccuacggcuuucagcccacauacggcgugggcuaucagcccuacagagugguggugcugagcuucgaacugcugcaugccccugccacagugugcggcccuaagaaaagcaccaaucucgugaagaacaaaugcgugaacuucaacuucaacggccugaccggcaccggcgugcugacagagagcaacaagaaguuccugccauuccagcaguuuggccgggauaucgccgauaccacagacgccguuagagauccccagacacuggaaauccuggacaucaccccuugcagcuucggcggagugucugugaucaccccuggcaccaacaccagcaaucagguggcagugcuguaccagggcgugaacuguaccgaagugcccguggccauucacgccgaucagcugacaccuacauggcggguguacuccaccggcagcaauguguuucagaccagagccggcugucugaucggagccgaguacgugaacaauagcuacgagugcgacauccccaucggcgcuggaaucugcgccagcuaccagacacagacaaacagcccucggagagccagaagcguggccagccagagcaucauugccuacacaaugucucugggcgccgagaacagcguggccuacuccaacaacucuaucgcuauccccaccaacuucaccaucagcgugaccacagagauccugccuguguccaugaccaagaccagcguggacugcaccauguacaucugcggcgauuccaccgagugcuccaaccugcugcugcaguacggcagcuucugcacccagcugaauagagcccugacagggaucgccguggaacaggacaagaacacccaagagguguucgcccaagugaagcagaucuacaagaccccuccuaucaaggacuucggcggcuucaauuucagccagauucugcccgauccuagcaagcccagcaagcggagcuucaucgaggaccugcuguucaacaaagugacacuggccgacgccggcuucaucaagcaguauggcgauugucugggcgacauugccgccagggaucugauuugcgcccagaaguuuaacggacugacagugcugccuccucugcugaccgaugagaugaucgcccaguacacaucugcccugcuggccggcacaaucacaagcggcuggacauuuggagcaggcgccgcucugcagauccccuuugcuaugcagauggccuaccgguucaacggcaucggagugacccagaaugugcuguacgagaaccagaagcugaucgccaaccaguucaacagcgccaucggcaagauccaggacagccugagcagcacagcaagcgcccugggaaagcugcaggacguggucaaccagaaugcccaggcacugaacacccuggucaagcagcuguccuccaacuucggcgccaucagcucugugcugaacgauauccugagcagacuggacaaggucgaggccgaggugcagaucgacagacugaucacaggcagacugcagagccuccagacauacgugacccagcagcugaucagagccgccgagauuagagccucugccaaucuggccgccaucaagaugucugagugugugcugggccagagcaagagaguggacuuuugcggcaagggcuaccaccugaugagcuucccucagucugccccucacggcgugguguuucugcacgugacauaugugcccgcucaagagaagaauuucaccaccgcuccagccaucugccacgacggcaaagcccacuuuccuagagaaggcguguucguguccaacggcacccauugguucgugacacagcggaacuucuacgagccccagaucaucaccaccgacaacaccuucgugucuggcaacugcgacgucgugaucggcauugugaacaauaccguguacgacccucugcagcccgagcuggacagcuucaaagaggaacuggacaaguacuuuaagaaccacacaagccccgacguggaccugggcgauaucagcggaaucaaugccagcgucgugaacauccagaaagagaucgaccggcugaacgagguggccaagaaucugaacgagagccugaucgaccugcaagaacuggggaaguacgagcaguacaucaaguggcccugguacaucuggcugggcuuuaucgccggacugauugccaucgugauggucacaaucaugcuguguugcaugaccagcugcuguagcugccugaagggcuguuguagcuguggcagcugcugcaaguucgacgaggacgauucugagcccgugcugaagggcgugaaacugcacuacacaugaggacuaguuauaagacugacuagcccgaugggccucccaacgggcccuccuccccuccuugcaccgagauuaaucaaaggcucuuuucagagccaccaaaaaaaaaaaaaaaaaaaaaaaaaaaaaaaaaaaaaaaaaaaaaaaaaaaaaaaaaaaaaaaaaaaaaaaaaaaaaaaaaaaaaaaaaaaaaaaaaaaaa

SEQ ID NO: 24176 - RNA, 4035 nt, Artificial Sequence
  SARS-CoV-2/Wuhan/WIV05/2019__EPI_ISL_402128 spike protein mRNA gc mod (1-1273)(S13I_W152C_L452R_D614G)
aggagaaagcuuaccauguucguguuccuggugcugcugccucugguguccauccagugugugaaccugaccaccagaacacagcugccuccagccuacaccaacagcuuuaccagaggcguguacuaccccgacaagguguucagauccagcgugcugcacucuacccaggaccuguuccugccuuucuucagcaacgugaccugguuccacgccauccacguguccggcaccaauggcaccaagagauucgacaaccccgugcugcccuucaacgacgggguguacuuugccagcaccgagaaguccaacaucaucagaggcuggaucuucggcaccacacuggacagcaagacccagagccugcugaucgugaacaacgccaccaacguggucaucaaagugugcgaguuccaguucugcaacgaccccuuccugggcgucuacuaccacaagaacaacaagagcugcauggaaagcgaguuccggguguacagcagcgccaacaacugcaccuucgaguacgugucccagccuuuccugauggaccuggaaggcaagcagggcaacuucaagaaccugcgcgaguucguguuuaagaacaucgacggcuacuucaagaucuacagcaagcacaccccuaucaaccucgugcgggaucugccucagggcuucucugcucuggaaccccugguggaucugcccaucggcaucaacaucacccgguuucagacacugcuggcccugcacagaagcuaccugacaccuggcgauagcagcagcggauggacagcuggugccgccgcuuacuaugugggcuaccugcagccuagaaccuuccugcugaaguacaacgagaacggcaccaucaccgacgccguggauugugcucuggauccucugagcgagacaaagugcacccugaaguccuucaccguggaaaagggcaucuaccagaccagcaacuuccgggugcagcccaccgaauccaucgugcgguuccccaauaucaccaaucugugccccuucggcgagguguucaaugccaccagauucgccucuguguacgccuggaaccggaagcggaucagcaauugcguggccgacuacuccgugcuguacaacuccgccagcuucagcaccuucaagugcuacggcguguccccuaccaagcugaacgaccugugcuucacaaacguguacgccgacagcuucgugauccggggagaugaagugcggcagauugccccuggacagacaggcaagaucgccgacuacaacuacaagcugcccgacgacuucaccggcugugugauugccuggaacagcaacaaccuggacuccaaagucggcggcaacuacaauuaccgcuaccggcuguuccggaaguccaaucugaagcccuucgagcgggacaucuccaccgagaucuaucaggccggcagcaccccuuguaacggcguggaaggcuucaacugcuacuucccacugcaguccuacggcuuucagcccacaaauggcgugggcuaucagcccuacagagugguggugcugagcuucgaacugcugcaugccccugccacagugugcggcccuaagaaaagcaccaaucucgugaagaacaaaugcgugaacuucaacuucaacggccugaccggcaccggcgugcugacagagagcaacaagaaguuccugccauuccagcaguuuggccgggauaucgccgauaccacagacgccguuagagauccccagacacuggaaauccuggacaucaccccuugcagcuucggcggagugucugugaucaccccuggcaccaacaccagcaaucagguggcagugcuguaccagggcgugaacuguaccgaagugcccguggccauucacgccgaucagcugacaccuacauggcggguguacuccaccggcagcaauguguuucagaccagagccggcugucugaucggagccgagcacgugaacaauagcuacgagugcgacauccccaucggcgcuggaaucugcgccagcuaccagacacagacaaacagcccucggagagccagaagcguggccagccagagcaucauugccuacacaaugucucugggcgccgagaacagcguggccuacuccaacaacucuaucgcuauccccaccaacuucaccaucagcgugaccacagagauccugccuguguccaugaccaagaccagcguggacugcaccauguacaucugcggcgauuccaccgagugcuccaaccugcugcugcaguacggcagcuucugcacccagcugaauagagcccugacagggaucgccguggaacaggacaagaacacccaagagguguucgcccaagugaagcagaucuacaagaccccuccuaucaaggacuucggcggcuucaauuucagccagauucugcccgauccuagcaagcccagcaagcggagcuucaucgaggaccugcuguucaacaaagugacacuggccgacgccggcuucaucaagcaguauggcgauugucugggcgacauugccgccagggaucugauuugcgcccagaaguuuaacggacugacagugcugccuccucugcugaccgaugagaugaucgcccaguacacaucugcccugcuggccggcacaaucacaagcggcuggacauuuggagcaggcgccgcucugcagauccccuuugcuaugcagauggccuaccgguucaacggcaucggagugacccagaaugugcuguacgagaaccagaagcugaucgccaaccaguucaacagcgccaucggcaagauccaggacagccugagcagcacagcaagcgcccugggaaagcugcaggacguggucaaccagaaugcccaggcacugaacacccuggucaagcagcuguccuccaacuucggcgccaucagcucugugcugaacgauauccugagcagacuggacaaggucgaggccgaggugcagaucgacagacugaucacaggcagacugcagagccuccagacauacgugacccagcagcugaucagagccgccgagauuagagccucugccaaucuggccgccaccaagaugucugagugugugcugggccagagcaagagaguggacuuuugcggcaagggcuaccaccugaugagcuucccucagucugccccucacggcgugguguuucugcacgugacauaugugcccgcucaagagaagaauuucaccaccgcuccagccaucugccacgacggcaaagcccacuuuccuagagaaggcguguucguguccaacggcacccauugguucgugacacagcggaacuucuacgagccccagaucaucaccaccgacaacaccuucgugucuggcaacugcgacgucgugaucggcauugugaacaauaccguguacgacccucugcagcccgagcuggacagcuucaaagaggaacuggacaaguacuuuaagaaccacacaagccccgacguggaccugggcgauaucagcggaaucaaugccagcgucgugaacauccagaaagagaucgaccggcugaacgagguggccaagaaucugaacgagagccugaucgaccugcaagaacuggggaaguacgagcaguacaucaaguggcccugguacaucuggcugggcuuuaucgccggacugauugccaucgugauggucacaaucaugcuguguugcaugaccagcugcuguagcugccugaagggcuguuguagcuguggcagcugcugcaaguucgacgaggacgauucugagcccgugcugaagggcgugaaacugcacuacacaugaggacuaguuauaagacugacuagcccgaugggccucccaacgggcccuccuccccuccuugcaccgagauuaaucaaaggcucuuuucagagccaccaaaaaaaaaaaaaaaaaaaaaaaaaaaaaaaaaaaaaaaaaaaaaaaaaaaaaaaaaaaaaaaaaaaaaaaaaaaaaaaaaaaaaaaaaaaaaaaaaaaaa

SEQ ID NO: 24177 - RNA, 4035 nt, Artificial Sequence
  SARS-CoV-2/Wuhan/WIV05/2019__EPI_ISL_402128 spike protein mRNA gc (1-1273)(K986P_V987P)
aggagaaagcuuaccauguucguguuccugguccuccugccccuggugagcucccagugcgugaaccucaccacccgcacgcagcugccgcccgccuacaccaacagcuucacccggggcgucuacuaccccgacaagguguuccgcuccagcgugcugcacuccacccaggaccucuuccugcccuucuucagcaacgucacgugguuccacgccauccacguguccgggaccaacggcaccaagcgguucgacaacccggugcugcccuucaacgacggggucuacuucgcgagcaccgagaaguccaacaucauccgcggcuggaucuucgggacgacccucgacagcaagacccagucccugcugaucgugaacaacgccaccaacguggucaucaaggugugcgaguuccaguucugcaacgaccccuuccucggcguguacuaccacaagaacaacaagagcuggauggaguccgaguuccgggucuacagcuccgccaacaacugcacguucgaguacgugagccagcccuuccugauggaccuggagggcaagcaggggaacuucaagaaccuccgcgaguucguguucaagaacaucgacggcuacuucaagaucuacuccaagcacaccccgaucaaccugguccgggaccugccccagggguucagcgcccucgagccccugguggaccugcccaucggcaucaacaucacccgcuuccagacccuccuggcccugcaccgguccuaccucacgccgggggacagcagcuccggcuggaccgcgggcgccgccgccuacuacgugggguaccugcagccccgcaccuuccugcucaaguacaacgagaacggcaccaucacggacgcggucgacugcgcccuggacccccugagcgagaccaagugcacccucaaguccuucaccguggagaaggggaucuaccagacgagcaacuuccgggugcagcccaccgaguccaucguccgcuucccgaacaucaccaaccugugccccuucggcgagguguucaacgccacccgguucgccagcgucuacgccuggaaccgcaagcggaucuccaacugcguggcggacuacagcgugcuguacaacuccgccagcuucuccacguucaagugcuacggcgucagccccaccaagcucaacgaccugugcuucaccaacguguacgccgacuccuucgugauccgcggggacgagguccggcagaucgcccccggccagaccgggaagaucgccgacuacaacuacaagcugccggacgacuucacgggcugcgugaucgcguggaacagcaacaaccucgacuccaaggucgggggcaacuacaacuaccuguaccgccuguuccgcaagagcaaccucaagcccuucgagcgggacaucuccaccgagaucuaccaggccggcagcacccccugcaacgggguggagggcuucaacugcuacuucccccugcaguccuacggguuccagccgaccaacggcgugggguaccagcccuaccggguggucgugcugagcuucgagcuccugcacgcccccgccacggugugcggccccaagaaguccaccaaccuggucaagaacaagugcgugaacuucaacuucaacggccucaccgggaccggcgugcugaccgagagcaacaagaaguuccugccguuccagcaguucgggcgcgacaucgccgacacgaccgacgcgguccgcgacccccagacccuggagauccucgacaucacccccugcagcuucggcgggguguccgugaucacgccgggcaccaacaccagcaaccaggucgccgugcuguaccaggacgugaacugcaccgagguccccguggccauccacgccgaccagcugacgcccaccuggcggguguacuccaccggcagcaacgucuuccagacccgcgccgggugccucaucggcgcggagcacgugaacaacuccuacgagugcgacauccccaucggggccggcaucugcgccagcuaccagacgcagaccaacuccccgcggcgcgcccggagcguggcgucccagagcaucaucgccuacaccaugucccugggcgccgagaacagcgucgccuacuccaacaacagcaucgccauccccaccaacuucacgaucuccgugaccaccgagauccugcccgugagcaugaccaagacgagcgucgacugcaccauguacaucugcggggacuccaccgagugcagcaaccuccugcugcaguacggcuccuucugcacccagcucaaccgcgcgcugacggggaucgccguggagcaggacaagaacacccaggagguguucgcccaggucaagcagaucuacaagacgcccccgaucaaggacuucggcggguucaacuucagccagauccugcccgaccccuccaagcccagcaagcgguccuucaucgaggaccuccuguucaacaaggugacccuggccgacgccggcuucaucaagcaguacggcgacugccucggggacaucgcggcccgcgaccugaucugcgcccagaaguucaacggccugaccgugcucccgccccugcugaccgacgagaugaucgcccaguacaccagcgcccuccuggcggggaccaucacguccggcuggaccuucggggccggcgccgcccugcagauccccuucgcgaugcagauggccuaccgguucaacggcaucggggucacccagaacgugcucuacgagaaccagaagcugaucgccaaccaguucaacagcgccaucggcaagauccaggacucccugagcuccaccgccagcgcgcucgggaagcugcaggacguggucaaccagaacgcccaggcccugaacacgcucgugaagcagcuguccagcaacuucggcgccaucuccagcgugcugaacgacauccucucccgccuggacccgcccgaggccgaggugcagaucgaccggcugaucaccgggcgccuccagagccugcagaccuacgugacccagcagcugauccgggcggccgagauccgcgccagcgccaaccucgccgcgaccaagauguccgagugcguccugggccagagcaagcggguggacuucugcggcaagggguaccaccugauguccuucccccagagcgccccgcacggcguggucuuccuccacgugacguacguccccgcccaggagaagaacuucaccaccgcccccgcgaucugccacgacgggaaggcccacuucccccgcgagggcguguucguguccaacgggacccacugguucgucacgcagcggaacuucuacgagccgcagaucaucaccaccgacaacaccuucgugagcggcaacugcgacguggucaucggcaucgugaacaacacgguguacgacccccugcagcccgagcuggacuccuucaaggaggagcucgacaaguacuucaagaaccacaccagccccgacgucgaccugggggacaucuccggcaucaacgccagcguggugaacauccagaaggagaucgaccgccugaacgaggucgccaagaaccucaacgagucccugaucgaccugcaggagcucgggaaguacgagcaguacaucaaguggccgugguacaucuggcugggcuucaucgccggccugaucgcgaucgugauggugaccaucaugcucugcugcaugaccagcugcugcuccugccugaaggggugcugcagcugcggcuccugcugcaaguucgacgaggacgacagcgagcccguccugaagggggugaagcuccacuacacgugaggacuaguuauaagacugacuagcccgaugggccucccaacgggcccuccuccccuccuugcaccgagauuaaucaaaggcucuuuucagagccaccaaaaaaaaaaaaaaaaaaaaaaaaaaaaaaaaaaaaaaaaaaaaaaaaaaaaaaaaaaaaaaaaaaaaaaaaaaaaaaaaaaaaaaaaaaaaaaaaaaaaa

SEQ ID NO: 24178 - RNA, 4035 nt, Artificial Sequence
  SARS-CoV-2/Wuhan/WIV05/2019__EPI_ISL_402128 spike protein mRNA gc (1-1273)(K986P_V987P_ D614G)
aggagaaagcuuaccauguucguguuccugguccuccugccccuggugagcucccagugcgugaaccucaccacccgcacgcagcugccgcccgccuacaccaacagcuucacccggggcgucuacuaccccgacaagguguuccgcuccagcgugcugcacuccacccaggaccucuuccugcccuucuucagcaacgucacgugguuccacgccauccacguguccgggaccaacggcaccaagcgguucgacaacccggugcugcccuucaacgacggggucuacuucgcgagcaccgagaaguccaacaucauccgcggcuggaucuucgggacgacccucgacagcaagacccagucccugcugaucgugaacaacgccaccaacguggucaucaaggugugcgaguuccaguucugcaacgaccccuuccucggcguguacuaccacaagaacaacaagagcuggauggaguccgaguuccgggucuacagcuccgccaacaacugcacguucgaguacgugagccagcccuuccugauggaccuggagggcaagcaggggaacuucaagaaccuccgcgaguucguguucaagaacaucgacggcuacuucaagaucuacuccaagcacaccccgaucaaccugguccgggaccugccccagggguucagcgcccucgagccccugguggaccugcccaucggcaucaacaucacccgcuuccagacccuccuggcccugcaccgguccuaccucacgccgggggacagcagcuccggcuggaccgcgggcgccgccgccuacuacgugggguaccugcagccccgcaccuuccugcucaaguacaacgagaacggcaccaucacggacgcggucgacugcgcccuggacccccugagcgagaccaagugcacccucaaguccuucaccguggagaaggggaucuaccagacgagcaacuuccgggugcagcccaccgaguccaucguccgcuucccgaacaucaccaaccugugccccuucggcgagguguucaacgccacccgguucgccagcgucuacgccuggaaccgcaagcggaucuccaacugcguggcggacuacagcgugcuguacaacuccgccagcuucuccacguucaagugcuacggcgucagccccaccaagcucaacgaccugugcuucaccaacguguacgccgacuccuucgugauccgcggggacgagguccggcagaucgcccccggccagaccgggaagaucgccgacuacaacuacaagcugccggacgacuucacgggcugcgugaucgcguggaacagcaacaaccucgacuccaaggucgggggcaacuacaacuaccuguaccgccuguuccgcaagagcaaccucaagcccuucgagcgggacaucuccaccgagaucuaccaggccggcagcacccccugcaacgggguggagggcuucaacugcuacuucccccugcaguccuacggguuccagccgaccaacggcgugggguaccagcccuaccggguggucgugcugagcuucgagcuccugcacgcccccgccacggugugcggccccaagaaguccaccaaccuggucaagaacaagugcgugaacuucaacuucaacggccucaccgggaccggcgugcugaccgagagcaacaagaaguuccugccguuccagcaguucgggcgcgacaucgccgacacgaccgacgcgguccgcgacccccagacccuggagauccucgacaucacccccugcagcuucggcgggguguccgugaucacgccgggcaccaacaccagcaaccaggucgccgugcuguaccagggcgugaacugcaccgagguccccguggccauccacgccgaccagcugacgcccaccuggcggguguacuccaccggcagcaacgucuuccagacccgcgccgggugccucaucggcgcggagcacgugaacaacuccuacgagugcgacauccccaucggggccggcaucugcgccagcuaccagacgcagaccaacuccccgcggcgcgcccggagcguggcgucccagagcaucaucgccuacaccaugucccugggcgccgagaacagcgucgccuacuccaacaacagcaucgccauccccaccaacuucacgaucuccgugaccaccgagauccugcccgugagcaugaccaagacgagcgucgacugcaccauguacaucugcggggacuccaccgagugcagcaaccuccugcugcaguacggcuccuucugcacccagcucaaccgcgcgcugacggggaucgccguggagcaggacaagaacacccaggagguguucgcccaggucaagcagaucuacaagacgcccccgaucaaggacuucggcggguucaacuucagccagauccugcccgaccccuccaagcccagcaagcgguccuucaucgaggaccuccuguucaacaaggugacccuggccgacgccggcuucaucaagcaguacggcgacugccucggggacaucgcggcccgcgaccugaucugcgcccagaaguucaacggccugaccgugcucccgccccugcugaccgacgagaugaucgcccaguacaccagcgcccuccuggcggggaccaucacguccggcuggaccuucggggccggcgccgcccugcagauccccuucgcgaugcagauggccuaccgguucaacggcaucggggucacccagaacgugcucuacgagaaccagaagcugaucgccaaccaguucaacagcgccaucggcaagauccaggacucccugagcuccaccgccagcgcgcucgggaagcugcaggacguggucaaccagaacgcccaggcccugaacacgcucgugaagcagcuguccagcaacuucggcgccaucuccagcgugcugaacgacauccucucccgccuggacccgcccgaggccgaggugcagaucgaccggcugaucaccgggcgccuccagagccugcagaccuacgugacccagcagcugauccgggcggccgagauccgcgccagcgccaaccucgccgcgaccaagauguccgagugcguccugggccagagcaagcggguggacuucugcggcaagggguaccaccugauguccuucccccagagcgccccgcacggcguggucuuccuccacgugacguacguccccgcccaggagaagaacuucaccaccgcccccgcgaucugccacgacgggaaggcccacuucccccgcgagggcguguucguguccaacgggacccacugguucgucacgcagcggaacuucuacgagccgcagaucaucaccaccgacaacaccuucgugagcggcaacugcgacguggucaucggcaucgugaacaacacgguguacgacccccugcagcccgagcuggacuccuucaaggaggagcucgacaaguacuucaagaaccacaccagccccgacgucgaccugggggacaucuccggcaucaacgccagcguggugaacauccagaaggagaucgaccgccugaacgaggucgccaagaaccucaacgagucccugaucgaccugcaggagcucgggaaguacgagcaguacaucaaguggccgugguacaucuggcugggcuucaucgccggccugaucgcgaucgugauggugaccaucaugcucugcugcaugaccagcugcugcuccugccugaaggggugcugcagcugcggcuccugcugcaaguucgacgaggacgacagcgagcccguccugaagggggugaagcuccacuacacgugaggacuaguuauaagacugacuagcccgaugggccucccaacgggcccuccuccccuccuugcaccgagauuaaucaaaggcucuuuucagagccaccaaaaaaaaaaaaaaaaaaaaaaaaaaaaaaaaaaaaaaaaaaaaaaaaaaaaaaaaaaaaaaaaaaaaaaaaaaaaaaaaaaaaaaaaaaaaaaaaaaaaa

SEQ ID NO: 24179 - RNA, 4035 nt, Artificial Sequence
  SARS-CoV-2/Wuhan/WIV05/2019__EPI_ISL_402128 spike protein mRNA gc (1-1273)(K986P_V987P_A222V_D614G)
aggagaaagcuuaccauguucguguuccugguccuccugccccuggugagcucccagugcgugaaccucaccacccgcacgcagcugccgcccgccuacaccaacagcuucacccggggcgucuacuaccccgacaagguguuccgcuccagcgugcugcacuccacccaggaccucuuccugcccuucuucagcaacgucacgugguuccacgccauccacguguccgggaccaacggcaccaagcgguucgacaacccggugcugcccuucaacgacggggucuacuucgcgagcaccgagaaguccaacaucauccgcggcuggaucuucgggacgacccucgacagcaagacccagucccugcugaucgugaacaacgccaccaacguggucaucaaggugugcgaguuccaguucugcaacgaccccuuccucggcguguacuaccacaagaacaacaagagcuggauggaguccgaguuccgggucuacagcuccgccaacaacugcacguucgaguacgugagccagcccuuccugauggaccuggagggcaagcaggggaacuucaagaaccuccgcgaguucguguucaagaacaucgacggcuacuucaagaucuacuccaagcacaccccgaucaaccugguccgggaccugccccagggguucagcguccucgagccccugguggaccugcccaucggcaucaacaucacccgcuuccagacccuccuggcccugcaccgguccuaccucacgccgggggacagcagcuccggcuggaccgcgggcgccgccgccuacuacgugggguaccugcagccccgcaccuuccugcucaaguacaacgagaacggcaccaucacggacgcggucgacugcgcccuggacccccugagcgagaccaagugcacccucaaguccuucaccguggagaaggggaucuaccagacgagcaacuuccgggugcagcccaccgaguccaucguccgcuucccgaacaucaccaaccugugccccuucggcgagguguucaacgccacccgguucgccagcgucuacgccuggaaccgcaagcggaucuccaacugcguggcggacuacagcgugcuguacaacuccgccagcuucuccacguucaagugcuacggcgucagccccaccaagcucaacgaccugugcuucaccaacguguacgccgacuccuucgugauccgcggggacgagguccggcagaucgcccccggccagaccgggaagaucgccgacuacaacuacaagcugccggacgacuucacgggcugcgugaucgcguggaacagcaacaaccucgacuccaaggucgggggcaacuacaacuaccuguaccgccuguuccgcaagagcaaccucaagcccuucgagcgggacaucuccaccgagaucuaccaggccggcagcacccccugcaacgggguggagggcuucaacugcuacuucccccugcaguccuacggguuccagccgaccaacggcgugggguaccagcccuaccggguggucgugcugagcuucgagcuccugcacgcccccgccacggugugcggccccaagaaguccaccaaccuggucaagaacaagugcgugaacuucaacuucaacggccucaccgggaccggcgugcugaccgagagcaacaagaaguuccugccguuccagcaguucgggcgcgacaucgccgacacgaccgacgcgguccgcgacccccagacccuggagauccucgacaucacccccugcagcuucggcgggguguccgugaucacgccgggcaccaacaccagcaaccaggucgccgugcuguaccagggcgugaacugcaccgagguccccguggccauccacgccgaccagcugacgcccaccuggcggguguacuccaccggcagcaacgucuuccagacccgcgccgggugccucaucggcgcggagcacgugaacaacuccuacgagugcgacauccccaucggggccggcaucugcgccagcuaccagacgcagaccaacuccccgcggcgcgcccggagcguggcgucccagagcaucaucgccuacaccaugucccugggcgccgagaacagcgucgccuacuccaacaacagcaucgccauccccaccaacuucacgaucuccgugaccaccgagauccugcccgugagcaugaccaagacgagcgucgacugcaccauguacaucugcggggacuccaccgagugcagcaaccuccugcugcaguacggcuccuucugcacccagcucaaccgcgcgcugacggggaucgccguggagcaggacaagaacacccaggagguguucgcccaggucaagcagaucuacaagacgcccccgaucaaggacuucggcggguucaacuucagccagauccugcccgaccccuccaagcccagcaagcgguccuucaucgaggaccuccuguucaacaaggugacccuggccgacgccggcuucaucaagcaguacggcgacugccucggggacaucgcggcccgcgaccugaucugcgcccagaaguucaacggccugaccgugcucccgccccugcugaccgacgagaugaucgcccaguacaccagcgcccuccuggcggggaccaucacguccggcuggaccuucggggccggcgccgcccugcagauccccuucgcgaugcagauggccuaccgguucaacggcaucggggucacccagaacgugcucuacgagaaccagaagcugaucgccaaccaguucaacagcgccaucggcaagauccaggacucccugagcuccaccgccagcgcgcucgggaagcugcaggacguggucaaccagaacgcccaggcccugaacacgcucgugaagcagcuguccagcaacuucggcgccaucuccagcgugcugaacgacauccucucccgccuggacccgcccgaggccgaggugcagaucgaccggcugaucaccgggcgccuccagagccugcagaccuacgugacccagcagcugauccgggcggccgagauccgcgccagcgccaaccucgccgcgaccaagauguccgagugcguccugggccagagcaagcggguggacuucugcggcaagggguaccaccugauguccuucccccagagcgccccgcacggcguggucuuccuccacgugacguacguccccgcccaggagaagaacuucaccaccgcccccgcgaucugccacgacgggaaggcccacuucccccgcgagggcguguucguguccaacgggacccacugguucgucacgcagcggaacuucuacgagccgcagaucaucaccaccgacaacaccuucgugagcggcaacugcgacguggucaucggcaucgugaacaacacgguguacgacccccugcagcccgagcuggacuccuucaaggaggagcucgacaaguacuucaagaaccacaccagccccgacgucgaccugggggacaucuccggcaucaacgccagcguggugaacauccagaaggagaucgaccgccugaacgaggucgccaagaaccucaacgagucccugaucgaccugcaggagcucgggaaguacgagcaguacaucaaguggccgugguacaucuggcugggcuucaucgccggccugaucgcgaucgugauggugaccaucaugcucugcugcaugaccagcugcugcuccugccugaaggggugcugcagcugcggcuccugcugcaaguucgacgaggacgacagcgagcccguccugaagggggugaagcuccacuacacgugaggacuaguuauaagacugacuagcccgaugggccucccaacgggcccuccuccccuccuugcaccgagauuaaucaaaggcucuuuucagagccaccaaaaaaaaaaaaaaaaaaaaaaaaaaaaaaaaaaaaaaaaaaaaaaaaaaaaaaaaaaaaaaaaaaaaaaaaaaaaaaaaaaaaaaaaaaaaaaaaaaaaa

SEQ ID NO: 24180 - RNA, 4035 nt, Artificial Sequence
  SARS-CoV-2/Wuhan/WIV05/2019__EPI_ISL_402128 spike protein mRNA gc (1-1273)(K986P_V987P_N439K_D614G)
aggagaaagcuuaccauguucguguuccugguccuccugccccuggugagcucccagugcgugaaccucaccacccgcacgcagcugccgcccgccuacaccaacagcuucacccggggcgucuacuaccccgacaagguguuccgcuccagcgugcugcacuccacccaggaccucuuccugcccuucuucagcaacgucacgugguuccacgccauccacguguccgggaccaacggcaccaagcgguucgacaacccggugcugcccuucaacgacggggucuacuucgcgagcaccgagaaguccaacaucauccgcggcuggaucuucgggacgacccucgacagcaagacccagucccugcugaucgugaacaacgccaccaacguggucaucaaggugugcgaguuccaguucugcaacgaccccuuccucggcguguacuaccacaagaacaacaagagcuggauggaguccgaguuccgggucuacagcuccgccaacaacugcacguucgaguacgugagccagcccuuccugauggaccuggagggcaagcaggggaacuucaagaaccuccgcgaguucguguucaagaacaucgacggcuacuucaagaucuacuccaagcacaccccgaucaaccugguccgggaccugccccagggguucagcgcccucgagccccugguggaccugcccaucggcaucaacaucacccgcuuccagacccuccuggcccugcaccgguccuaccucacgccgggggacagcagcuccggcuggaccgcgggcgccgccgccuacuacgugggguaccugcagccccgcaccuuccugcucaaguacaacgagaacggcaccaucacggacgcggucgacugcgcccuggacccccugagcgagaccaagugcacccucaaguccuucaccguggagaaggggaucuaccagacgagcaacuuccgggugcagcccaccgaguccaucguccgcuucccgaacaucaccaaccugugccccuucggcgagguguucaacgccacccgguucgccagcgucuacgccuggaaccgcaagcggaucuccaacugcguggcggacuacagcgugcuguacaacuccgccagcuucuccacguucaagugcuacggcgucagccccaccaagcucaacgaccugugcuucaccaacguguacgccgacuccuucgugauccgcggggacgagguccggcagaucgcccccggccagaccgggaagaucgccgacuacaacuacaagcugccggacgacuucacgggcugcgugaucgcguggaacagcaagaaccucgacuccaaggucgggggcaacuacaacuaccuguaccgccuguuccgcaagagcaaccucaagcccuucgagcgggacaucuccaccgagaucuaccaggccggcagcacccccugcaacgggguggagggcuucaacugcuacuucccccugcaguccuacggguuccagccgaccaacggcgugggguaccagcccuaccggguggucgugcugagcuucgagcuccugcacgcccccgccacggugugcggccccaagaaguccaccaaccuggucaagaacaagugcgugaacuucaacuucaacggccucaccgggaccggcgugcugaccgagagcaacaagaaguuccugccguuccagcaguucgggcgcgacaucgccgacacgaccgacgcgguccgcgacccccagacccuggagauccucgacaucacccccugcagcuucggcgggguguccgugaucacgccgggcaccaacaccagcaaccaggucgccgugcuguaccagggcgugaacugcaccgagguccccguggccauccacgccgaccagcugacgcccaccuggcggguguacuccaccggcagcaacgucuuccagacccgcgccgggugccucaucggcgcggagcacgugaacaacuccuacgagugcgacauccccaucggggccggcaucugcgccagcuaccagacgcagaccaacuccccgcggcgcgcccggagcguggcgucccagagcaucaucgccuacaccaugucccugggcgccgagaacagcgucgccuacuccaacaacagcaucgccauccccaccaacuucacgaucuccgugaccaccgagauccugcccgugagcaugaccaagacgagcgucgacugcaccauguacaucugcggggacuccaccgagugcagcaaccuccugcugcaguacggcuccuucugcacccagcucaaccgcgcgcugacggggaucgccguggagcaggacaagaacacccaggagguguucgcccaggucaagcagaucuacaagacgcccccgaucaaggacuucggcggguucaacuucagccagauccugcccgaccccuccaagcccagcaagcgguccuucaucgaggaccuccuguucaacaaggugacccuggccgacgccggcuucaucaagcaguacggcgacugccucggggacaucgcggcccgcgaccugaucugcgcccagaaguucaacggccugaccgugcucccgccccugcugaccgacgagaugaucgcccaguacaccagcgcccuccuggcggggaccaucacguccggcuggaccuucggggccggcgccgcccugcagauccccuucgcgaugcagauggccuaccgguucaacggcaucggggucacccagaacgugcucuacgagaaccagaagcugaucgccaaccaguucaacagcgccaucggcaagauccaggacucccugagcuccaccgccagcgcgcucgggaagcugcaggacguggucaaccagaacgcccaggcccugaacacgcucgugaagcagcuguccagcaacuucggcgccaucuccagcgugcugaacgacauccucucccgccuggacccgcccgaggccgaggugcagaucgaccggcugaucaccgggcgccuccagagccugcagaccuacgugacccagcagcugauccgggcggccgagauccgcgccagcgccaaccucgccgcgaccaagauguccgagugcguccugggccagagcaagcggguggacuucugcggcaagggguaccaccugauguccuucccccagagcgccccgcacggcguggucuuccuccacgugacguacguccccgcccaggagaagaacuucaccaccgcccccgcgaucugccacgacgggaaggcccacuucccccgcgagggcguguucguguccaacgggacccacugguucgucacgcagcggaacuucuacgagccgcagaucaucaccaccgacaacaccuucgugagcggcaacugcgacguggucaucggcaucgugaacaacacgguguacgacccccugcagcccgagcuggacuccuucaaggaggagcucgacaaguacuucaagaaccacaccagccccgacgucgaccugggggacaucuccggcaucaacgccagcguggugaacauccagaaggagaucgaccgccugaacgaggucgccaagaaccucaacgagucccugaucgaccugcaggagcucgggaaguacgagcaguacaucaaguggccgugguacaucuggcugggcuucaucgccggccugaucgcgaucgugauggugaccaucaugcucugcugcaugaccagcugcugcuccugccugaaggggugcugcagcugcggcuccugcugcaaguucgacgaggacgacagcgagcccguccugaagggggugaagcuccacuacacgugaggacuaguuauaagacugacuagcccgaugggccucccaacgggcccuccuccccuccuugcaccgagauuaaucaaaggcucuuuucagagccaccaaaaaaaaaaaaaaaaaaaaaaaaaaaaaaaaaaaaaaaaaaaaaaaaaaaaaaaaaaaaaaaaaaaaaaaaaaaaaaaaaaaaaaaaaaaaaaaaaaaaa

SEQ ID NO: 24181 - RNA, 4035 nt, Artificial Sequence
  SARS-CoV-2/Wuhan/WIV05/2019__EPI_ISL_402128 spike protein mRNA gc (1-1273)(K986P_V987P_S477N_D614G)
aggagaaagcuuaccauguucguguuccugguccuccugccccuggugagcucccagugcgugaaccucaccacccgcacgcagcugccgcccgccuacaccaacagcuucacccggggcgucuacuaccccgacaagguguuccgcuccagcgugcugcacuccacccaggaccucuuccugcccuucuucagcaacgucacgugguuccacgccauccacguguccgggaccaacggcaccaagcgguucgacaacccggugcugcccuucaacgacggggucuacuucgcgagcaccgagaaguccaacaucauccgcggcuggaucuucgggacgacccucgacagcaagacccagucccugcugaucgugaacaacgccaccaacguggucaucaaggugugcgaguuccaguucugcaacgaccccuuccucggcguguacuaccacaagaacaacaagagcuggauggaguccgaguuccgggucuacagcuccgccaacaacugcacguucgaguacgugagccagcccuuccugauggaccuggagggcaagcaggggaacuucaagaaccuccgcgaguucguguucaagaacaucgacggcuacuucaagaucuacuccaagcacaccccgaucaaccugguccgggaccugccccagggguucagcgcccucgagccccugguggaccugcccaucggcaucaacaucacccgcuuccagacccuccuggcccugcaccgguccuaccucacgccgggggacagcagcuccggcuggaccgcgggcgccgccgccuacuacgugggguaccugcagccccgcaccuuccugcucaaguacaacgagaacggcaccaucacggacgcggucgacugcgcccuggacccccugagcgagaccaagugcacccucaaguccuucaccguggagaaggggaucuaccagacgagcaacuuccgggugcagcccaccgaguccaucguccgcuucccgaacaucaccaaccugugccccuucggcgagguguucaacgccacccgguucgccagcgucuacgccuggaaccgcaagcggaucuccaacugcguggcggacuacagcgugcuguacaacuccgccagcuucuccacguucaagugcuacggcgucagccccaccaagcucaacgaccugugcuucaccaacguguacgccgacuccuucgugauccgcggggacgagguccggcagaucgcccccggccagaccgggaagaucgccgacuacaacuacaagcugccggacgacuucacgggcugcgugaucgcguggaacagcaacaaccucgacuccaaggucgggggcaacuacaacuaccuguaccgccuguuccgcaagagcaaccucaagcccuucgagcgggacaucuccaccgagaucuaccaggccggcaacacccccugcaacgggguggagggcuucaacugcuacuucccccugcaguccuacggguuccagccgaccaacggcgugggguaccagcccuaccggguggucgugcugagcuucgagcuccugcacgcccccgccacggugugcggccccaagaaguccaccaaccuggucaagaacaagugcgugaacuucaacuucaacggccucaccgggaccggcgugcugaccgagagcaacaagaaguuccugccguuccagcaguucgggcgcgacaucgccgacacgaccgacgcgguccgcgacccccagacccuggagauccucgacaucacccccugcagcuucggcgggguguccgugaucacgccgggcaccaacaccagcaaccaggucgccgugcuguaccagggcgugaacugcaccgagguccccguggccauccacgccgaccagcugacgcccaccuggcggguguacuccaccggcagcaacgucuuccagacccgcgccgggugccucaucggcgcggagcacgugaacaacuccuacgagugcgacauccccaucggggccggcaucugcgccagcuaccagacgcagaccaacuccccgcggcgcgcccggagcguggcgucccagagcaucaucgccuacaccaugucccugggcgccgagaacagcgucgccuacuccaacaacagcaucgccauccccaccaacuucacgaucuccgugaccaccgagauccugcccgugagcaugaccaagacgagcgucgacugcaccauguacaucugcggggacuccaccgagugcagcaaccuccugcugcaguacggcuccuucugcacccagcucaaccgcgcgcugacggggaucgccguggagcaggacaagaacacccaggagguguucgcccaggucaagcagaucuacaagacgcccccgaucaaggacuucggcggguucaacuucagccagauccugcccgaccccuccaagcccagcaagcgguccuucaucgaggaccuccuguucaacaaggugacccuggccgacgccggcuucaucaagcaguacggcgacugccucggggacaucgcggcccgcgaccugaucugcgcccagaaguucaacggccugaccgugcucccgccccugcugaccgacgagaugaucgcccaguacaccagcgcccuccuggcggggaccaucacguccggcuggaccuucggggccggcgccgcccugcagauccccuucgcgaugcagauggccuaccgguucaacggcaucggggucacccagaacgugcucuacgagaaccagaagcugaucgccaaccaguucaacagcgccaucggcaagauccaggacucccugagcuccaccgccagcgcgcucgggaagcugcaggacguggucaaccagaacgcccaggcccugaacacgcucgugaagcagcuguccagcaacuucggcgccaucuccagcgugcugaacgacauccucucccgccuggacccgcccgaggccgaggugcagaucgaccggcugaucaccgggcgccuccagagccugcagaccuacgugacccagcagcugauccgggcggccgagauccgcgccagcgccaaccucgccgcgaccaagauguccgagugcguccugggccagagcaagcggguggacuucugcggcaagggguaccaccugauguccuucccccagagcgccccgcacggcguggucuuccuccacgugacguacguccccgcccaggagaagaacuucaccaccgcccccgcgaucugccacgacgggaaggcccacuucccccgcgagggcguguucguguccaacgggacccacugguucgucacgcagcggaacuucuacgagccgcagaucaucaccaccgacaacaccuucgugagcggcaacugcgacguggucaucggcaucgugaacaacacgguguacgacccccugcagcccgagcuggacuccuucaaggaggagcucgacaaguacuucaagaaccacaccagccccgacgucgaccugggggacaucuccggcaucaacgccagcguggugaacauccagaaggagaucgaccgccugaacgaggucgccaagaaccucaacgagucccugaucgaccugcaggagcucgggaaguacgagcaguacaucaaguggccgugguacaucuggcugggcuucaucgccggccugaucgcgaucgugauggugaccaucaugcucugcugcaugaccagcugcugcuccugccugaaggggugcugcagcugcggcuccugcugcaaguucgacgaggacgacagcgagcccguccugaagggggugaagcuccacuacacgugaggacuaguuauaagacugacuagcccgaugggccucccaacgggcccuccuccccuccuugcaccgagauuaaucaaaggcucuuuucagagccaccaaaaaaaaaaaaaaaaaaaaaaaaaaaaaaaaaaaaaaaaaaaaaaaaaaaaaaaaaaaaaaaaaaaaaaaaaaaaaaaaaaaaaaaaaaaaaaaaaaaaa

SEQ ID NO: 24182 - RNA, 4035 nt, Artificial Sequence
  SARS-CoV-2/Wuhan/WIV05/2019__EPI_ISL_402128 spike protein mRNA gc (1-1273)(K986P_V987P_N501Y_D614G)
aggagaaagcuuaccauguucguguuccugguccuccugccccuggugagcucccagugcgugaaccucaccacccgcacgcagcugccgcccgccuacaccaacagcuucacccggggcgucuacuaccccgacaagguguuccgcuccagcgugcugcacuccacccaggaccucuuccugcccuucuucagcaacgucacgugguuccacgccauccacguguccgggaccaacggcaccaagcgguucgacaacccggugcugcccuucaacgacggggucuacuucgcgagcaccgagaaguccaacaucauccgcggcuggaucuucgggacgacccucgacagcaagacccagucccugcugaucgugaacaacgccaccaacguggucaucaaggugugcgaguuccaguucugcaacgaccccuuccucggcguguacuaccacaagaacaacaagagcuggauggaguccgaguuccgggucuacagcuccgccaacaacugcacguucgaguacgugagccagcccuuccugauggaccuggagggcaagcaggggaacuucaagaaccuccgcgaguucguguucaagaacaucgacggcuacuucaagaucuacuccaagcacaccccgaucaaccugguccgggaccugccccagggguucagcgcccucgagccccugguggaccugcccaucggcaucaacaucacccgcuuccagacccuccuggcccugcaccgguccuaccucacgccgggggacagcagcuccggcuggaccgcgggcgccgccgccuacuacgugggguaccugcagccccgcaccuuccugcucaaguacaacgagaacggcaccaucacggacgcggucgacugcgcccuggacccccugagcgagaccaagugcacccucaaguccuucaccguggagaaggggaucuaccagacgagcaacuuccgggugcagcccaccgaguccaucguccgcuucccgaacaucaccaaccugugccccuucggcgagguguucaacgccacccgguucgccagcgucuacgccuggaaccgcaagcggaucuccaacugcguggcggacuacagcgugcuguacaacuccgccagcuucuccacguucaagugcuacggcgucagccccaccaagcucaacgaccugugcuucaccaacguguacgccgacuccuucgugauccgcggggacgagguccggcagaucgcccccggccagaccgggaagaucgccgacuacaacuacaagcugccggacgacuucacgggcugcgugaucgcguggaacagcaacaaccucgacuccaaggucgggggcaacuacaacuaccuguaccgccuguuccgcaagagcaaccucaagcccuucgagcgggacaucuccaccgagaucuaccaggccggcagcacccccugcaacgggguggagggcuucaacugcuacuucccccugcaguccuacggguuccagccgaccuacggcgugggguaccagcccuaccggguggucgugcugagcuucgagcuccugcacgcccccgccacggugugcggccccaagaaguccaccaaccuggucaagaacaagugcgugaacuucaacuucaacggccucaccgggaccggcgugcugaccgagagcaacaagaaguuccugccguuccagcaguucgggcgcgacaucgccgacacgaccgacgcgguccgcgacccccagacccuggagauccucgacaucacccccugcagcuucggcgggguguccgugaucacgccgggcaccaacaccagcaaccaggucgccgugcuguaccagggcgugaacugcaccgagguccccguggccauccacgccgaccagcugacgcccaccuggcggguguacuccaccggcagcaacgucuuccagacccgcgccgggugccucaucggcgcggagcacgugaacaacuccuacgagugcgacauccccaucggggccggcaucugcgccagcuaccagacgcagaccaacuccccgcggcgcgcccggagcguggcgucccagagcaucaucgccuacaccaugucccugggcgccgagaacagcgucgccuacuccaacaacagcaucgccauccccaccaacuucacgaucuccgugaccaccgagauccugcccgugagcaugaccaagacgagcgucgacugcaccauguacaucugcggggacuccaccgagugcagcaaccuccugcugcaguacggcuccuucugcacccagcucaaccgcgcgcugacggggaucgccguggagcaggacaagaacacccaggagguguucgcccaggucaagcagaucuacaagacgcccccgaucaaggacuucggcggguucaacuucagccagauccugcccgaccccuccaagcccagcaagcgguccuucaucgaggaccuccuguucaacaaggugacccuggccgacgccggcuucaucaagcaguacggcgacugccucggggacaucgcggcccgcgaccugaucugcgcccagaaguucaacggccugaccgugcucccgccccugcugaccgacgagaugaucgcccaguacaccagcgcccuccuggcggggaccaucacguccggcuggaccuucggggccggcgccgcccugcagauccccuucgcgaugcagauggccuaccgguucaacggcaucggggucacccagaacgugcucuacgagaaccagaagcugaucgccaaccaguucaacagcgccaucggcaagauccaggacucccugagcuccaccgccagcgcgcucgggaagcugcaggacguggucaaccagaacgcccaggcccugaacacgcucgugaagcagcuguccagcaacuucggcgccaucuccagcgugcugaacgacauccucucccgccuggacccgcccgaggccgaggugcagaucgaccggcugaucaccgggcgccuccagagccugcagaccuacgugacccagcagcugauccgggcggccgagauccgcgccagcgccaaccucgccgcgaccaagauguccgagugcguccugggccagagcaagcggguggacuucugcggcaagggguaccaccugauguccuucccccagagcgccccgcacggcguggucuuccuccacgugacguacguccccgcccaggagaagaacuucaccaccgcccccgcgaucugccacgacgggaaggcccacuucccccgcgagggcguguucguguccaacgggacccacugguucgucacgcagcggaacuucuacgagccgcagaucaucaccaccgacaacaccuucgugagcggcaacugcgacguggucaucggcaucgugaacaacacgguguacgacccccugcagcccgagcuggacuccuucaaggaggagcucgacaaguacuucaagaaccacaccagccccgacgucgaccugggggacaucuccggcaucaacgccagcguggugaacauccagaaggagaucgaccgccugaacgaggucgccaagaaccucaacgagucccugaucgaccugcaggagcucgggaaguacgagcaguacaucaaguggccgugguacaucuggcugggcuucaucgccggccugaucgcgaucgugauggugaccaucaugcucugcugcaugaccagcugcugcuccugccugaaggggugcugcagcugcggcuccugcugcaaguucgacgaggacgacagcgagcccguccugaagggggugaagcuccacuacacgugaggacuaguuauaagacugacuagcccgaugggccucccaacgggcccuccuccccuccuugcaccgagauuaaucaaaggcucuuuucagagccaccaaaaaaaaaaaaaaaaaaaaaaaaaaaaaaaaaaaaaaaaaaaaaaaaaaaaaaaaaaaaaaaaaaaaaaaaaaaaaaaaaaaaaaaaaaaaaaaaaaaaa

SEQ ID NO: 24183 - RNA, 4029 nt, Artificial Sequence
  SARS-CoV-2/Wuhan/WIV05/2019__EPI_ISL_402128 spike protein mRNA gc (1-1273)(K986P_V987P_H69del_V70del_D614G)
aggagaaagcuuaccauguucguguuccugguccuccugccccuggugagcucccagugcgugaaccucaccacccgcacgcagcugccgcccgccuacaccaacagcuucacccggggcgucuacuaccccgacaagguguuccgcuccagcgugcugcacuccacccaggaccucuuccugcccuucuucagcaacgucacgugguuccacgccaucuccgggaccaacggcaccaagcgguucgacaacccggugcugcccuucaacgacggggucuacuucgcgagcaccgagaaguccaacaucauccgcggcuggaucuucgggacgacccucgacagcaagacccagucccugcugaucgugaacaacgccaccaacguggucaucaaggugugcgaguuccaguucugcaacgaccccuuccucggcguguacuaccacaagaacaacaagagcuggauggaguccgaguuccgggucuacagcuccgccaacaacugcacguucgaguacgugagccagcccuuccugauggaccuggagggcaagcaggggaacuucaagaaccuccgcgaguucguguucaagaacaucgacggcuacuucaagaucuacuccaagcacaccccgaucaaccugguccgggaccugccccagggguucagcgcccucgagccccugguggaccugcccaucggcaucaacaucacccgcuuccagacccuccuggcccugcaccgguccuaccucacgccgggggacagcagcuccggcuggaccgcgggcgccgccgccuacuacgugggguaccugcagccccgcaccuuccugcucaaguacaacgagaacggcaccaucacggacgcggucgacugcgcccuggacccccugagcgagaccaagugcacccucaaguccuucaccguggagaaggggaucuaccagacgagcaacuuccgggugcagcccaccgaguccaucguccgcuucccgaacaucaccaaccugugccccuucggcgagguguucaacgccacccgguucgccagcgucuacgccuggaaccgcaagcggaucuccaacugcguggcggacuacagcgugcuguacaacuccgccagcuucuccacguucaagugcuacggcgucagccccaccaagcucaacgaccugugcuucaccaacguguacgccgacuccuucgugauccgcggggacgagguccggcagaucgcccccggccagaccgggaagaucgccgacuacaacuacaagcugccggacgacuucacgggcugcgugaucgcguggaacagcaacaaccucgacuccaaggucgggggcaacuacaacuaccuguaccgccuguuccgcaagagcaaccucaagcccuucgagcgggacaucuccaccgagaucuaccaggccggcagcacccccugcaacgggguggagggcuucaacugcuacuucccccugcaguccuacggguuccagccgaccaacggcgugggguaccagcccuaccggguggucgugcugagcuucgagcuccugcacgcccccgccacggugugcggccccaagaaguccaccaaccuggucaagaacaagugcgugaacuucaacuucaacggccucaccgggaccggcgugcugaccgagagcaacaagaaguuccugccguuccagcaguucgggcgcgacaucgccgacacgaccgacgcgguccgcgacccccagacccuggagauccucgacaucacccccugcagcuucggcgggguguccgugaucacgccgggcaccaacaccagcaaccaggucgccgugcuguaccagggcgugaacugcaccgagguccccguggccauccacgccgaccagcugacgcccaccuggcggguguacuccaccggcagcaacgucuuccagacccgcgccgggugccucaucggcgcggagcacgugaacaacuccuacgagugcgacauccccaucggggccggcaucugcgccagcuaccagacgcagaccaacuccccgcggcgcgcccggagcguggcgucccagagcaucaucgccuacaccaugucccugggcgccgagaacagcgucgccuacuccaacaacagcaucgccauccccaccaacuucacgaucuccgugaccaccgagauccugcccgugagcaugaccaagacgagcgucgacugcaccauguacaucugcggggacuccaccgagugcagcaaccuccugcugcaguacggcuccuucugcacccagcucaaccgcgcgcugacggggaucgccguggagcaggacaagaacacccaggagguguucgcccaggucaagcagaucuacaagacgcccccgaucaaggacuucggcggguucaacuucagccagauccugcccgaccccuccaagcccagcaagcgguccuucaucgaggaccuccuguucaacaaggugacccuggccgacgccggcuucaucaagcaguacggcgacugccucggggacaucgcggcccgcgaccugaucugcgcccagaaguucaacggccugaccgugcucccgccccugcugaccgacgagaugaucgcccaguacaccagcgcccuccuggcggggaccaucacguccggcuggaccuucggggccggcgccgcccugcagauccccuucgcgaugcagauggccuaccgguucaacggcaucggggucacccagaacgugcucuacgagaaccagaagcugaucgccaaccaguucaacagcgccaucggcaagauccaggacucccugagcuccaccgccagcgcgcucgggaagcugcaggacguggucaaccagaacgcccaggcccugaacacgcucgugaagcagcuguccagcaacuucggcgccaucuccagcgugcugaacgacauccucucccgccuggacccgcccgaggccgaggugcagaucgaccggcugaucaccgggcgccuccagagccugcagaccuacgugacccagcagcugauccgggcggccgagauccgcgccagcgccaaccucgccgcgaccaagauguccgagugcguccugggccagagcaagcggguggacuucugcggcaagggguaccaccugauguccuucccccagagcgccccgcacggcguggucuuccuccacgugacguacguccccgcccaggagaagaacuucaccaccgcccccgcgaucugccacgacgggaaggcccacuucccccgcgagggcguguucguguccaacgggacccacugguucgucacgcagcggaacuucuacgagccgcagaucaucaccaccgacaacaccuucgugagcggcaacugcgacguggucaucggcaucgugaacaacacgguguacgacccccugcagcccgagcuggacuccuucaaggaggagcucgacaaguacuucaagaaccacaccagccccgacgucgaccugggggacaucuccggcaucaacgccagcguggugaacauccagaaggagaucgaccgccugaacgaggucgccaagaaccucaacgagucccugaucgaccugcaggagcucgggaaguacgagcaguacaucaaguggccgugguacaucuggcugggcuucaucgccggccugaucgcgaucgugauggugaccaucaugcucugcugcaugaccagcugcugcuccugccugaaggggugcugcagcugcggcuccugcugcaaguucgacgaggacgacagcgagcccguccugaagggggugaagcuccacuacacgugaggacuaguuauaagacugacuagcccgaugggccucccaacgggcccuccuccccuccuugcaccgagauuaaucaaaggcucuuuucagagccaccaaaaaaaaaaaaaaaaaaaaaaaaaaaaaaaaaaaaaaaaaaaaaaaaaaaaaaaaaaaaaaaaaaaaaaaaaaaaaaaaaaaaaaaaaaaaaaaaaaaaa

SEQ ID NO: 24184 - RNA, 4035 nt, Artificial Sequence
  SARS-CoV-2/Wuhan/WIV05/2019__EPI_ISL_402128 spike protein mRNA gc (1-1273)(K986P_V987P_Y453F_D614G)
aggagaaagcuuaccauguucguguuccugguccuccugccccuggugagcucccagugcgugaaccucaccacccgcacgcagcugccgcccgccuacaccaacagcuucacccggggcgucuacuaccccgacaagguguuccgcuccagcgugcugcacuccacccaggaccucuuccugcccuucuucagcaacgucacgugguuccacgccauccacguguccgggaccaacggcaccaagcgguucgacaacccggugcugcccuucaacgacggggucuacuucgcgagcaccgagaaguccaacaucauccgcggcuggaucuucgggacgacccucgacagcaagacccagucccugcugaucgugaacaacgccaccaacguggucaucaaggugugcgaguuccaguucugcaacgaccccuuccucggcguguacuaccacaagaacaacaagagcuggauggaguccgaguuccgggucuacagcuccgccaacaacugcacguucgaguacgugagccagcccuuccugauggaccuggagggcaagcaggggaacuucaagaaccuccgcgaguucguguucaagaacaucgacggcuacuucaagaucuacuccaagcacaccccgaucaaccugguccgggaccugccccagggguucagcgcccucgagccccugguggaccugcccaucggcaucaacaucacccgcuuccagacccuccuggcccugcaccgguccuaccucacgccgggggacagcagcuccggcuggaccgcgggcgccgccgccuacuacgugggguaccugcagccccgcaccuuccugcucaaguacaacgagaacggcaccaucacggacgcggucgacugcgcccuggacccccugagcgagaccaagugcacccucaaguccuucaccguggagaaggggaucuaccagacgagcaacuuccgggugcagcccaccgaguccaucguccgcuucccgaacaucaccaaccugugccccuucggcgagguguucaacgccacccgguucgccagcgucuacgccuggaaccgcaagcggaucuccaacugcguggcggacuacagcgugcuguacaacuccgccagcuucuccacguucaagugcuacggcgucagccccaccaagcucaacgaccugugcuucaccaacguguacgccgacuccuucgugauccgcggggacgagguccggcagaucgcccccggccagaccgggaagaucgccgacuacaacuacaagcugccggacgacuucacgggcugcgugaucgcguggaacagcaacaaccucgacuccaaggucgggggcaacuacaacuaccuguuccgccuguuccgcaagagcaaccucaagcccuucgagcgggacaucuccaccgagaucuaccaggccggcagcacccccugcaacgggguggagggcuucaacugcuacuucccccugcaguccuacggguuccagccgaccaacggcgugggguaccagcccuaccggguggucgugcugagcuucgagcuccugcacgcccccgccacggugugcggccccaagaaguccaccaaccuggucaagaacaagugcgugaacuucaacuucaacggccucaccgggaccggcgugcugaccgagagcaacaagaaguuccugccguuccagcaguucgggcgcgacaucgccgacacgaccgacgcgguccgcgacccccagacccuggagauccucgacaucacccccugcagcuucggcgggguguccgugaucacgccgggcaccaacaccagcaaccaggucgccgugcuguaccagggcgugaacugcaccgagguccccguggccauccacgccgaccagcugacgcccaccuggcggguguacuccaccggcagcaacgucuuccagacccgcgccgggugccucaucggcgcggagcacgugaacaacuccuacgagugcgacauccccaucggggccggcaucugcgccagcuaccagacgcagaccaacuccccgcggcgcgcccggagcguggcgucccagagcaucaucgccuacaccaugucccugggcgccgagaacagcgucgccuacuccaacaacagcaucgccauccccaccaacuucacgaucuccgugaccaccgagauccugcccgugagcaugaccaagacgagcgucgacugcaccauguacaucugcggggacuccaccgagugcagcaaccuccugcugcaguacggcuccuucugcacccagcucaaccgcgcgcugacggggaucgccguggagcaggacaagaacacccaggagguguucgcccaggucaagcagaucuacaagacgcccccgaucaaggacuucggcggguucaacuucagccagauccugcccgaccccuccaagcccagcaagcgguccuucaucgaggaccuccuguucaacaaggugacccuggccgacgccggcuucaucaagcaguacggcgacugccucggggacaucgcggcccgcgaccugaucugcgcccagaaguucaacggccugaccgugcucccgccccugcugaccgacgagaugaucgcccaguacaccagcgcccuccuggcggggaccaucacguccggcuggaccuucggggccggcgccgcccugcagauccccuucgcgaugcagauggccuaccgguucaacggcaucggggucacccagaacgugcucuacgagaaccagaagcugaucgccaaccaguucaacagcgccaucggcaagauccaggacucccugagcuccaccgccagcgcgcucgggaagcugcaggacguggucaaccagaacgcccaggcccugaacacgcucgugaagcagcuguccagcaacuucggcgccaucuccagcgugcugaacgacauccucucccgccuggacccgcccgaggccgaggugcagaucgaccggcugaucaccgggcgccuccagagccugcagaccuacgugacccagcagcugauccgggcggccgagauccgcgccagcgccaaccucgccgcgaccaagauguccgagugcguccugggccagagcaagcggguggacuucugcggcaagggguaccaccugauguccuucccccagagcgccccgcacggcguggucuuccuccacgugacguacguccccgcccaggagaagaacuucaccaccgcccccgcgaucugccacgacgggaaggcccacuucccccgcgagggcguguucguguccaacgggacccacugguucgucacgcagcggaacuucuacgagccgcagaucaucaccaccgacaacaccuucgugagcggcaacugcgacguggucaucggcaucgugaacaacacgguguacgacccccugcagcccgagcuggacuccuucaaggaggagcucgacaaguacuucaagaaccacaccagccccgacgucgaccugggggacaucuccggcaucaacgccagcguggugaacauccagaaggagaucgaccgccugaacgaggucgccaagaaccucaacgagucccugaucgaccugcaggagcucgggaaguacgagcaguacaucaaguggccgugguacaucuggcugggcuucaucgccggccugaucgcgaucgugauggugaccaucaugcucugcugcaugaccagcugcugcuccugccugaaggggugcugcagcugcggcuccugcugcaaguucgacgaggacgacagcgagcccguccugaagggggugaagcuccacuacacgugaggacuaguuauaagacugacuagcccgaugggccucccaacgggcccuccuccccuccuugcaccgagauuaaucaaaggcucuuuucagagccaccaaaaaaaaaaaaaaaaaaaaaaaaaaaaaaaaaaaaaaaaaaaaaaaaaaaaaaaaaaaaaaaaaaaaaaaaaaaaaaaaaaaaaaaaaaaaaaaaaaaaa

SEQ ID NO: 24185 - RNA, 4035 nt, Artificial Sequence
  SARS-CoV-2/Wuhan/WIV05/2019__EPI_ISL_402128 spike protein mRNA gc (1-1273)(K986P_V987P_D614G_I692V)
aggagaaagcuuaccauguucguguuccugguccuccugccccuggugagcucccagugcgugaaccucaccacccgcacgcagcugccgcccgccuacaccaacagcuucacccggggcgucuacuaccccgacaagguguuccgcuccagcgugcugcacuccacccaggaccucuuccugcccuucuucagcaacgucacgugguuccacgccauccacguguccgggaccaacggcaccaagcgguucgacaacccggugcugcccuucaacgacggggucuacuucgcgagcaccgagaaguccaacaucauccgcggcuggaucuucgggacgacccucgacagcaagacccagucccugcugaucgugaacaacgccaccaacguggucaucaaggugugcgaguuccaguucugcaacgaccccuuccucggcguguacuaccacaagaacaacaagagcuggauggaguccgaguuccgggucuacagcuccgccaacaacugcacguucgaguacgugagccagcccuuccugauggaccuggagggcaagcaggggaacuucaagaaccuccgcgaguucguguucaagaacaucgacggcuacuucaagaucuacuccaagcacaccccgaucaaccugguccgggaccugccccagggguucagcgcccucgagccccugguggaccugcccaucggcaucaacaucacccgcuuccagacccuccuggcccugcaccgguccuaccucacgccgggggacagcagcuccggcuggaccgcgggcgccgccgccuacuacgugggguaccugcagccccgcaccuuccugcucaaguacaacgagaacggcaccaucacggacgcggucgacugcgcccuggacccccugagcgagaccaagugcacccucaaguccuucaccguggagaaggggaucuaccagacgagcaacuuccgggugcagcccaccgaguccaucguccgcuucccgaacaucaccaaccugugccccuucggcgagguguucaacgccacccgguucgccagcgucuacgccuggaaccgcaagcggaucuccaacugcguggcggacuacagcgugcuguacaacuccgccagcuucuccacguucaagugcuacggcgucagccccaccaagcucaacgaccugugcuucaccaacguguacgccgacuccuucgugauccgcggggacgagguccggcagaucgcccccggccagaccgggaagaucgccgacuacaacuacaagcugccggacgacuucacgggcugcgugaucgcguggaacagcaacaaccucgacuccaaggucgggggcaacuacaacuaccuguaccgccuguuccgcaagagcaaccucaagcccuucgagcgggacaucuccaccgagaucuaccaggccggcagcacccccugcaacgggguggagggcuucaacugcuacuucccccugcaguccuacggguuccagccgaccaacggcgugggguaccagcccuaccggguggucgugcugagcuucgagcuccugcacgcccccgccacggugugcggccccaagaaguccaccaaccuggucaagaacaagugcgugaacuucaacuucaacggccucaccgggaccggcgugcugaccgagagcaacaagaaguuccugccguuccagcaguucgggcgcgacaucgccgacacgaccgacgcgguccgcgacccccagacccuggagauccucgacaucacccccugcagcuucggcgggguguccgugaucacgccgggcaccaacaccagcaaccaggucgccgugcuguaccagggcgugaacugcaccgagguccccguggccauccacgccgaccagcugacgcccaccuggcggguguacuccaccggcagcaacgucuuccagacccgcgccgggugccucaucggcgcggagcacgugaacaacuccuacgagugcgacauccccaucggggccggcaucugcgccagcuaccagacgcagaccaacuccccgcggcgcgcccggagcguggcgucccagagcgucaucgccuacaccaugucccugggcgccgagaacagcgucgccuacuccaacaacagcaucgccauccccaccaacuucacgaucuccgugaccaccgagauccugcccgugagcaugaccaagacgagcgucgacugcaccauguacaucugcggggacuccaccgagugcagcaaccuccugcugcaguacggcuccuucugcacccagcucaaccgcgcgcugacggggaucgccguggagcaggacaagaacacccaggagguguucgcccaggucaagcagaucuacaagacgcccccgaucaaggacuucggcggguucaacuucagccagauccugcccgaccccuccaagcccagcaagcgguccuucaucgaggaccuccuguucaacaaggugacccuggccgacgccggcuucaucaagcaguacggcgacugccucggggacaucgcggcccgcgaccugaucugcgcccagaaguucaacggccugaccgugcucccgccccugcugaccgacgagaugaucgcccaguacaccagcgcccuccuggcggggaccaucacguccggcuggaccuucggggccggcgccgcccugcagauccccuucgcgaugcagauggccuaccgguucaacggcaucggggucacccagaacgugcucuacgagaaccagaagcugaucgccaaccaguucaacagcgccaucggcaagauccaggacucccugagcuccaccgccagcgcgcucgggaagcugcaggacguggucaaccagaacgcccaggcccugaacacgcucgugaagcagcuguccagcaacuucggcgccaucuccagcgugcugaacgacauccucucccgccuggacccgcccgaggccgaggugcagaucgaccggcugaucaccgggcgccuccagagccugcagaccuacgugacccagcagcugauccgggcggccgagauccgcgccagcgccaaccucgccgcgaccaagauguccgagugcguccugggccagagcaagcggguggacuucugcggcaagggguaccaccugauguccuucccccagagcgccccgcacggcguggucuuccuccacgugacguacguccccgcccaggagaagaacuucaccaccgcccccgcgaucugccacgacgggaaggcccacuucccccgcgagggcguguucguguccaacgggacccacugguucgucacgcagcggaacuucuacgagccgcagaucaucaccaccgacaacaccuucgugagcggcaacugcgacguggucaucggcaucgugaacaacacgguguacgacccccugcagcccgagcuggacuccuucaaggaggagcucgacaaguacuucaagaaccacaccagccccgacgucgaccugggggacaucuccggcaucaacgccagcguggugaacauccagaaggagaucgaccgccugaacgaggucgccaagaaccucaacgagucccugaucgaccugcaggagcucgggaaguacgagcaguacaucaaguggccgugguacaucuggcugggcuucaucgccggccugaucgcgaucgugauggugaccaucaugcucugcugcaugaccagcugcugcuccugccugaaggggugcugcagcugcggcuccugcugcaaguucgacgaggacgacagcgagcccguccugaagggggugaagcuccacuacacgugaggacuaguuauaagacugacuagcccgaugggccucccaacgggcccuccuccccuccuugcaccgagauuaaucaaaggcucuuuucagagccaccaaaaaaaaaaaaaaaaaaaaaaaaaaaaaaaaaaaaaaaaaaaaaaaaaaaaaaaaaaaaaaaaaaaaaaaaaaaaaaaaaaaaaaaaaaaaaaaaaaaaa

SEQ ID NO: 24186 - RNA, 4035 nt, Artificial Sequence
  SARS-CoV-2/Wuhan/WIV05/2019__EPI_ISL_402128 spike protein mRNA gc (1-1273)(K986P_V987P_D614G_M1229I)
aggagaaagcuuaccauguucguguuccugguccuccugccccuggugagcucccagugcgugaaccucaccacccgcacgcagcugccgcccgccuacaccaacagcuucacccggggcgucuacuaccccgacaagguguuccgcuccagcgugcugcacuccacccaggaccucuuccugcccuucuucagcaacgucacgugguuccacgccauccacguguccgggaccaacggcaccaagcgguucgacaacccggugcugcccuucaacgacggggucuacuucgcgagcaccgagaaguccaacaucauccgcggcuggaucuucgggacgacccucgacagcaagacccagucccugcugaucgugaacaacgccaccaacguggucaucaaggugugcgaguuccaguucugcaacgaccccuuccucggcguguacuaccacaagaacaacaagagcuggauggaguccgaguuccgggucuacagcuccgccaacaacugcacguucgaguacgugagccagcccuuccugauggaccuggagggcaagcaggggaacuucaagaaccuccgcgaguucguguucaagaacaucgacggcuacuucaagaucuacuccaagcacaccccgaucaaccugguccgggaccugccccagggguucagcgcccucgagccccugguggaccugcccaucggcaucaacaucacccgcuuccagacccuccuggcccugcaccgguccuaccucacgccgggggacagcagcuccggcuggaccgcgggcgccgccgccuacuacgugggguaccugcagccccgcaccuuccugcucaaguacaacgagaacggcaccaucacggacgcggucgacugcgcccuggacccccugagcgagaccaagugcacccucaaguccuucaccguggagaaggggaucuaccagacgagcaacuuccgggugcagcccaccgaguccaucguccgcuucccgaacaucaccaaccugugccccuucggcgagguguucaacgccacccgguucgccagcgucuacgccuggaaccgcaagcggaucuccaacugcguggcggacuacagcgugcuguacaacuccgccagcuucuccacguucaagugcuacggcgucagccccaccaagcucaacgaccugugcuucaccaacguguacgccgacuccuucgugauccgcggggacgagguccggcagaucgcccccggccagaccgggaagaucgccgacuacaacuacaagcugccggacgacuucacgggcugcgugaucgcguggaacagcaacaaccucgacuccaaggucgggggcaacuacaacuaccuguaccgccuguuccgcaagagcaaccucaagcccuucgagcgggacaucuccaccgagaucuaccaggccggcagcacccccugcaacgggguggagggcuucaacugcuacuucccccugcaguccuacggguuccagccgaccaacggcgugggguaccagcccuaccggguggucgugcugagcuucgagcuccugcacgcccccgccacggugugcggccccaagaaguccaccaaccuggucaagaacaagugcgugaacuucaacuucaacggccucaccgggaccggcgugcugaccgagagcaacaagaaguuccugccguuccagcaguucgggcgcgacaucgccgacacgaccgacgcgguccgcgacccccagacccuggagauccucgacaucacccccugcagcuucggcgggguguccgugaucacgccgggcaccaacaccagcaaccaggucgccgugcuguaccagggcgugaacugcaccgagguccccguggccauccacgccgaccagcugacgcccaccuggcggguguacuccaccggcagcaacgucuuccagacccgcgccgggugccucaucggcgcggagcacgugaacaacuccuacgagugcgacauccccaucggggccggcaucugcgccagcuaccagacgcagaccaacuccccgcggcgcgcccggagcguggcgucccagagcaucaucgccuacaccaugucccugggcgccgagaacagcgucgccuacuccaacaacagcaucgccauccccaccaacuucacgaucuccgugaccaccgagauccugcccgugagcaugaccaagacgagcgucgacugcaccauguacaucugcggggacuccaccgagugcagcaaccuccugcugcaguacggcuccuucugcacccagcucaaccgcgcgcugacggggaucgccguggagcaggacaagaacacccaggagguguucgcccaggucaagcagaucuacaagacgcccccgaucaaggacuucggcggguucaacuucagccagauccugcccgaccccuccaagcccagcaagcgguccuucaucgaggaccuccuguucaacaaggugacccuggccgacgccggcuucaucaagcaguacggcgacugccucggggacaucgcggcccgcgaccugaucugcgcccagaaguucaacggccugaccgugcucccgccccugcugaccgacgagaugaucgcccaguacaccagcgcccuccuggcggggaccaucacguccggcuggaccuucggggccggcgccgcccugcagauccccuucgcgaugcagauggccuaccgguucaacggcaucggggucacccagaacgugcucuacgagaaccagaagcugaucgccaaccaguucaacagcgccaucggcaagauccaggacucccugagcuccaccgccagcgcgcucgggaagcugcaggacguggucaaccagaacgcccaggcccugaacacgcucgugaagcagcuguccagcaacuucggcgccaucuccagcgugcugaacgacauccucucccgccuggacccgcccgaggccgaggugcagaucgaccggcugaucaccgggcgccuccagagccugcagaccuacgugacccagcagcugauccgggcggccgagauccgcgccagcgccaaccucgccgcgaccaagauguccgagugcguccugggccagagcaagcggguggacuucugcggcaagggguaccaccugauguccuucccccagagcgccccgcacggcguggucuuccuccacgugacguacguccccgcccaggagaagaacuucaccaccgcccccgcgaucugccacgacgggaaggcccacuucccccgcgagggcguguucguguccaacgggacccacugguucgucacgcagcggaacuucuacgagccgcagaucaucaccaccgacaacaccuucgugagcggcaacugcgacguggucaucggcaucgugaacaacacgguguacgacccccugcagcccgagcuggacuccuucaaggaggagcucgacaaguacuucaagaaccacaccagccccgacgucgaccugggggacaucuccggcaucaacgccagcguggugaacauccagaaggagaucgaccgccugaacgaggucgccaagaaccucaacgagucccugaucgaccugcaggagcucgggaaguacgagcaguacaucaaguggccgugguacaucuggcugggcuucaucgccggccugaucgcgaucgugaucgugaccaucaugcucugcugcaugaccagcugcugcuccugccugaaggggugcugcagcugcggcuccugcugcaaguucgacgaggacgacagcgagcccguccugaagggggugaagcuccacuacacgugaggacuaguuauaagacugacuagcccgaugggccucccaacgggcccuccuccccuccuugcaccgagauuaaucaaaggcucuuuucagagccaccaaaaaaaaaaaaaaaaaaaaaaaaaaaaaaaaaaaaaaaaaaaaaaaaaaaaaaaaaaaaaaaaaaaaaaaaaaaaaaaaaaaaaaaaaaaaaaaaaaaaa

SEQ ID NO: 24187 - RNA, 4029 nt, Artificial Sequence
  SARS-CoV-2/Wuhan/WIV05/2019__EPI_ISL_402128 spike protein mRNA gc (1-1273)(K986P_V987P_H69del_V70del_A222V_Y453F_S477N_D614G_I692V)
aggagaaagcuuaccauguucguguuccugguccuccugccccuggugagcucccagugcgugaaccucaccacccgcacgcagcugccgcccgccuacaccaacagcuucacccggggcgucuacuaccccgacaagguguuccgcuccagcgugcugcacuccacccaggaccucuuccugcccuucuucagcaacgucacgugguuccacgccaucuccgggaccaacggcaccaagcgguucgacaacccggugcugcccuucaacgacggggucuacuucgcgagcaccgagaaguccaacaucauccgcggcuggaucuucgggacgacccucgacagcaagacccagucccugcugaucgugaacaacgccaccaacguggucaucaaggugugcgaguuccaguucugcaacgaccccuuccucggcguguacuaccacaagaacaacaagagcuggauggaguccgaguuccgggucuacagcuccgccaacaacugcacguucgaguacgugagccagcccuuccugauggaccuggagggcaagcaggggaacuucaagaaccuccgcgaguucguguucaagaacaucgacggcuacuucaagaucuacuccaagcacaccccgaucaaccugguccgggaccugccccagggguucagcguccucgagccccugguggaccugcccaucggcaucaacaucacccgcuuccagacccuccuggcccugcaccgguccuaccucacgccgggggacagcagcuccggcuggaccgcgggcgccgccgccuacuacgugggguaccugcagccccgcaccuuccugcucaaguacaacgagaacggcaccaucacggacgcggucgacugcgcccuggacccccugagcgagaccaagugcacccucaaguccuucaccguggagaaggggaucuaccagacgagcaacuuccgggugcagcccaccgaguccaucguccgcuucccgaacaucaccaaccugugccccuucggcgagguguucaacgccacccgguucgccagcgucuacgccuggaaccgcaagcggaucuccaacugcguggcggacuacagcgugcuguacaacuccgccagcuucuccacguucaagugcuacggcgucagccccaccaagcucaacgaccugugcuucaccaacguguacgccgacuccuucgugauccgcggggacgagguccggcagaucgcccccggccagaccgggaagaucgccgacuacaacuacaagcugccggacgacuucacgggcugcgugaucgcguggaacagcaacaaccucgacuccaaggucgggggcaacuacaacuaccuguuccgccuguuccgcaagagcaaccucaagcccuucgagcgggacaucuccaccgagaucuaccaggccggcaacacccccugcaacgggguggagggcuucaacugcuacuucccccugcaguccuacggguuccagccgaccaacggcgugggguaccagcccuaccggguggucgugcugagcuucgagcuccugcacgcccccgccacggugugcggccccaagaaguccaccaaccuggucaagaacaagugcgugaacuucaacuucaacggccucaccgggaccggcgugcugaccgagagcaacaagaaguuccugccguuccagcaguucgggcgcgacaucgccgacacgaccgacgcgguccgcgacccccagacccuggagauccucgacaucacccccugcagcuucggcgggguguccgugaucacgccgggcaccaacaccagcaaccaggucgccgugcuguaccagggcgugaacugcaccgagguccccguggccauccacgccgaccagcugacgcccaccuggcggguguacuccaccggcagcaacgucuuccagacccgcgccgggugccucaucggcgcggagcacgugaacaacuccuacgagugcgacauccccaucggggccggcaucugcgccagcuaccagacgcagaccaacuccccgcggcgcgcccggagcguggcgucccagagcgucaucgccuacaccaugucccugggcgccgagaacagcgucgccuacuccaacaacagcaucgccauccccaccaacuucacgaucuccgugaccaccgagauccugcccgugagcaugaccaagacgagcgucgacugcaccauguacaucugcggggacuccaccgagugcagcaaccuccugcugcaguacggcuccuucugcacccagcucaaccgcgcgcugacggggaucgccguggagcaggacaagaacacccaggagguguucgcccaggucaagcagaucuacaagacgcccccgaucaaggacuucggcggguucaacuucagccagauccugcccgaccccuccaagcccagcaagcgguccuucaucgaggaccuccuguucaacaaggugacccuggccgacgccggcuucaucaagcaguacggcgacugccucggggacaucgcggcccgcgaccugaucugcgcccagaaguucaacggccugaccgugcucccgccccugcugaccgacgagaugaucgcccaguacaccagcgcccuccuggcggggaccaucacguccggcuggaccuucggggccggcgccgcccugcagauccccuucgcgaugcagauggccuaccgguucaacggcaucggggucacccagaacgugcucuacgagaaccagaagcugaucgccaaccaguucaacagcgccaucggcaagauccaggacucccugagcuccaccgccagcgcgcucgggaagcugcaggacguggucaaccagaacgcccaggcccugaacacgcucgugaagcagcuguccagcaacuucggcgccaucuccagcgugcugaacgacauccucucccgccuggacccgcccgaggccgaggugcagaucgaccggcugaucaccgggcgccuccagagccugcagaccuacgugacccagcagcugauccgggcggccgagauccgcgccagcgccaaccucgccgcgaccaagauguccgagugcguccugggccagagcaagcggguggacuucugcggcaagggguaccaccugauguccuucccccagagcgccccgcacggcguggucuuccuccacgugacguacguccccgcccaggagaagaacuucaccaccgcccccgcgaucugccacgacgggaaggcccacuucccccgcgagggcguguucguguccaacgggacccacugguucgucacgcagcggaacuucuacgagccgcagaucaucaccaccgacaacaccuucgugagcggcaacugcgacguggucaucggcaucgugaacaacacgguguacgacccccugcagcccgagcuggacuccuucaaggaggagcucgacaaguacuucaagaaccacaccagccccgacgucgaccugggggacaucuccggcaucaacgccagcguggugaacauccagaaggagaucgaccgccugaacgaggucgccaagaaccucaacgagucccugaucgaccugcaggagcucgggaaguacgagcaguacaucaaguggccgugguacaucuggcugggcuucaucgccggccugaucgcgaucgugauggugaccaucaugcucugcugcaugaccagcugcugcuccugccugaaggggugcugcagcugcggcuccugcugcaaguucgacgaggacgacagcgagcccguccugaagggggugaagcuccacuacacgugaggacuaguuauaagacugacuagcccgaugggccucccaacgggcccuccuccccuccuugcaccgagauuaaucaaaggcucuuuucagagccaccaaaaaaaaaaaaaaaaaaaaaaaaaaaaaaaaaaaaaaaaaaaaaaaaaaaaaaaaaaaaaaaaaaaaaaaaaaaaaaaaaaaaaaaaaaaaaaaaaaaaa

SEQ ID NO: 24188 - RNA, 4029 nt, Artificial Sequence
  SARS-CoV-2/Wuhan/WIV05/2019__EPI_ISL_402128 spike protein mRNA gc (1-1273)(K986P_V987P_H69del_V70del_Y453F_D614G_I692V_M1229I)
aggagaaagcuuaccauguucguguuccugguccuccugccccuggugagcucccagugcgugaaccucaccacccgcacgcagcugccgcccgccuacaccaacagcuucacccggggcgucuacuaccccgacaagguguuccgcuccagcgugcugcacuccacccaggaccucuuccugcccuucuucagcaacgucacgugguuccacgccaucuccgggaccaacggcaccaagcgguucgacaacccggugcugcccuucaacgacggggucuacuucgcgagcaccgagaaguccaacaucauccgcggcuggaucuucgggacgacccucgacagcaagacccagucccugcugaucgugaacaacgccaccaacguggucaucaaggugugcgaguuccaguucugcaacgaccccuuccucggcguguacuaccacaagaacaacaagagcuggauggaguccgaguuccgggucuacagcuccgccaacaacugcacguucgaguacgugagccagcccuuccugauggaccuggagggcaagcaggggaacuucaagaaccuccgcgaguucguguucaagaacaucgacggcuacuucaagaucuacuccaagcacaccccgaucaaccugguccgggaccugccccagggguucagcgcccucgagccccugguggaccugcccaucggcaucaacaucacccgcuuccagacccuccuggcccugcaccgguccuaccucacgccgggggacagcagcuccggcuggaccgcgggcgccgccgccuacuacgugggguaccugcagccccgcaccuuccugcucaaguacaacgagaacggcaccaucacggacgcggucgacugcgcccuggacccccugagcgagaccaagugcacccucaaguccuucaccguggagaaggggaucuaccagacgagcaacuuccgggugcagcccaccgaguccaucguccgcuucccgaacaucaccaaccugugccccuucggcgagguguucaacgccacccgguucgccagcgucuacgccuggaaccgcaagcggaucuccaacugcguggcggacuacagcgugcuguacaacuccgccagcuucuccacguucaagugcuacggcgucagccccaccaagcucaacgaccugugcuucaccaacguguacgccgacuccuucgugauccgcggggacgagguccggcagaucgcccccggccagaccgggaagaucgccgacuacaacuacaagcugccggacgacuucacgggcugcgugaucgcguggaacagcaacaaccucgacuccaaggucgggggcaacuacaacuaccuguuccgccuguuccgcaagagcaaccucaagcccuucgagcgggacaucuccaccgagaucuaccaggccggcagcacccccugcaacgggguggagggcuucaacugcuacuucccccugcaguccuacggguuccagccgaccaacggcgugggguaccagcccuaccggguggucgugcugagcuucgagcuccugcacgcccccgccacggugugcggccccaagaaguccaccaaccuggucaagaacaagugcgugaacuucaacuucaacggccucaccgggaccggcgugcugaccgagagcaacaagaaguuccugccguuccagcaguucgggcgcgacaucgccgacacgaccgacgcgguccgcgacccccagacccuggagauccucgacaucacccccugcagcuucggcgggguguccgugaucacgccgggcaccaacaccagcaaccaggucgccgugcuguaccagggcgugaacugcaccgagguccccguggccauccacgccgaccagcugacgcccaccuggcggguguacuccaccggcagcaacgucuuccagacccgcgccgggugccucaucggcgcggagcacgugaacaacuccuacgagugcgacauccccaucggggccggcaucugcgccagcuaccagacgcagaccaacuccccgcggcgcgcccggagcguggcgucccagagcgugaucgccuacaccaugucccugggcgccgagaacagcgucgccuacuccaacaacagcaucgccauccccaccaacuucacgaucuccgugaccaccgagauccugcccgugagcaugaccaagacgagcgucgacugcaccauguacaucugcggggacuccaccgagugcagcaaccuccugcugcaguacggcuccuucugcacccagcucaaccgcgcgcugacggggaucgccguggagcaggacaagaacacccaggagguguucgcccaggucaagcagaucuacaagacgcccccgaucaaggacuucggcggguucaacuucagccagauccugcccgaccccuccaagcccagcaagcgguccuucaucgaggaccuccuguucaacaaggugacccuggccgacgccggcuucaucaagcaguacggcgacugccucggggacaucgcggcccgcgaccugaucugcgcccagaaguucaacggccugaccgugcucccgccccugcugaccgacgagaugaucgcccaguacaccagcgcccuccuggcggggaccaucacguccggcuggaccuucggggccggcgccgcccugcagauccccuucgcgaugcagauggccuaccgguucaacggcaucggggucacccagaacgugcucuacgagaaccagaagcugaucgccaaccaguucaacagcgccaucggcaagauccaggacucccugagcuccaccgccagcgcgcucgggaagcugcaggacguggucaaccagaacgcccaggcccugaacacgcucgugaagcagcuguccagcaacuucggcgccaucuccagcgugcugaacgacauccucucccgccuggacccgcccgaggccgaggugcagaucgaccggcugaucaccgggcgccuccagagccugcagaccuacgugacccagcagcugauccgggcggccgagauccgcgccagcgccaaccucgccgcgaccaagauguccgagugcguccugggccagagcaagcggguggacuucugcggcaagggguaccaccugauguccuucccccagagcgccccgcacggcguggucuuccuccacgugacguacguccccgcccaggagaagaacuucaccaccgcccccgcgaucugccacgacgggaaggcccacuucccccgcgagggcguguucguguccaacgggacccacugguucgucacgcagcggaacuucuacgagccgcagaucaucaccaccgacaacaccuucgugagcggcaacugcgacguggucaucggcaucgugaacaacacgguguacgacccccugcagcccgagcuggacuccuucaaggaggagcucgacaaguacuucaagaaccacaccagccccgacgucgaccugggggacaucuccggcaucaacgccagcguggugaacauccagaaggagaucgaccgccugaacgaggucgccaagaaccucaacgagucccugaucgaccugcaggagcucgggaaguacgagcaguacaucaaguggccgugguacaucuggcugggcuucaucgccggccugaucgcgaucgugaucgugaccaucaugcucugcugcaugaccagcugcugcuccugccugaaggggugcugcagcugcggcuccugcugcaaguucgacgaggacgacagcgagcccguccugaagggggugaagcuccacuacacgugaggacuaguuauaagacugacuagcccgaugggccucccaacgggcccuccuccccuccuugcaccgagauuaaucaaaggcucuuuucagagccaccaaaaaaaaaaaaaaaaaaaaaaaaaaaaaaaaaaaaaaaaaaaaaaaaaaaaaaaaaaaaaaaaaaaaaaaaaaaaaaaaaaaaaaaaaaaaaaaaaaaaa

SEQ ID NO: 24189 - RNA, 4026 nt, Artificial Sequence
  SARS-CoV-2/Wuhan/WIV05/2019__EPI_ISL_402128 spike protein mRNA gc (1-1273)(K986P_V987P_K986P_V987P_H69del_V70del_Y144del_N501Y_A570 D_D614G_P681H_T716I_S982A_D1118H)
aggagaaagcuuaccauguucguguuccugguccuccugccccuggugagcucccagugcgugaaccucaccacccgcacgcagcugccgcccgccuacaccaacagcuucacccggggcgucuacuaccccgacaagguguuccgcuccagcgugcugcacuccacccaggaccucuuccugcccuucuucagcaacgucacgugguuccacgccaucuccgggaccaacggcaccaagcgguucgacaacccggugcugcccuucaacgacggggucuacuucgcgagcaccgagaaguccaacaucauccgcggcuggaucuucgggacgacccucgacagcaagacccagucccugcugaucgugaacaacgccaccaacguggucaucaaggugugcgaguuccaguucugcaacgaccccuuccucggcguguaccacaagaacaacaagagcuggauggaguccgaguuccgggucuacagcuccgccaacaacugcacguucgaguacgugagccagcccuuccugauggaccuggagggcaagcaggggaacuucaagaaccuccgcgaguucguguucaagaacaucgacggcuacuucaagaucuacuccaagcacaccccgaucaaccugguccgggaccugccccagggguucagcgcccucgagccccugguggaccugcccaucggcaucaacaucacccgcuuccagacccuccuggcccugcaccgguccuaccucacgccgggggacagcagcuccggcuggaccgcgggcgccgccgccuacuacgugggguaccugcagccccgcaccuuccugcucaaguacaacgagaacggcaccaucacggacgcggucgacugcgcccuggacccccugagcgagaccaagugcacccucaaguccuucaccguggagaaggggaucuaccagacgagcaacuuccgggugcagcccaccgaguccaucguccgcuucccgaacaucaccaaccugugccccuucggcgagguguucaacgccacccgguucgccagcgucuacgccuggaaccgcaagcggaucuccaacugcguggcggacuacagcgugcuguacaacuccgccagcuucuccacguucaagugcuacggcgucagccccaccaagcucaacgaccugugcuucaccaacguguacgccgacuccuucgugauccgcggggacgagguccggcagaucgcccccggccagaccgggaagaucgccgacuacaacuacaagcugccggacgacuucacgggcugcgugaucgcguggaacagcaacaaccucgacuccaaggucgggggcaacuacaacuaccuguaccgccuguuccgcaagagcaaccucaagcccuucgagcgggacaucuccaccgagaucuaccaggccggcagcacccccugcaacgggguggagggcuucaacugcuacuucccccugcaguccuacggguuccagccgaccuacggcgugggguaccagcccuaccggguggucgugcugagcuucgagcuccugcacgcccccgccacggugugcggccccaagaaguccaccaaccuggucaagaacaagugcgugaacuucaacuucaacggccucaccgggaccggcgugcugaccgagagcaacaagaaguuccugccguuccagcaguucgggcgcgacaucgacgacacgaccgacgcgguccgcgacccccagacccuggagauccucgacaucacccccugcagcuucggcgggguguccgugaucacgccgggcaccaacaccagcaaccaggucgccgugcuguaccagggcgugaacugcaccgagguccccguggccauccacgccgaccagcugacgcccaccuggcggguguacuccaccggcagcaacgucuuccagacccgcgccgggugccucaucggcgcggagcacgugaacaacuccuacgagugcgacauccccaucggggccggcaucugcgccagcuaccagacgcagaccaacucccaccggcgcgcccggagcguggcgucccagagcaucaucgccuacaccaugucccugggcgccgagaacagcgucgccuacuccaacaacagcaucgccauccccaucaacuucacgaucuccgugaccaccgagauccugcccgugagcaugaccaagacgagcgucgacugcaccauguacaucugcggggacuccaccgagugcagcaaccuccugcugcaguacggcuccuucugcacccagcucaaccgcgcgcugacggggaucgccguggagcaggacaagaacacccaggagguguucgcccaggucaagcagaucuacaagacgcccccgaucaaggacuucggcggguucaacuucagccagauccugcccgaccccuccaagcccagcaagcgguccuucaucgaggaccuccuguucaacaaggugacccuggccgacgccggcuucaucaagcaguacggcgacugccucggggacaucgcggcccgcgaccugaucugcgcccagaaguucaacggccugaccgugcucccgccccugcugaccgacgagaugaucgcccaguacaccagcgcccuccuggcggggaccaucacguccggcuggaccuucggggccggcgccgcccugcagauccccuucgcgaugcagauggccuaccgguucaacggcaucggggucacccagaacgugcucuacgagaaccagaagcugaucgccaaccaguucaacagcgccaucggcaagauccaggacucccugagcuccaccgccagcgcgcucgggaagcugcaggacguggucaaccagaacgcccaggcccugaacacgcucgugaagcagcuguccagcaacuucggcgccaucuccagcgugcugaacgacauccucgcccgccuggacccgcccgaggccgaggugcagaucgaccggcugaucaccgggcgccuccagagccugcagaccuacgugacccagcagcugauccgggcggccgagauccgcgccagcgccaaccucgccgcgaccaagauguccgagugcguccugggccagagcaagcggguggacuucugcggcaagggguaccaccugauguccuucccccagagcgccccgcacggcguggucuuccuccacgugacguacguccccgcccaggagaagaacuucaccaccgcccccgcgaucugccacgacgggaaggcccacuucccccgcgagggcguguucguguccaacgggacccacugguucgucacgcagcggaacuucuacgagccgcagaucaucaccacccacaacaccuucgugagcggcaacugcgacguggucaucggcaucgugaacaacacgguguacgacccccugcagcccgagcuggacuccuucaaggaggagcucgacaaguacuucaagaaccacaccagccccgacgucgaccugggggacaucuccggcaucaacgccagcguggugaacauccagaaggagaucgaccgccugaacgaggucgccaagaaccucaacgagucccugaucgaccugcaggagcucgggaaguacgagcaguacaucaaguggccgugguacaucuggcugggcuucaucgccggccugaucgcgaucgugauggugaccaucaugcucugcugcaugaccagcugcugcuccugccugaaggggugcugcagcugcggcuccugcugcaaguucgacgaggacgacagcgagcccguccugaagggggugaagcuccacuacacgugaggacuaguuauaagacugacuagcccgaugggccucccaacgggcccuccuccccuccuugcaccgagauuaaucaaaggcucuuuucagagccaccaaaaaaaaaaaaaaaaaaaaaaaaaaaaaaaaaaaaaaaaaaaaaaaaaaaaaaaaaaaaaaaaaaaaaaaaaaaaaaaaaaaaaaaaaaaaaaaaaaaaa

SEQ ID NO: 24190 - RNA, 4035 nt, Artificial Sequence
  SARS-CoV-2/Wuhan/WIV05/2019__EPI_ISL_402128 spike protein mRNA gc (1-1273)(K986P_V987P_K986P_V987P_K417N_E484K_N501Y_D614G)
aggagaaagcuuaccauguucguguuccugguccuccugccccuggugagcucccagugcgugaaccucaccacccgcacgcagcugccgcccgccuacaccaacagcuucacccggggcgucuacuaccccgacaagguguuccgcuccagcgugcugcacuccacccaggaccucuuccugcccuucuucagcaacgucacgugguuccacgccauccacguguccgggaccaacggcaccaagcgguucgacaacccggugcugcccuucaacgacggggucuacuucgcgagcaccgagaaguccaacaucauccgcggcuggaucuucgggacgacccucgacagcaagacccagucccugcugaucgugaacaacgccaccaacguggucaucaaggugugcgaguuccaguucugcaacgaccccuuccucggcguguacuaccacaagaacaacaagagcuggauggaguccgaguuccgggucuacagcuccgccaacaacugcacguucgaguacgugagccagcccuuccugauggaccuggagggcaagcaggggaacuucaagaaccuccgcgaguucguguucaagaacaucgacggcuacuucaagaucuacuccaagcacaccccgaucaaccugguccgggaccugccccagggguucagcgcccucgagccccugguggaccugcccaucggcaucaacaucacccgcuuccagacccuccuggcccugcaccgguccuaccucacgccgggggacagcagcuccggcuggaccgcgggcgccgccgccuacuacgugggguaccugcagccccgcaccuuccugcucaaguacaacgagaacggcaccaucacggacgcggucgacugcgcccuggacccccugagcgagaccaagugcacccucaaguccuucaccguggagaaggggaucuaccagacgagcaacuuccgggugcagcccaccgaguccaucguccgcuucccgaacaucaccaaccugugccccuucggcgagguguucaacgccacccgguucgccagcgucuacgccuggaaccgcaagcggaucuccaacugcguggcggacuacagcgugcuguacaacuccgccagcuucuccacguucaagugcuacggcgucagccccaccaagcucaacgaccugugcuucaccaacguguacgccgacuccuucgugauccgcggggacgagguccggcagaucgcccccggccagaccgggaacaucgccgacuacaacuacaagcugccggacgacuucacgggcugcgugaucgcguggaacagcaacaaccucgacuccaaggucgggggcaacuacaacuaccuguaccgccuguuccgcaagagcaaccucaagcccuucgagcgggacaucuccaccgagaucuaccaggccggcagcacccccugcaacggggugaagggcuucaacugcuacuucccccugcaguccuacggguuccagccgaccuacggcgugggguaccagcccuaccggguggucgugcugagcuucgagcuccugcacgcccccgccacggugugcggccccaagaaguccaccaaccuggucaagaacaagugcgugaacuucaacuucaacggccucaccgggaccggcgugcugaccgagagcaacaagaaguuccugccguuccagcaguucgggcgcgacaucgccgacacgaccgacgcgguccgcgacccccagacccuggagauccucgacaucacccccugcagcuucggcgggguguccgugaucacgccgggcaccaacaccagcaaccaggucgccgugcuguaccagggcgugaacugcaccgagguccccguggccauccacgccgaccagcugacgcccaccuggcggguguacuccaccggcagcaacgucuuccagacccgcgccgggugccucaucggcgcggagcacgugaacaacuccuacgagugcgacauccccaucggggccggcaucugcgccagcuaccagacgcagaccaacuccccgcggcgcgcccggagcguggcgucccagagcaucaucgccuacaccaugucccugggcgccgagaacagcgucgccuacuccaacaacagcaucgccauccccaccaacuucacgaucuccgugaccaccgagauccugcccgugagcaugaccaagacgagcgucgacugcaccauguacaucugcggggacuccaccgagugcagcaaccuccugcugcaguacggcuccuucugcacccagcucaaccgcgcgcugacggggaucgccguggagcaggacaagaacacccaggagguguucgcccaggucaagcagaucuacaagacgcccccgaucaaggacuucggcggguucaacuucagccagauccugcccgaccccuccaagcccagcaagcgguccuucaucgaggaccuccuguucaacaaggugacccuggccgacgccggcuucaucaagcaguacggcgacugccucggggacaucgcggcccgcgaccugaucugcgcccagaaguucaacggccugaccgugcucccgccccugcugaccgacgagaugaucgcccaguacaccagcgcccuccuggcggggaccaucacguccggcuggaccuucggggccggcgccgcccugcagauccccuucgcgaugcagauggccuaccgguucaacggcaucggggucacccagaacgugcucuacgagaaccagaagcugaucgccaaccaguucaacagcgccaucggcaagauccaggacucccugagcuccaccgccagcgcgcucgggaagcugcaggacguggucaaccagaacgcccaggcccugaacacgcucgugaagcagcuguccagcaacuucggcgccaucuccagcgugcugaacgacauccucucccgccuggacccgcccgaggccgaggugcagaucgaccggcugaucaccgggcgccuccagagccugcagaccuacgugacccagcagcugauccgggcggccgagauccgcgccagcgccaaccucgccgcgaccaagauguccgagugcguccugggccagagcaagcggguggacuucugcggcaagggguaccaccugauguccuucccccagagcgccccgcacggcguggucuuccuccacgugacguacguccccgcccaggagaagaacuucaccaccgcccccgcgaucugccacgacgggaaggcccacuucccccgcgagggcguguucguguccaacgggacccacugguucgucacgcagcggaacuucuacgagccgcagaucaucaccaccgacaacaccuucgugagcggcaacugcgacguggucaucggcaucgugaacaacacgguguacgacccccugcagcccgagcuggacuccuucaaggaggagcucgacaaguacuucaagaaccacaccagccccgacgucgaccugggggacaucuccggcaucaacgccagcguggugaacauccagaaggagaucgaccgccugaacgaggucgccaagaaccucaacgagucccugaucgaccugcaggagcucgggaaguacgagcaguacaucaaguggccgugguacaucuggcugggcuucaucgccggccugaucgcgaucgugauggugaccaucaugcucugcugcaugaccagcugcugcuccugccugaaggggugcugcagcugcggcuccugcugcaaguucgacgaggacgacagcgagcccguccugaagggggugaagcuccacuacacgugaggacuaguuauaagacugacuagcccgaugggccucccaacgggcccuccuccccuccuugcaccgagauuaaucaaaggcucuuuucagagccaccaaaaaaaaaaaaaaaaaaaaaaaaaaaaaaaaaaaaaaaaaaaaaaaaaaaaaaaaaaaaaaaaaaaaaaaaaaaaaaaaaaaaaaaaaaaaaaaaaaaaa

SEQ ID NO: 24191 - RNA, 4026 nt, Artificial Sequence
  SARS-CoV-2/Wuhan/WIV05/2019__EPI_ISL_402128 spike protein mRNA gc (1-1273)(K986P_V987P_K986P_V987P_L18F_D80A_D215G_L242del_A243del_ L244del_R246I_K417N_E484K_N501Y_D614G_A701V)
aggagaaagcuuaccauguucguguuccugguccuccugccccuggugagcucccagugcgugaacuucaccacccgcacgcagcugccgcccgccuacaccaacagcuucacccggggcgucuacuaccccgacaagguguuccgcuccagcgugcugcacuccacccaggaccucuuccugcccuucuucagcaacgucacgugguuccacgccauccacguguccgggaccaacggcaccaagcgguucgccaacccggugcugcccuucaacgacggggucuacuucgcgagcaccgagaaguccaacaucauccgcggcuggaucuucgggacgacccucgacagcaagacccagucccugcugaucgugaacaacgccaccaacguggucaucaaggugugcgaguuccaguucugcaacgaccccuuccucggcguguacuaccacaagaacaacaagagcuggauggaguccgaguuccgggucuacagcuccgccaacaacugcacguucgaguacgugagccagcccuuccugauggaccuggagggcaagcaggggaacuucaagaaccuccgcgaguucguguucaagaacaucgacggcuacuucaagaucuacuccaagcacaccccgaucaaccugguccggggccugccccagggguucagcgcccucgagccccugguggaccugcccaucggcaucaacaucacccgcuuccagacccuccacaucuccuaccucacgccgggggacagcagcuccggcuggaccgcgggcgccgccgccuacuacgugggguaccugcagccccgcaccuuccugcucaaguacaacgagaacggcaccaucacggacgcggucgacugcgcccuggacccccugagcgagaccaagugcacccucaaguccuucaccguggagaaggggaucuaccagacgagcaacuuccgggugcagcccaccgaguccaucguccgcuucccgaacaucaccaaccugugccccuucggcgagguguucaacgccacccgguucgccagcgucuacgccuggaaccgcaagcggaucuccaacugcguggcggacuacagcgugcuguacaacuccgccagcuucuccacguucaagugcuacggcgucagccccaccaagcucaacgaccugugcuucaccaacguguacgccgacuccuucgugauccgcggggacgagguccggcagaucgcccccggccagaccgggaacaucgccgacuacaacuacaagcugccggacgacuucacgggcugcgugaucgcguggaacagcaacaaccucgacuccaaggucgggggcaacuacaacuaccuguaccgccuguuccgcaagagcaaccucaagcccuucgagcgggacaucuccaccgagaucuaccaggccggcagcacccccugcaacggggugaagggcuucaacugcuacuucccccugcaguccuacggguuccagccgaccuacggcgugggguaccagcccuaccggguggucgugcugagcuucgagcuccugcacgcccccgccacggugugcggccccaagaaguccaccaaccuggucaagaacaagugcgugaacuucaacuucaacggccucaccgggaccggcgugcugaccgagagcaacaagaaguuccugccguuccagcaguucgggcgcgacaucgccgacacgaccgacgcgguccgcgacccccagacccuggagauccucgacaucacccccugcagcuucggcgggguguccgugaucacgccgggcaccaacaccagcaaccaggucgccgugcuguaccagggcgugaacugcaccgagguccccguggccauccacgccgaccagcugacgcccaccuggcggguguacuccaccggcagcaacgucuuccagacccgcgccgggugccucaucggcgcggagcacgugaacaacuccuacgagugcgacauccccaucggggccggcaucugcgccagcuaccagacgcagaccaacuccccgcggcgcgcccggagcguggcgucccagagcaucaucgccuacaccaugucccugggcguggagaacagcgucgccuacuccaacaacagcaucgccauccccaccaacuucacgaucuccgugaccaccgagauccugcccgugagcaugaccaagacgagcgucgacugcaccauguacaucugcggggacuccaccgagugcagcaaccuccugcugcaguacggcuccuucugcacccagcucaaccgcgcgcugacggggaucgccguggagcaggacaagaacacccaggagguguucgcccaggucaagcagaucuacaagacgcccccgaucaaggacuucggcggguucaacuucagccagauccugcccgaccccuccaagcccagcaagcgguccuucaucgaggaccuccuguucaacaaggugacccuggccgacgccggcuucaucaagcaguacggcgacugccucggggacaucgcggcccgcgaccugaucugcgcccagaaguucaacggccugaccgugcucccgccccugcugaccgacgagaugaucgcccaguacaccagcgcccuccuggcggggaccaucacguccggcuggaccuucggggccggcgccgcccugcagauccccuucgcgaugcagauggccuaccgguucaacggcaucggggucacccagaacgugcucuacgagaaccagaagcugaucgccaaccaguucaacagcgccaucggcaagauccaggacucccugagcuccaccgccagcgcgcucgggaagcugcaggacguggucaaccagaacgcccaggcccugaacacgcucgugaagcagcuguccagcaacuucggcgccaucuccagcgugcugaacgacauccucucccgccuggacccgcccgaggccgaggugcagaucgaccggcugaucaccgggcgccuccagagccugcagaccuacgugacccagcagcugauccgggcggccgagauccgcgccagcgccaaccucgccgcgaccaagauguccgagugcguccugggccagagcaagcggguggacuucugcggcaagggguaccaccugauguccuucccccagagcgccccgcacggcguggucuuccuccacgugacguacguccccgcccaggagaagaacuucaccaccgcccccgcgaucugccacgacgggaaggcccacuucccccgcgagggcguguucguguccaacgggacccacugguucgucacgcagcggaacuucuacgagccgcagaucaucaccaccgacaacaccuucgugagcggcaacugcgacguggucaucggcaucgugaacaacacgguguacgacccccugcagcccgagcuggacuccuucaaggaggagcucgacaaguacuucaagaaccacaccagccccgacgucgaccugggggacaucuccggcaucaacgccagcguggugaacauccagaaggagaucgaccgccugaacgaggucgccaagaaccucaacgagucccugaucgaccugcaggagcucgggaaguacgagcaguacaucaaguggccgugguacaucuggcugggcuucaucgccggccugaucgcgaucgugauggugaccaucaugcucugcugcaugaccagcugcugcuccugccugaaggggugcugcagcugcggcuccugcugcaaguucgacgaggacgacagcgagcccguccugaagggggugaagcuccacuacacgugaggacuaguuauaagacugacuagcccgaugggccucccaacgggcccuccuccccuccuugcaccgagauuaaucaaaggcucuuuucagagccaccaaaaaaaaaaaaaaaaaaaaaaaaaaaaaaaaaaaaaaaaaaaaaaaaaaaaaaaaaaaaaaaaaaaaaaaaaaaaaaaaaaaaaaaaaaaaaaaaaaaaa

SEQ ID NO: 24192 - RNA, 4035 nt, Artificial Sequence
  SARS-CoV-2/Wuhan/WIV05/2019__EPI_ISL_402128 spike protein mRNA gc (1-1273)(K986P_V987P_K986P_V987P_E484K_D614G)
aggagaaagcuuaccauguucguguuccugguccuccugccccuggugagcucccagugcgugaaccucaccacccgcacgcagcugccgcccgccuacaccaacagcuucacccggggcgucuacuaccccgacaagguguuccgcuccagcgugcugcacuccacccaggaccucuuccugcccuucuucagcaacgucacgugguuccacgccauccacguguccgggaccaacggcaccaagcgguucgacaacccggugcugcccuucaacgacggggucuacuucgcgagcaccgagaaguccaacaucauccgcggcuggaucuucgggacgacccucgacagcaagacccagucccugcugaucgugaacaacgccaccaacguggucaucaaggugugcgaguuccaguucugcaacgaccccuuccucggcguguacuaccacaagaacaacaagagcuggauggaguccgaguuccgggucuacagcuccgccaacaacugcacguucgaguacgugagccagcccuuccugauggaccuggagggcaagcaggggaacuucaagaaccuccgcgaguucguguucaagaacaucgacggcuacuucaagaucuacuccaagcacaccccgaucaaccugguccgggaccugccccagggguucagcgcccucgagccccugguggaccugcccaucggcaucaacaucacccgcuuccagacccuccuggcccugcaccgguccuaccucacgccgggggacagcagcuccggcuggaccgcgggcgccgccgccuacuacgugggguaccugcagccccgcaccuuccugcucaaguacaacgagaacggcaccaucacggacgcggucgacugcgcccuggacccccugagcgagaccaagugcacccucaaguccuucaccguggagaaggggaucuaccagacgagcaacuuccgggugcagcccaccgaguccaucguccgcuucccgaacaucaccaaccugugccccuucggcgagguguucaacgccacccgguucgccagcgucuacgccuggaaccgcaagcggaucuccaacugcguggcggacuacagcgugcuguacaacuccgccagcuucuccacguucaagugcuacggcgucagccccaccaagcucaacgaccugugcuucaccaacguguacgccgacuccuucgugauccgcggggacgagguccggcagaucgcccccggccagaccgggaagaucgccgacuacaacuacaagcugccggacgacuucacgggcugcgugaucgcguggaacagcaacaaccucgacuccaaggucgggggcaacuacaacuaccuguaccgccuguuccgcaagagcaaccucaagcccuucgagcgggacaucuccaccgagaucuaccaggccggcagcacccccugcaacggggugaagggcuucaacugcuacuucccccugcaguccuacggguuccagccgaccaacggcgugggguaccagcccuaccggguggucgugcugagcuucgagcuccugcacgcccccgccacggugugcggccccaagaaguccaccaaccuggucaagaacaagugcgugaacuucaacuucaacggccucaccgggaccggcgugcugaccgagagcaacaagaaguuccugccguuccagcaguucgggcgcgacaucgccgacacgaccgacgcgguccgcgacccccagacccuggagauccucgacaucacccccugcagcuucggcgggguguccgugaucacgccgggcaccaacaccagcaaccaggucgccgugcuguaccagggcgugaacugcaccgagguccccguggccauccacgccgaccagcugacgcccaccuggcggguguacuccaccggcagcaacgucuuccagacccgcgccgggugccucaucggcgcggagcacgugaacaacuccuacgagugcgacauccccaucggggccggcaucugcgccagcuaccagacgcagaccaacuccccgcggcgcgcccggagcguggcgucccagagcaucaucgccuacaccaugucccugggcgccgagaacagcgucgccuacuccaacaacagcaucgccauccccaccaacuucacgaucuccgugaccaccgagauccugcccgugagcaugaccaagacgagcgucgacugcaccauguacaucugcggggacuccaccgagugcagcaaccuccugcugcaguacggcuccuucugcacccagcucaaccgcgcgcugacggggaucgccguggagcaggacaagaacacccaggagguguucgcccaggucaagcagaucuacaagacgcccccgaucaaggacuucggcggguucaacuucagccagauccugcccgaccccuccaagcccagcaagcgguccuucaucgaggaccuccuguucaacaaggugacccuggccgacgccggcuucaucaagcaguacggcgacugccucggggacaucgcggcccgcgaccugaucugcgcccagaaguucaacggccugaccgugcucccgccccugcugaccgacgagaugaucgcccaguacaccagcgcccuccuggcggggaccaucacguccggcuggaccuucggggccggcgccgcccugcagauccccuucgcgaugcagauggccuaccgguucaacggcaucggggucacccagaacgugcucuacgagaaccagaagcugaucgccaaccaguucaacagcgccaucggcaagauccaggacucccugagcuccaccgccagcgcgcucgggaagcugcaggacguggucaaccagaacgcccaggcccugaacacgcucgugaagcagcuguccagcaacuucggcgccaucuccagcgugcugaacgacauccucucccgccuggacccgcccgaggccgaggugcagaucgaccggcugaucaccgggcgccuccagagccugcagaccuacgugacccagcagcugauccgggcggccgagauccgcgccagcgccaaccucgccgcgaccaagauguccgagugcguccugggccagagcaagcggguggacuucugcggcaagggguaccaccugauguccuucccccagagcgccccgcacggcguggucuuccuccacgugacguacguccccgcccaggagaagaacuucaccaccgcccccgcgaucugccacgacgggaaggcccacuucccccgcgagggcguguucguguccaacgggacccacugguucgucacgcagcggaacuucuacgagccgcagaucaucaccaccgacaacaccuucgugagcggcaacugcgacguggucaucggcaucgugaacaacacgguguacgacccccugcagcccgagcuggacuccuucaaggaggagcucgacaaguacuucaagaaccacaccagccccgacgucgaccugggggacaucuccggcaucaacgccagcguggugaacauccagaaggagaucgaccgccugaacgaggucgccaagaaccucaacgagucccugaucgaccugcaggagcucgggaaguacgagcaguacaucaaguggccgugguacaucuggcugggcuucaucgccggccugaucgcgaucgugauggugaccaucaugcucugcugcaugaccagcugcugcuccugccugaaggggugcugcagcugcggcuccugcugcaaguucgacgaggacgacagcgagcccguccugaagggggugaagcuccacuacacgugaggacuaguuauaagacugacuagcccgaugggccucccaacgggcccuccuccccuccuugcaccgagauuaaucaaaggcucuuuucagagccaccaaaaaaaaaaaaaaaaaaaaaaaaaaaaaaaaaaaaaaaaaaaaaaaaaaaaaaaaaaaaaaaaaaaaaaaaaaaaaaaaaaaaaaaaaaaaaaaaaaaaa

SEQ ID NO: 24193 - RNA, 4035 nt, Artificial Sequence
  SARS-CoV-2/Wuhan/WIV05/2019__EPI_ISL_402128 spike protein mRNA gc (1-1273)(K986P_V987P_K986P_V987P_L18F_T20N_P26S_D138Y_R190S_K417T _E484K_N501Y_D614G_H655Y_T1027I)
aggagaaagcuuaccauguucguguuccugguccuccugccccuggugagcucccagugcgugaacuucaccaaccgcacgcagcugccgagcgccuacaccaacagcuucacccggggcgucuacuaccccgacaagguguuccgcuccagcgugcugcacuccacccaggaccucuuccugcccuucuucagcaacgucacgugguuccacgccauccacguguccgggaccaacggcaccaagcgguucgacaacccggugcugcccuucaacgacggggucuacuucgcgagcaccgagaaguccaacaucauccgcggcuggaucuucgggacgacccucgacagcaagacccagucccugcugaucgugaacaacgccaccaacguggucaucaaggugugcgaguuccaguucugcaacuaccccuuccucggcguguacuaccacaagaacaacaagagcuggauggaguccgaguuccgggucuacagcuccgccaacaacugcacguucgaguacgugagccagcccuuccugauggaccuggagggcaagcaggggaacuucaagaaccucagcgaguucguguucaagaacaucgacggcuacuucaagaucuacuccaagcacaccccgaucaaccugguccgggaccugccccagggguucagcgcccucgagccccugguggaccugcccaucggcaucaacaucacccgcuuccagacccuccuggcccugcaccgguccuaccucacgccgggggacagcagcuccggcuggaccgcgggcgccgccgccuacuacgugggguaccugcagccccgcaccuuccugcucaaguacaacgagaacggcaccaucacggacgcggucgacugcgcccuggacccccugagcgagaccaagugcacccucaaguccuucaccguggagaaggggaucuaccagacgagcaacuuccgggugcagcccaccgaguccaucguccgcuucccgaacaucaccaaccugugccccuucggcgagguguucaacgccacccgguucgccagcgucuacgccuggaaccgcaagcggaucuccaacugcguggcggacuacagcgugcuguacaacuccgccagcuucuccacguucaagugcuacggcgucagccccaccaagcucaacgaccugugcuucaccaacguguacgccgacuccuucgugauccgcggggacgagguccggcagaucgcccccggccagaccgggaccaucgccgacuacaacuacaagcugccggacgacuucacgggcugcgugaucgcguggaacagcaacaaccucgacuccaaggucgggggcaacuacaacuaccuguaccgccuguuccgcaagagcaaccucaagcccuucgagcgggacaucuccaccgagaucuaccaggccggcagcacccccugcaacggggugaagggcuucaacugcuacuucccccugcaguccuacggguuccagccgaccuacggcgugggguaccagcccuaccggguggucgugcugagcuucgagcuccugcacgcccccgccacggugugcggccccaagaaguccaccaaccuggucaagaacaagugcgugaacuucaacuucaacggccucaccgggaccggcgugcugaccgagagcaacaagaaguuccugccguuccagcaguucgggcgcgacaucgccgacacgaccgacgcgguccgcgacccccagacccuggagauccucgacaucacccccugcagcuucggcgggguguccgugaucacgccgggcaccaacaccagcaaccaggucgccgugcuguaccagggcgugaacugcaccgagguccccguggccauccacgccgaccagcugacgcccaccuggcggguguacuccaccggcagcaacgucuuccagacccgcgccgggugccucaucggcgcggaguacgugaacaacuccuacgagugcgacauccccaucggggccggcaucugcgccagcuaccagacgcagaccaacuccccgcggcgcgcccggagcguggcgucccagagcaucaucgccuacaccaugucccugggcgccgagaacagcgucgccuacuccaacaacagcaucgccauccccaccaacuucacgaucuccgugaccaccgagauccugcccgugagcaugaccaagacgagcgucgacugcaccauguacaucugcggggacuccaccgagugcagcaaccuccugcugcaguacggcuccuucugcacccagcucaaccgcgcgcugacggggaucgccguggagcaggacaagaacacccaggagguguucgcccaggucaagcagaucuacaagacgcccccgaucaaggacuucggcggguucaacuucagccagauccugcccgaccccuccaagcccagcaagcgguccuucaucgaggaccuccuguucaacaaggugacccuggccgacgccggcuucaucaagcaguacggcgacugccucggggacaucgcggcccgcgaccugaucugcgcccagaaguucaacggccugaccgugcucccgccccugcugaccgacgagaugaucgcccaguacaccagcgcccuccuggcggggaccaucacguccggcuggaccuucggggccggcgccgcccugcagauccccuucgcgaugcagauggccuaccgguucaacggcaucggggucacccagaacgugcucuacgagaaccagaagcugaucgccaaccaguucaacagcgccaucggcaagauccaggacucccugagcuccaccgccagcgcgcucgggaagcugcaggacguggucaaccagaacgcccaggcccugaacacgcucgugaagcagcuguccagcaacuucggcgccaucuccagcgugcugaacgacauccucucccgccuggacccgcccgaggccgaggugcagaucgaccggcugaucaccgggcgccuccagagccugcagaccuacgugacccagcagcugauccgggcggccgagauccgcgccagcgccaaccucgccgcgaucaagauguccgagugcguccugggccagagcaagcggguggacuucugcggcaagggguaccaccugauguccuucccccagagcgccccgcacggcguggucuuccuccacgugacguacguccccgcccaggagaagaacuucaccaccgcccccgcgaucugccacgacgggaaggcccacuucccccgcgagggcguguucguguccaacgggacccacugguucgucacgcagcggaacuucuacgagccgcagaucaucaccaccgacaacaccuucgugagcggcaacugcgacguggucaucggcaucgugaacaacacgguguacgacccccugcagcccgagcuggacuccuucaaggaggagcucgacaaguacuucaagaaccacaccagccccgacgucgaccugggggacaucuccggcaucaacgccagcguggugaacauccagaaggagaucgaccgccugaacgaggucgccaagaaccucaacgagucccugaucgaccugcaggagcucgggaaguacgagcaguacaucaaguggccgugguacaucuggcugggcuucaucgccggccugaucgcgaucgugauggugaccaucaugcucugcugcaugaccagcugcugcuccugccugaaggggugcugcagcugcggcuccugcugcaaguucgacgaggacgacagcgagcccguccugaagggggugaagcuccacuacacgugaggacuaguuauaagacugacuagcccgaugggccucccaacgggcccuccuccccuccuugcaccgagauuaaucaaaggcucuuuucagagccaccaaaaaaaaaaaaaaaaaaaaaaaaaaaaaaaaaaaaaaaaaaaaaaaaaaaaaaaaaaaaaaaaaaaaaaaaaaaaaaaaaaaaaaaaaaaaaaaaaaaaa

SEQ ID NO: 24194 - RNA, 4035 nt, Artificial Sequence
  SARS-CoV-2/Wuhan/WIV05/2019__EPI_ISL_402128 spike protein mRNA gc (1-1273)(K986P_V987P_K986P_V987P_S13I_W152C_L452R_D614G)
aggagaaagcuuaccauguucguguuccugguccuccugccccuggugagcauccagugcgugaaccucaccacccgcacgcagcugccgcccgccuacaccaacagcuucacccggggcgucuacuaccccgacaagguguuccgcuccagcgugcugcacuccacccaggaccucuuccugcccuucuucagcaacgucacgugguuccacgccauccacguguccgggaccaacggcaccaagcgguucgacaacccggugcugcccuucaacgacggggucuacuucgcgagcaccgagaaguccaacaucauccgcggcuggaucuucgggacgacccucgacagcaagacccagucccugcugaucgugaacaacgccaccaacguggucaucaaggugugcgaguuccaguucugcaacgaccccuuccucggcguguacuaccacaagaacaacaagagcugcauggaguccgaguuccgggucuacagcuccgccaacaacugcacguucgaguacgugagccagcccuuccugauggaccuggagggcaagcaggggaacuucaagaaccuccgcgaguucguguucaagaacaucgacggcuacuucaagaucuacuccaagcacaccccgaucaaccugguccgggaccugccccagggguucagcgcccucgagccccugguggaccugcccaucggcaucaacaucacccgcuuccagacccuccuggcccugcaccgguccuaccucacgccgggggacagcagcuccggcuggaccgcgggcgccgccgccuacuacgugggguaccugcagccccgcaccuuccugcucaaguacaacgagaacggcaccaucacggacgcggucgacugcgcccuggacccccugagcgagaccaagugcacccucaaguccuucaccguggagaaggggaucuaccagacgagcaacuuccgggugcagcccaccgaguccaucguccgcuucccgaacaucaccaaccugugccccuucggcgagguguucaacgccacccgguucgccagcgucuacgccuggaaccgcaagcggaucuccaacugcguggcggacuacagcgugcuguacaacuccgccagcuucuccacguucaagugcuacggcgucagccccaccaagcucaacgaccugugcuucaccaacguguacgccgacuccuucgugauccgcggggacgagguccggcagaucgcccccggccagaccgggaagaucgccgacuacaacuacaagcugccggacgacuucacgggcugcgugaucgcguggaacagcaacaaccucgacuccaaggucgggggcaacuacaacuaccgcuaccgccuguuccgcaagagcaaccucaagcccuucgagcgggacaucuccaccgagaucuaccaggccggcagcacccccugcaacgggguggagggcuucaacugcuacuucccccugcaguccuacggguuccagccgaccaacggcgugggguaccagcccuaccggguggucgugcugagcuucgagcuccugcacgcccccgccacggugugcggccccaagaaguccaccaaccuggucaagaacaagugcgugaacuucaacuucaacggccucaccgggaccggcgugcugaccgagagcaacaagaaguuccugccguuccagcaguucgggcgcgacaucgccgacacgaccgacgcgguccgcgacccccagacccuggagauccucgacaucacccccugcagcuucggcgggguguccgugaucacgccgggcaccaacaccagcaaccaggucgccgugcuguaccagggcgugaacugcaccgagguccccguggccauccacgccgaccagcugacgcccaccuggcggguguacuccaccggcagcaacgucuuccagacccgcgccgggugccucaucggcgcggagcacgugaacaacuccuacgagugcgacauccccaucggggccggcaucugcgccagcuaccagacgcagaccaacuccccgcggcgcgcccggagcguggcgucccagagcaucaucgccuacaccaugucccugggcgccgagaacagcgucgccuacuccaacaacagcaucgccauccccaccaacuucacgaucuccgugaccaccgagauccugcccgugagcaugaccaagacgagcgucgacugcaccauguacaucugcggggacuccaccgagugcagcaaccuccugcugcaguacggcuccuucugcacccagcucaaccgcgcgcugacggggaucgccguggagcaggacaagaacacccaggagguguucgcccaggucaagcagaucuacaagacgcccccgaucaaggacuucggcggguucaacuucagccagauccugcccgaccccuccaagcccagcaagcgguccuucaucgaggaccuccuguucaacaaggugacccuggccgacgccggcuucaucaagcaguacggcgacugccucggggacaucgcggcccgcgaccugaucugcgcccagaaguucaacggccugaccgugcucccgccccugcugaccgacgagaugaucgcccaguacaccagcgcccuccuggcggggaccaucacguccggcuggaccuucggggccggcgccgcccugcagauccccuucgcgaugcagauggccuaccgguucaacggcaucggggucacccagaacgugcucuacgagaaccagaagcugaucgccaaccaguucaacagcgccaucggcaagauccaggacucccugagcuccaccgccagcgcgcucgggaagcugcaggacguggucaaccagaacgcccaggcccugaacacgcucgugaagcagcuguccagcaacuucggcgccaucuccagcgugcugaacgacauccucucccgccuggacccgcccgaggccgaggugcagaucgaccggcugaucaccgggcgccuccagagccugcagaccuacgugacccagcagcugauccgggcggccgagauccgcgccagcgccaaccucgccgcgaccaagauguccgagugcguccugggccagagcaagcggguggacuucugcggcaagggguaccaccugauguccuucccccagagcgccccgcacggcguggucuuccuccacgugacguacguccccgcccaggagaagaacuucaccaccgcccccgcgaucugccacgacgggaaggcccacuucccccgcgagggcguguucguguccaacgggacccacugguucgucacgcagcggaacuucuacgagccgcagaucaucaccaccgacaacaccuucgugagcggcaacugcgacguggucaucggcaucgugaacaacacgguguacgacccccugcagcccgagcuggacuccuucaaggaggagcucgacaaguacuucaagaaccacaccagccccgacgucgaccugggggacaucuccggcaucaacgccagcguggugaacauccagaaggagaucgaccgccugaacgaggucgccaagaaccucaacgagucccugaucgaccugcaggagcucgggaaguacgagcaguacaucaaguggccgugguacaucuggcugggcuucaucgccggccugaucgcgaucgugauggugaccaucaugcucugcugcaugaccagcugcugcuccugccugaaggggugcugcagcugcggcuccugcugcaaguucgacgaggacgacagcgagcccguccugaagggggugaagcuccacuacacgugaggacuaguuauaagacugacuagcccgaugggccucccaacgggcccuccuccccuccuugcaccgagauuaaucaaaggcucuuuucagagccaccaaaaaaaaaaaaaaaaaaaaaaaaaaaaaaaaaaaaaaaaaaaaaaaaaaaaaaaaaaaaaaaaaaaaaaaaaaaaaaaaaaaaaaaaaaaaaaaaaaaaa

SEQ ID NO: 24195 - RNA, 4035 nt, Artificial Sequence
  SARS-CoV-2/Wuhan/WIV05/2019__EPI_ISL_402128 spike protein mRNA gc (1-1273)(K986P_V987P)
aggagaaagcuuaccauguucguguuccugguccuccugccccuggugagcucccagugcgugaaccucaccacccgcacgcagcugccgcccgccuacaccaacagcuucacccggggcgucuacuaccccgacaagguguuccgcuccagcgugcugcacuccacccaggaccucuuccugcccuucuucagcaacgucacgugguuccacgccauccacguguccgggaccaacggcaccaagcgguucgacaacccggugcugcccuucaacgacggggucuacuucgcgagcaccgagaaguccaacaucauccgcggcuggaucuucgggacgacccucgacagcaagacccagucccugcugaucgugaacaacgccaccaacguggucaucaaggugugcgaguuccaguucugcaacgaccccuuccucggcguguacuaccacaagaacaacaagagcuggauggaguccgaguuccgggucuacagcuccgccaacaacugcacguucgaguacgugagccagcccuuccugauggaccuggagggcaagcaggggaacuucaagaaccuccgcgaguucguguucaagaacaucgacggcuacuucaagaucuacuccaagcacaccccgaucaaccugguccgggaccugccccagggguucagcgcccucgagccccugguggaccugcccaucggcaucaacaucacccgcuuccagacccuccuggcccugcaccgguccuaccucacgccgggggacagcagcuccggcuggaccgcgggcgccgccgccuacuacgugggguaccugcagccccgcaccuuccugcucaaguacaacgagaacggcaccaucacggacgcggucgacugcgcccuggacccccugagcgagaccaagugcacccucaaguccuucaccguggagaaggggaucuaccagacgagcaacuuccgggugcagcccaccgaguccaucguccgcuucccgaacaucaccaaccugugccccuucggcgagguguucaacgccacccgguucgccagcgucuacgccuggaaccgcaagcggaucuccaacugcguggcggacuacagcgugcuguacaacuccgccagcuucuccacguucaagugcuacggcgucagccccaccaagcucaacgaccugugcuucaccaacguguacgccgacuccuucgugauccgcggggacgagguccggcagaucgcccccggccagaccgggaagaucgccgacuacaacuacaagcugccggacgacuucacgggcugcgugaucgcguggaacagcaacaaccucgacuccaaggucgggggcaacuacaacuaccuguaccgccuguuccgcaagagcaaccucaagcccuucgagcgggacaucuccaccgagaucuaccaggccggcagcacccccugcaacgggguggagggcuucaacugcuacuucccccugcaguccuacggguuccagccgaccaacggcgugggguaccagcccuaccggguggucgugcugagcuucgagcuccugcacgcccccgccacggugugcggccccaagaaguccaccaaccuggucaagaacaagugcgugaacuucaacuucaacggccucaccgggaccggcgugcugaccgagagcaacaagaaguuccugccguuccagcaguucgggcgcgacaucgccgacacgaccgacgcgguccgcgacccccagacccuggagauccucgacaucacccccugcagcuucggcgggguguccgugaucacgccgggcaccaacaccagcaaccaggucgccgugcuguaccaggacgugaacugcaccgagguccccguggccauccacgccgaccagcugacgcccaccuggcggguguacuccaccggcagcaacgucuuccagacccgcgccgggugccucaucggcgcggagcacgugaacaacuccuacgagugcgacauccccaucggggccggcaucugcgccagcuaccagacgcagaccaacuccccgcggcgcgcccggagcguggcgucccagagcaucaucgccuacaccaugucccugggcgccgagaacagcgucgccuacuccaacaacagcaucgccauccccaccaacuucacgaucuccgugaccaccgagauccugcccgugagcaugaccaagacgagcgucgacugcaccauguacaucugcggggacuccaccgagugcagcaaccuccugcugcaguacggcuccuucugcacccagcucaaccgcgcgcugacggggaucgccguggagcaggacaagaacacccaggagguguucgcccaggucaagcagaucuacaagacgcccccgaucaaggacuucggcggguucaacuucagccagauccugcccgaccccuccaagcccagcaagcgguccuucaucgaggaccuccuguucaacaaggugacccuggccgacgccggcuucaucaagcaguacggcgacugccucggggacaucgcggcccgcgaccugaucugcgcccagaaguucaacggccugaccgugcucccgccccugcugaccgacgagaugaucgcccaguacaccagcgcccuccuggcggggaccaucacguccggcuggaccuucggggccggcgccgcccugcagauccccuucgcgaugcagauggccuaccgguucaacggcaucggggucacccagaacgugcucuacgagaaccagaagcugaucgccaaccaguucaacagcgccaucggcaagauccaggacucccugagcuccaccgccagcgcgcucgggaagcugcaggacguggucaaccagaacgcccaggcccugaacacgcucgugaagcagcuguccagcaacuucggcgccaucuccagcgugcugaacgacauccucucccgccuggacccgcccgaggccgagguccagaucgaccggcugaucaccgggcgccuccagagccugcagaccuacgugacccagcagcugauccgggcggccgagauccgcgccagcgccaaccucgccgcgaccaagauguccgagugcgugcugggccagagcaagcgggucgacuucugcggcaagggguaccaccugauguccuucccccagagcgcgccccacggcgugguguuccuccacgucacguacgugcccgcccaggagaagaacuucaccaccgccccggccaucugccacgacgggaaggcccacuucccccgcgagggcgucuucguguccaacgggacccacugguucgugacgcagcggaacuucuacgagccccagaucaucaccaccgacaacaccuucgucagcggcaacugcgacguggugaucggcaucgucaacaacacgguguacgacccccugcagccggagcuggacuccuucaaggaggagcucgacaaguacuucaagaaccacaccagccccgacguggaccugggggacaucuccggcaucaacgccagcgucgugaacauccagaaggagaucgaccgccugaacgagguggccaagaaccucaacgagucccugaucgaccugcaggagcucgggaaguacgagcaguacaucaaguggcccugguacaucuggcugggcuucaucgccggccugaucgcgaucgucauggugaccaucaugcucugcugcaugaccagcugcugcuccugccugaaggggugcugcagcugcggcuccugcugcaaguucgacgaggacgacagcgagccggugcugaagggggucaagcuccacuacacgugaggacuaguuauaagacugacuagcccgaugggccucccaacgggcccuccuccccuccuugcaccgagauuaaucaaaggcucuuuucagagccaccaaaaaaaaaaaaaaaaaaaaaaaaaaaaaaaaaaaaaaaaaaaaaaaaaaaaaaaaaaaaaaaaaaaaaaaaaaaaaaaaaaaaaaaaaaaaaaaaaaaaa

SEQ ID NO: 24196 - RNA, 4035 nt, Artificial Sequence
  SARS-CoV-2/Wuhan/WIV05/2019__EPI_ISL_402128 spike protein mRNA gc (1-1273)(K986P_V987P_ D614G)
aggagaaagcuuaccauguucguguuccugguccuccugccccuggugagcucccagugcgugaaccucaccacccgcacgcagcugccgcccgccuacaccaacagcuucacccggggcgucuacuaccccgacaagguguuccgcuccagcgugcugcacuccacccaggaccucuuccugcccuucuucagcaacgucacgugguuccacgccauccacguguccgggaccaacggcaccaagcgguucgacaacccggugcugcccuucaacgacggggucuacuucgcgagcaccgagaaguccaacaucauccgcggcuggaucuucgggacgacccucgacagcaagacccagucccugcugaucgugaacaacgccaccaacguggucaucaaggugugcgaguuccaguucugcaacgaccccuuccucggcguguacuaccacaagaacaacaagagcuggauggaguccgaguuccgggucuacagcuccgccaacaacugcacguucgaguacgugagccagcccuuccugauggaccuggagggcaagcaggggaacuucaagaaccuccgcgaguucguguucaagaacaucgacggcuacuucaagaucuacuccaagcacaccccgaucaaccugguccgggaccugccccagggguucagcgcccucgagccccugguggaccugcccaucggcaucaacaucacccgcuuccagacccuccuggcccugcaccgguccuaccucacgccgggggacagcagcuccggcuggaccgcgggcgccgccgccuacuacgugggguaccugcagccccgcaccuuccugcucaaguacaacgagaacggcaccaucacggacgcggucgacugcgcccuggacccccugagcgagaccaagugcacccucaaguccuucaccguggagaaggggaucuaccagacgagcaacuuccgggugcagcccaccgaguccaucguccgcuucccgaacaucaccaaccugugccccuucggcgagguguucaacgccacccgguucgccagcgucuacgccuggaaccgcaagcggaucuccaacugcguggcggacuacagcgugcuguacaacuccgccagcuucuccacguucaagugcuacggcgucagccccaccaagcucaacgaccugugcuucaccaacguguacgccgacuccuucgugauccgcggggacgagguccggcagaucgcccccggccagaccgggaagaucgccgacuacaacuacaagcugccggacgacuucacgggcugcgugaucgcguggaacagcaacaaccucgacuccaaggucgggggcaacuacaacuaccuguaccgccuguuccgcaagagcaaccucaagcccuucgagcgggacaucuccaccgagaucuaccaggccggcagcacccccugcaacgggguggagggcuucaacugcuacuucccccugcaguccuacggguuccagccgaccaacggcgugggguaccagcccuaccggguggucgugcugagcuucgagcuccugcacgcccccgccacggugugcggccccaagaaguccaccaaccuggucaagaacaagugcgugaacuucaacuucaacggccucaccgggaccggcgugcugaccgagagcaacaagaaguuccugccguuccagcaguucgggcgcgacaucgccgacacgaccgacgcgguccgcgacccccagacccuggagauccucgacaucacccccugcagcuucggcgggguguccgugaucacgccgggcaccaacaccagcaaccaggucgccgugcuguaccagggcgugaacugcaccgagguccccguggccauccacgccgaccagcugacgcccaccuggcggguguacuccaccgggagcaacgucuuccagacccgcgccggcugccucaucggggcggagcacgugaacaacuccuacgagugcgacauccccaucggcgccggcaucugcgccagcuaccagacgcagaccaacuccccgcggcgcgcccggagcguggcgucccagagcaucaucgccuacaccaugucccugggggccgagaacagcgucgccuacuccaacaacagcaucgccauccccaccaacuucacgaucuccgugaccaccgagauccugcccgugagcaugaccaagacgagcgucgacugcaccauguacaucugcggcgacuccaccgagugcagcaaccuccugcugcaguacggguccuucugcacccagcucaaccgcgcgcugacgggcaucgccguggagcaggacaagaacacccaggagguguucgcccaggucaagcagaucuacaagacgcccccgaucaaggacuucgggggcuucaacuucagccagauccugcccgaccccuccaagcccagcaagcgguccuucaucgaggaccuccuguucaacaaggugacccuggccgacgccggcuucaucaagcaguacggggacugccucggcgacaucgcggcccgcgaccugaucugcgcccagaaguucaacgggcugaccgugcucccgccccugcugaccgacgagaugaucgcccaguacaccagcgcccuccuggcgggcaccaucacguccggguggaccuucggcgccggcgccgcccugcagauccccuucgcgaugcagauggccuaccgguucaacgggaucggcgucacccagaacgugcucuacgagaaccagaagcugaucgccaaccaguucaacagcgccaucgggaagauccaggacucccugagcuccaccgccagcgcgcucggcaagcugcaggacguggucaaccagaacgcccaggcccugaacacgcucgugaagcagcuguccagcaacuucggggccaucuccagcgugcugaacgacauccucucccgccuggacccgcccgaggccgagguccagaucgaccggcugaucaccggccgccuccagagccugcagaccuacgugacccagcagcugauccgggcggccgagauccgcgccagcgccaaccucgccgcgaccaagauguccgagugcgugcugggccagagcaagcgggucgacuucugcgggaagggcuaccaccugauguccuucccccagagcgcgccccacggggugguguuccuccacgucacguacgugcccgcccaggagaagaacuucaccaccgccccggccaucugccacgacggcaaggcccacuucccccgcgagggggucuucguguccaacggcacccacugguucgugacgcagcggaacuucuacgagccccagaucaucaccaccgacaacaccuucgucagcggcaacugcgacguggugaucgggaucgucaacaacacgguguacgacccccugcagccggagcuggacuccuucaaggaggagcucgacaaguacuucaagaaccacaccagccccgacguggaccugggcgacaucuccgggaucaacgccagcgucgugaacauccagaaggagaucgaccgccugaacgagguggccaagaaccucaacgagucccugaucgaccugcaggagcucggcaaguacgagcaguacaucaaguggcccugguacaucuggcugggcuucaucgccgggcugaucgcgaucgucauggugaccaucaugcucugcugcaugaccagcugcugcuccugccugaagggcugcugcagcugcggguccugcugcaaguucgacgaggacgacagcgagccggugcugaagggcgucaagcuccacuacacgugaggacuaguuauaagacugacuagcccgaugggccucccaacgggcccuccuccccuccuugcaccgagauuaaucaaaggcucuuuucagagccaccaaaaaaaaaaaaaaaaaaaaaaaaaaaaaaaaaaaaaaaaaaaaaaaaaaaaaaaaaaaaaaaaaaaaaaaaaaaaaaaaaaaaaaaaaaaaaaaaaaaaa

SEQ ID NO: 24197 - RNA, 4035 nt, Artificial Sequence
  SARS-CoV-2/Wuhan/WIV05/2019__EPI_ISL_402128 spike protein mRNA gc (1-1273)(K986P_V987P_A222V_D614G)
aggagaaagcuuaccauguucguguuccugguccuccugccccuggugagcucccagugcgugaaccucaccacccgcacgcagcugccgcccgccuacaccaacagcuucacccggggcgucuacuaccccgacaagguguuccgcuccagcgugcugcacuccacccaggaccucuuccugcccuucuucagcaacgucacgugguuccacgccauccacguguccgggaccaacggcaccaagcgguucgacaacccggugcugcccuucaacgacggggucuacuucgcgagcaccgagaaguccaacaucauccgcggcuggaucuucgggacgacccucgacagcaagacccagucccugcugaucgugaacaacgccaccaacguggucaucaaggugugcgaguuccaguucugcaacgaccccuuccucggcguguacuaccacaagaacaacaagagcuggauggaguccgaguuccgggucuacagcuccgccaacaacugcacguucgaguacgugagccagcccuuccugauggaccuggagggcaagcaggggaacuucaagaaccuccgcgaguucguguucaagaacaucgacggcuacuucaagaucuacuccaagcacaccccgaucaaccugguccgggaccugccccagggguucagcgugcucgagccccugguggaccugcccaucggcaucaacaucacccgcuuccagacccuccuggcccugcaccgguccuaccucacgccgggggacagcagcuccggcuggaccgccggcgcggccgccuacuacgucggguaccugcagccccgcaccuuccugcucaaguacaacgagaacggcaccaucacggacgccguggacugcgcgcuggacccccugagcgagaccaagugcacccucaaguccuucaccguggagaaggggaucuaccagacgagcaacuuccggguccagcccaccgaguccaucgugcgcuucccgaacaucaccaaccugugccccuucggcgaggucuucaacgccacccgguucgccagcguguacgccuggaaccgcaagcggaucuccaacugcguggccgacuacagcguccuguacaacuccgcgagcuucuccacguucaagugcuacggcgugagccccaccaagcucaacgaccugugcuucaccaacguguacgccgacuccuucgucauccgcggggacgaggugcggcagaucgcccccggccagaccgggaagaucgccgacuacaacuacaagcugccggacgacuucacgggcugcgugaucgccuggaacagcaacaaccucgacuccaaggucgggggcaacuacaacuaccuguaccgccuguuccgcaagagcaaccucaagcccuucgagcgggacaucuccaccgagaucuaccaggcgggcagcacccccugcaacgggguggagggcuucaacugcuacuucccccugcaguccuacggguuccagccgaccaacggcgugggguaccagcccuaccgggucguggugcugagcuucgagcuccugcacgcccccgccacggucugcggccccaagaaguccaccaaccuggugaagaacaagugcgugaacuucaacuucaacggccucaccgggaccggcguccugaccgagagcaacaagaaguuccugccguuccagcaguucgggcgcgacaucgccgacacgaccgacgccgugcgcgacccccagacccuggagauccucgacaucacccccugcagcuucggcgggguguccgucaucacgccgggcaccaacaccagcaaccagguggcggugcuguaccagggcgucaacugcaccgaggugcccguggccauccacgccgaccagcugacgcccaccuggcgggucuacuccaccgggagcaacguguuccagacccgcgccggcugccucaucggggccgagcacgugaacaacuccuacgagugcgacauccccaucggcgcgggcaucugcgccagcuaccagacgcagaccaacuccccgcggcgcgcccggagcgucgccucccagagcaucaucgcguacaccaugucccugggggccgagaacagcguggccuacuccaacaacagcaucgccauccccaccaacuucacgaucuccgugaccaccgagauccugcccgucagcaugaccaagacgagcguggacugcaccauguacaucugcggcgacuccaccgagugcagcaaccuccugcugcaguacggguccuucugcacccagcucaaccgcgcccugacgggcaucgcgguggagcaggacaagaacacccaggaggucuucgcccaggugaagcagaucuacaagacgcccccgaucaaggacuucgggggcuucaacuucagccagauccugcccgaccccuccaagcccagcaagcgguccuucaucgaggaccuccuguucaacaaggugacccuggccgacgccggcuucaucaagcaguacggggacugccucggcgacaucgccgcgcgcgaccugaucugcgcccagaaguucaacgggcugaccguccucccgccccugcugaccgacgagaugaucgcccaguacaccagcgcccuccuggccggcaccaucacguccggguggaccuucggcgcgggcgccgcccugcagauccccuucgccaugcagauggcguaccgguucaacgggaucggcgugacccagaacgugcucuacgagaaccagaagcugaucgccaaccaguucaacagcgccaucgggaagauccaggacucccugagcuccaccgccagcgcccucggcaagcugcaggacgucgugaaccagaacgcgcaggcccugaacacgcucgugaagcagcuguccagcaacuucggggccaucuccagcguccugaacgacauccucucccgccuggacccgcccgaggccgaggugcagaucgaccggcugaucaccggccgccuccagagccugcagaccuacgugacccagcagcugauccgggccgcggagauccgcgccagcgccaaccucgccgccaccaagauguccgagugcguccugggccagagcaagcggguggacuucugcgggaagggcuaccaccugauguccuucccccagagcgcgccccacgggguggucuuccuccacgugacguacguccccgcccaggagaagaacuucaccaccgccccggccaucugccacgacggcaaggcgcacuucccccgcgaggggguguucguguccaacggcacccacugguucgucacgcagcggaacuucuacgagccccagaucaucaccaccgacaacaccuucgugagcggcaacugcgacguggucaucgggaucgugaacaacacgguguacgacccccugcagccggagcuggacuccuucaaggaggagcucgacaaguacuucaagaaccacaccagccccgacgucgaccugggcgacaucuccgggaucaacgccagcguggugaacauccagaaggagaucgaccgccugaacgaggucgccaagaaccucaacgagucccugaucgaccugcaggagcucggcaaguacgagcaguacaucaaguggcccugguacaucuggcugggcuucaucgccgggcugaucgccaucgugauggugaccaucaugcucugcugcaugaccagcugcugcuccugccugaagggcugcugcagcugcggguccugcugcaaguucgacgaggacgacagcgagccgguccugaagggcgugaagcuccacuacacgugaggacuaguuauaagacugacuagcccgaugggccucccaacgggcccuccuccccuccuugcaccgagauuaaucaaaggcucuuuucagagccaccaaaaaaaaaaaaaaaaaaaaaaaaaaaaaaaaaaaaaaaaaaaaaaaaaaaaaaaaaaaaaaaaaaaaaaaaaaaaaaaaaaaaaaaaaaaaaaaaaaaaa

SEQ ID NO: 24198 - RNA, 4035 nt, Artificial Sequence
  SARS-CoV-2/Wuhan/WIV05/2019__EPI_ISL_402128 spike protein mRNA gc (1-1273)(K986P_V987P_N439K_D614G)
aggagaaagcuuaccauguucguguuccugguccuccugccccuggugagcucccagugcgugaaccucaccacccgcacgcagcugccgcccgccuacaccaacagcuucacccggggcgucuacuaccccgacaagguguuccgcuccagcgugcugcacuccacccaggaccucuuccugcccuucuucagcaacgucacgugguuccacgccauccacguguccgggaccaacggcaccaagcgguucgacaacccggugcugcccuucaacgacggggucuacuucgcgagcaccgagaaguccaacaucauccgcggcuggaucuucgggacgacccucgacagcaagacccagucccugcugaucgugaacaacgccaccaacguggucaucaaggugugcgaguuccaguucugcaacgaccccuuccucggcguguacuaccacaagaacaacaagagcuggauggaguccgaguuccgggucuacagcuccgccaacaacugcacguucgaguacgugagccagcccuuccugauggaccuggagggcaagcaggggaacuucaagaaccuccgcgaguucguguucaagaacaucgacggcuacuucaagaucuacuccaagcacaccccgaucaaccugguccgggaccugccccagggguucagcgcccucgagccccugguggaccugcccaucggcaucaacaucacccgcuuccagacccuccuggcccugcaccgguccuaccucacgccgggggacagcagcuccggcuggaccgcgggcgccgccgccuacuacgugggguaccugcagccccgcaccuuccugcucaaguacaacgagaacggcaccaucacggacgcggucgacugcgcccuggacccccugagcgagaccaagugcacccucaaguccuucaccguggagaaggggaucuaccagacgagcaacuuccgggugcagcccaccgaguccaucguccgcuucccgaacaucaccaaccugugccccuucggcgagguguucaacgccacccgguucgccagcgucuacgccuggaaccgcaagcggaucuccaacugcguggcggacuacagcgugcuguacaacuccgccagcuucuccacguucaagugcuacggcgucagccccaccaagcucaacgaccugugcuucaccaacguguacgccgacuccuucgugauccgcggggacgagguccggcagaucgcccccggccagaccgggaagaucgccgacuacaacuacaagcugccggacgacuucacgggcugcgugaucgcguggaacagcaagaaccucgacuccaaggucgggggcaacuacaacuaccuguaccgccuguuccgcaagagcaaccucaagcccuucgagcgggacaucuccaccgagaucuaccaggccggcagcacccccugcaacgggguggagggcuucaacugcuacuucccccugcaguccuacggguuccagccgaccaacggcgugggguaccagcccuaccggguggucgugcugagcuucgagcuccugcacgcccccgccacggugugcggccccaagaaguccaccaaccuggucaagaacaagugcgugaacuucaacuucaacggccucaccgggaccggcgugcugaccgagagcaacaagaaguuccugccguuccagcaguucgggcgcgacaucgccgacacgaccgacgcgguccgcgacccccagacccuggagauccucgacaucacccccugcagcuucggcgggguguccgugaucacgccgggcaccaacaccagcaaccaggucgccgugcuguaccagggcgugaacugcaccgagguccccguggccauccacgccgaccagcugacgcccaccuggcggguguacuccaccgggagcaacgucuuccagacccgcgccggcugccucaucggggcggagcacgugaacaacuccuacgagugcgacauccccaucggcgccggcaucugcgccagcuaccagacgcagaccaacuccccgcggcgcgcccggagcguggcgucccagagcaucaucgccuacaccaugucccugggggccgagaacagcgucgccuacuccaacaacagcaucgccauccccaccaacuucacgaucuccgugaccaccgagauccugcccgugagcaugaccaagacgagcgucgacugcaccauguacaucugcggcgacuccaccgagugcagcaaccuccugcugcaguacggguccuucugcacccagcucaaccgcgcgcugacgggcaucgccguggagcaggacaagaacacccaggagguguucgcccaggucaagcagaucuacaagacgcccccgaucaaggacuucgggggcuucaacuucagccagauccugcccgaccccuccaagcccagcaagcgguccuucaucgaggaccuccuguucaacaaggugacccuggccgacgccggcuucaucaagcaguacggggacugccucggcgacaucgcggcccgcgaccugaucugcgcccagaaguucaacgggcugaccgugcucccgccccugcugaccgacgagaugaucgcccaguacaccagcgcccuccuggcgggcaccaucacguccggguggaccuucggcgccggcgccgcccugcagauccccuucgcgaugcagauggccuaccgguucaacgggaucggcgucacccagaacgugcucuacgagaaccagaagcugaucgccaaccaguucaacagcgccaucgggaagauccaggacucccugagcuccaccgccagcgcgcucggcaagcugcaggacguggucaaccagaacgcccaggcccugaacacgcucgugaagcagcuguccagcaacuucggggccaucuccagcgugcugaacgacauccucucccgccuggacccgcccgaggccgagguccagaucgaccggcugaucaccggccgccuccagagccugcagaccuacgugacccagcagcugauccgggcggccgagauccgcgccagcgccaaccucgccgcgaccaagauguccgagugcgugcugggccagagcaagcgggucgacuucugcgggaagggcuaccaccugauguccuucccccagagcgcgccccacggggugguguuccuccacgucacguacgugcccgcccaggagaagaacuucaccaccgccccggccaucugccacgacggcaaggcccacuucccccgcgagggggucuucguguccaacggcacccacugguucgugacgcagcggaacuucuacgagccccagaucaucaccaccgacaacaccuucgucagcggcaacugcgacguggugaucgggaucgucaacaacacgguguacgacccccugcagccggagcuggacuccuucaaggaggagcucgacaaguacuucaagaaccacaccagccccgacguggaccugggcgacaucuccgggaucaacgccagcgucgugaacauccagaaggagaucgaccgccugaacgagguggccaagaaccucaacgagucccugaucgaccugcaggagcucggcaaguacgagcaguacaucaaguggcccugguacaucuggcugggcuucaucgccgggcugaucgcgaucgucauggugaccaucaugcucugcugcaugaccagcugcugcuccugccugaagggcugcugcagcugcggguccugcugcaaguucgacgaggacgacagcgagccggugcugaagggcgucaagcuccacuacacgugaggacuaguuauaagacugacuagcccgaugggccucccaacgggcccuccuccccuccuugcaccgagauuaaucaaaggcucuuuucagagccaccaaaaaaaaaaaaaaaaaaaaaaaaaaaaaaaaaaaaaaaaaaaaaaaaaaaaaaaaaaaaaaaaaaaaaaaaaaaaaaaaaaaaaaaaaaaaaaaaaaaaa

SEQ ID NO: 24199 - RNA, 4035 nt, Artificial Sequence
  SARS-CoV-2/Wuhan/WIV05/2019__EPI_ISL_402128 spike protein mRNA gc (1-1273)(K986P_V987P_S477N_D614G)
aggagaaagcuuaccauguucguguuccugguccuccugccccuggugagcucccagugcgugaaccucaccacccgcacgcagcugccgcccgccuacaccaacagcuucacccggggcgucuacuaccccgacaagguguuccgcuccagcgugcugcacuccacccaggaccucuuccugcccuucuucagcaacgucacgugguuccacgccauccacguguccgggaccaacggcaccaagcgguucgacaacccggugcugcccuucaacgacggggucuacuucgcgagcaccgagaaguccaacaucauccgcggcuggaucuucgggacgacccucgacagcaagacccagucccugcugaucgugaacaacgccaccaacguggucaucaaggugugcgaguuccaguucugcaacgaccccuuccucggcguguacuaccacaagaacaacaagagcuggauggaguccgaguuccgggucuacagcuccgccaacaacugcacguucgaguacgugagccagcccuuccugauggaccuggagggcaagcaggggaacuucaagaaccuccgcgaguucguguucaagaacaucgacggcuacuucaagaucuacuccaagcacaccccgaucaaccugguccgggaccugccccagggguucagcgcccucgagccccugguggaccugcccaucggcaucaacaucacccgcuuccagacccuccuggcccugcaccgguccuaccucacgccgggggacagcagcuccggcuggaccgcgggcgccgccgccuacuacgugggguaccugcagccccgcaccuuccugcucaaguacaacgagaacggcaccaucacggacgcggucgacugcgcccuggacccccugagcgagaccaagugcacccucaaguccuucaccguggagaaggggaucuaccagacgagcaacuuccgggugcagcccaccgaguccaucguccgcuucccgaacaucaccaaccugugccccuucggcgagguguucaacgccacccgguucgccagcgucuacgccuggaaccgcaagcggaucuccaacugcguggcggacuacagcgugcuguacaacuccgccagcuucuccacguucaagugcuacggcgucagccccaccaagcucaacgaccugugcuucaccaacguguacgccgacuccuucgugauccgcggggacgagguccggcagaucgcccccggccagaccgggaagaucgccgacuacaacuacaagcugccggacgacuucacgggcugcgugaucgcguggaacagcaacaaccucgacuccaaggucgggggcaacuacaacuaccuguaccgccuguuccgcaagagcaaccucaagcccuucgagcgggacaucuccaccgagaucuaccaggccggcaacacccccugcaacgggguggagggcuucaacugcuacuucccccugcagagcuacggguuccagccgaccaacggcgugggguaccagcccuaccggguggucgugcuguccuucgagcuccugcacgcccccgccacggugugcggccccaagaaguccaccaaccuggucaagaacaagugcgugaacuucaacuucaacggccucaccgggaccggcgugcugaccgagagcaacaagaaguuccugccguuccagcaguucgggcgcgacaucgccgacacgaccgacgcgguccgcgacccccagacccuggagauccucgacaucacccccugcagcuucggcggggugagcgugaucacgccgggcaccaacaccuccaaccaggucgccgugcuguaccagggcgugaacugcaccgagguccccguggccauccacgccgaccagcugacgcccaccuggcggguguacagcaccggguccaacgucuuccagacccgcgccggcugccucaucggggcggagcacgugaacaacagcuacgagugcgacauccccaucggcgccggcaucugcgccuccuaccagacgcagaccaacagcccgcggcgcgcccgguccguggcgagccaguccaucaucgccuacaccaugagccugggggccgagaacuccgucgccuacagcaacaacuccaucgccauccccaccaacuucacgaucagcgugaccaccgagauccugcccguguccaugaccaagacgagcgucgacugcaccauguacaucugcggcgacagcaccgagugcuccaaccuccugcugcaguacgggagcuucugcacccagcucaaccgcgcgcugacgggcaucgccguggagcaggacaagaacacccaggagguguucgcccaggucaagcagaucuacaagacgcccccgaucaaggacuucgggggcuucaacuucucccagauccugcccgaccccagcaagcccuccaagcggagcuucaucgaggaccuccuguucaacaaggugacccuggccgacgccggcuucaucaagcaguacggggacugccucggcgacaucgcggcccgcgaccugaucugcgcccagaaguucaacgggcugaccgugcucccgccccugcugaccgacgagaugaucgcccaguacaccuccgcccuccuggcgggcaccaucacgagcggguggaccuucggcgccggcgccgcccugcagauccccuucgcgaugcagauggccuaccgguucaacgggaucggcgucacccagaacgugcucuacgagaaccagaagcugaucgccaaccaguucaacuccgccaucgggaagauccaggacagccuguccagcaccgccuccgcgcucggcaagcugcaggacguggucaaccagaacgcccaggcccugaacacgcucgugaagcagcugagcuccaacuucggggccaucagcuccgugcugaacgacauccucagccgccuggacccgcccgaggccgagguccagaucgaccggcugaucaccggccgccuccagucccugcagaccuacgugacccagcagcugauccgggcggccgagauccgcgccagcgccaaccucgccgcgaccaagaugagcgagugcgugcugggccaguccaagcgggucgacuucugcgggaagggcuaccaccugaugagcuucccccaguccgcgccccacggggugguguuccuccacgucacguacgugcccgcccaggagaagaacuucaccaccgccccggccaucugccacgacggcaaggcccacuucccccgcgagggggucuucgugagcaacggcacccacugguucgugacgcagcggaacuucuacgagccccagaucaucaccaccgacaacaccuucgucuccggcaacugcgacguggugaucgggaucgucaacaacacgguguacgacccccugcagccggagcuggacagcuucaaggaggagcucgacaaguacuucaagaaccacaccucccccgacguggaccugggcgacaucagcgggaucaacgccuccgucgugaacauccagaaggagaucgaccgccugaacgagguggccaagaaccucaacgagagccugaucgaccugcaggagcucggcaaguacgagcaguacaucaaguggcccugguacaucuggcugggcuucaucgccgggcugaucgcgaucgucauggugaccaucaugcucugcugcaugaccuccugcugcagcugccugaagggcugcugcuccugcgggagcugcugcaaguucgacgaggacgacuccgagccggugcugaagggcgucaagcuccacuacacgugaggacuaguuauaagacugacuagcccgaugggccucccaacgggcccuccuccccuccuugcaccgagauuaaucaaaggcucuuuucagagccaccaaaaaaaaaaaaaaaaaaaaaaaaaaaaaaaaaaaaaaaaaaaaaaaaaaaaaaaaaaaaaaaaaaaaaaaaaaaaaaaaaaaaaaaaaaaaaaaaaaaaa

SEQ ID NO: 24200 - RNA, 4035 nt, Artificial Sequence
  SARS-CoV-2/Wuhan/WIV05/2019__EPI_ISL_402128 spike protein mRNA gc (1-1273)(K986P_V987P_N501Y_D614G)
aggagaaagcuuaccauguucguguuccugguccuccugccccuggugagcucccagugcgugaaccucaccacccgcacgcagcugccgcccgccuacaccaacagcuucacccggggcgucuacuaccccgacaagguguuccgcuccagcgugcugcacuccacccaggaccucuuccugcccuucuucagcaacgucacgugguuccacgccauccacguguccgggaccaacggcaccaagcgguucgacaacccggugcugcccuucaacgacggggucuacuucgcgagcaccgagaaguccaacaucauccgcggcuggaucuucgggacgacccucgacagcaagacccagucccugcugaucgugaacaacgccaccaacguggucaucaaggugugcgaguuccaguucugcaacgaccccuuccucggcguguacuaccacaagaacaacaagagcuggauggaguccgaguuccgggucuacagcuccgccaacaacugcacguucgaguacgugagccagcccuuccugauggaccuggagggcaagcaggggaacuucaagaaccuccgcgaguucguguucaagaacaucgacggcuacuucaagaucuacuccaagcacaccccgaucaaccugguccgggaccugccccagggguucagcgcccucgagccccugguggaccugcccaucggcaucaacaucacccgcuuccagacccuccuggcccugcaccgguccuaccucacgccgggggacagcagcuccggcuggaccgcgggcgccgccgccuacuacgugggguaccugcagccccgcaccuuccugcucaaguacaacgagaacggcaccaucacggacgcggucgacugcgcccuggacccccugagcgagaccaagugcacccucaaguccuucaccguggagaaggggaucuaccagacgagcaacuuccgggugcagcccaccgaguccaucguccgcuucccgaacaucaccaaccugugccccuucggcgagguguucaacgccacccgguucgccagcgucuacgccuggaaccgcaagcggaucuccaacugcguggcggacuacagcgugcuguacaacuccgccagcuucuccacguucaagugcuacggcgucagccccaccaagcucaacgaccugugcuucaccaacguguacgccgacuccuucgugauccgcggggacgagguccggcagaucgcccccggccagaccgggaagaucgccgacuacaacuacaagcugccggacgacuucacgggcugcgugaucgcguggaacagcaacaaccucgacuccaaggucgggggcaacuacaacuaccuguaccgccuguuccgcaagagcaaccucaagcccuucgagcgggacaucuccaccgagaucuaccaggccggcagcacccccugcaacgggguggagggcuucaacugcuacuucccccugcaguccuacggguuccagccgaccuacggcgugggguaccagcccuaccggguggucgugcugagcuucgagcuccugcacgcccccgccacggugugcggccccaagaaguccaccaaccuggucaagaacaagugcgugaacuucaacuucaacggccucaccgggaccggcgugcugaccgagagcaacaagaaguuccugccguuccagcaguucgggcgcgacaucgccgacacgaccgacgcgguccgcgacccccagacccuggagauccucgacaucacccccugcagcuucggcgggguguccgugaucacgccgggcaccaacaccagcaaccaggucgccgugcuguaccagggcgugaacugcaccgagguccccguggccauccacgccgaccagcugacgcccaccuggcggguguacuccaccgggagcaacgucuuccagacccgcgccggcugccucaucggggcggagcacgugaacaacuccuacgagugcgacauccccaucggcgccggcaucugcgccagcuaccagacgcagaccaacuccccgcggcgcgcccggagcguggcgucccagagcaucaucgccuacaccaugucccugggggccgagaacagcgucgccuacuccaacaacagcaucgccauccccaccaacuucacgaucuccgugaccaccgagauccugcccgugagcaugaccaagacgagcgucgacugcaccauguacaucugcggcgacuccaccgagugcagcaaccuccugcugcaguacggguccuucugcacccagcucaaccgcgcgcugacgggcaucgccguggagcaggacaagaacacccaggagguguucgcccaggucaagcagaucuacaagacgcccccgaucaaggacuucgggggcuucaacuucagccagauccugcccgaccccuccaagcccagcaagcgguccuucaucgaggaccuccuguucaacaaggugacccuggccgacgccggcuucaucaagcaguacggggacugccucggcgacaucgcggcccgcgaccugaucugcgcccagaaguucaacgggcugaccgugcucccgccccugcugaccgacgagaugaucgcccaguacaccagcgcccuccuggcgggcaccaucacguccggguggaccuucggcgccggcgccgcccugcagauccccuucgcgaugcagauggccuaccgguucaacgggaucggcgucacccagaacgugcucuacgagaaccagaagcugaucgccaaccaguucaacagcgccaucgggaagauccaggacucccugagcuccaccgccagcgcgcucggcaagcugcaggacguggucaaccagaacgcccaggcccugaacacgcucgugaagcagcuguccagcaacuucggggccaucuccagcgugcugaacgacauccucucccgccuggacccgcccgaggccgagguccagaucgaccggcugaucaccggccgccuccagagccugcagaccuacgugacccagcagcugauccgggcggccgagauccgcgccagcgccaaccucgccgcgaccaagauguccgagugcgugcugggccagagcaagcgggucgacuucugcgggaagggcuaccaccugauguccuucccccagagcgcgccccacggggugguguuccuccacgucacguacgugcccgcccaggagaagaacuucaccaccgccccggccaucugccacgacggcaaggcccacuucccccgcgagggggucuucguguccaacggcacccacugguucgugacgcagcggaacuucuacgagccccagaucaucaccaccgacaacaccuucgucagcggcaacugcgacguggugaucgggaucgucaacaacacgguguacgacccccugcagccggagcuggacuccuucaaggaggagcucgacaaguacuucaagaaccacaccagccccgacguggaccugggcgacaucuccgggaucaacgccagcgucgugaacauccagaaggagaucgaccgccugaacgagguggccaagaaccucaacgagucccugaucgaccugcaggagcucggcaaguacgagcaguacaucaaguggcccugguacaucuggcugggcuucaucgccgggcugaucgcgaucgucauggugaccaucaugcucugcugcaugaccagcugcugcuccugccugaagggcugcugcagcugcggguccugcugcaaguucgacgaggacgacagcgagccggugcugaagggcgucaagcuccacuacacgugaggacuaguuauaagacugacuagcccgaugggccucccaacgggcccuccuccccuccuugcaccgagauuaaucaaaggcucuuuucagagccaccaaaaaaaaaaaaaaaaaaaaaaaaaaaaaaaaaaaaaaaaaaaaaaaaaaaaaaaaaaaaaaaaaaaaaaaaaaaaaaaaaaaaaaaaaaaaaaaaaaaaa

SEQ ID NO: 24201 - RNA, 4029 nt, Artificial Sequence
  SARS-CoV-2/Wuhan/WIV05/2019__EPI_ISL_402128 spike protein mRNA gc (1-1273)(K986P_V987P_H69del_V70del_D614G)
aggagaaagcuuaccauguucguguuccugguccuccugccccuggugagcucccagugcgugaaccucaccacccgcacgcagcugccgcccgccuacaccaacagcuucacccggggcgucuacuaccccgacaagguguuccgcuccagcgugcugcacuccacccaggaccucuuccugcccuucuucagcaacgucacgugguuccacgccaucuccgggaccaacggcaccaagcgguucgacaacccggugcugcccuucaacgacgggguguacuucgcgagcaccgagaaguccaacaucauccgcggcuggaucuucgggacgacccucgacagcaagacccagucccugcugaucgucaacaacgccaccaacguggugaucaaggucugcgaguuccaguucugcaacgaccccuuccucggcguguacuaccacaagaacaacaagagcuggauggaguccgaguuccggguguacagcuccgccaacaacugcacguucgaguacgucagccagcccuuccugauggaccuggagggcaagcaggggaacuucaagaaccuccgcgaguucguguucaagaacaucgacggcuacuucaagaucuacuccaagcacaccccgaucaaccuggugcgggaccugccccagggguucagcgcccucgagccccuggucgaccugcccaucggcaucaacaucacccgcuuccagacccuccuggcccugcaccgguccuaccucacgccgggggacagcagcuccggcuggaccgcgggcgccgccgccuacuacgugggguaccugcagccccgcaccuuccugcucaaguacaacgagaacggcaccaucacggacgcgguggacugcgcccuggacccccugagcgagaccaagugcacccucaaguccuucaccgucgagaaggggaucuaccagacgagcaacuuccgggugcagcccaccgaguccaucgugcgcuucccgaacaucaccaaccugugccccuucggcgaggucuucaacgccacccgguucgccagcguguacgccuggaaccgcaagcggaucuccaacugcgucgcggacuacagcgugcuguacaacuccgccagcuucuccacguucaagugcuacggcgugagccccaccaagcucaacgaccugugcuucaccaacgucuacgccgacuccuucgugauccgcggggacgaggugcggcagaucgcccccggccagaccgggaagaucgccgacuacaacuacaagcugccggacgacuucacgggcugcgucaucgcguggaacagcaacaaccucgacuccaaggucgggggcaacuacaacuaccuguaccgccuguuccgcaagagcaaccucaagcccuucgagcgggacaucuccaccgagaucuaccaggccggcagcacccccugcaacgggguggagggcuucaacugcuacuucccccugcaguccuacggguuccagccgaccaacggcgugggguaccagcccuaccggguggugguccugagcuucgagcuccugcacgcccccgccacggugugcggccccaagaaguccaccaaccuggugaagaacaagugcgucaacuucaacuucaacggccucaccgggaccggcgugcugaccgagagcaacaagaaguuccugccguuccagcaguucgggcgcgacaucgccgacacgaccgacgcggugcgcgacccccagacccuggagauccucgacaucacccccugcagcuucggcggggucuccgugaucacgccgggcaccaacaccagcaaccagguggccguccuguaccagggcgugaacugcaccgaggugcccgucgccauccacgccgaccagcugacgcccaccuggcggguguacuccaccgggagcaacguguuccagacccgcgccggcugccucaucggggcggagcacgucaacaacuccuacgagugcgacauccccaucggcgccggcaucugcgccagcuaccagacgcagaccaacuccccgcggcgcgcccggagcguggcgucccagagcaucaucgccuacaccaugucccugggggccgagaacagcguggccuacuccaacaacagcaucgccauccccaccaacuucacgaucuccgucaccaccgagauccugcccgugagcaugaccaagacgagcguggacugcaccauguacaucugcggcgacuccaccgagugcagcaaccuccugcugcaguacggguccuucugcacccagcucaaccgcgcgcugacgggcaucgccgucgagcaggacaagaacacccaggagguguucgcccaggugaagcagaucuacaagacgcccccgaucaaggacuucgggggcuucaacuucagccagauccugcccgaccccuccaagcccagcaagcgguccuucaucgaggaccuccuguucaacaaggucacccuggccgacgccggcuucaucaagcaguacggggacugccucggcgacaucgcggcccgcgaccugaucugcgcccagaaguucaacgggcugaccgugcucccgccccugcugaccgacgagaugaucgcccaguacaccagcgcccuccuggcgggcaccaucacguccggguggaccuucggcgccggcgccgcccugcagauccccuucgcgaugcagauggccuaccgguucaacgggaucggcgugacccagaacguccucuacgagaaccagaagcugaucgccaaccaguucaacagcgccaucgggaagauccaggacucccugagcuccaccgccagcgcgcucggcaagcugcaggacguggugaaccagaacgcccaggcccugaacacgcucgucaagcagcuguccagcaacuucggggccaucuccagcgugcugaacgacauccucucccgccuggacccgcccgaggccgaggugcagaucgaccggcugaucaccggccgccuccagagccugcagaccuacgucacccagcagcugauccgggcggccgagauccgcgccagcgccaaccucgccgcgaccaagauguccgagugcgugcugggccagagcaagcggguggacuucugcgggaagggcuaccaccugauguccuucccccagagcgcgccccacggggucguguuccuccacgugacguacguccccgcccaggagaagaacuucaccaccgccccggccaucugccacgacggcaaggcccacuucccccgcgaggggguguucgucuccaacggcacccacugguucgugacgcagcggaacuucuacgagccccagaucaucaccaccgacaacaccuucgugagcggcaacugcgacgucgugaucgggaucgugaacaacacggucuacgacccccugcagccggagcuggacuccuucaaggaggagcucgacaaguacuucaagaaccacaccagccccgacguggaccugggcgacaucuccgggaucaacgccagcguggucaacauccagaaggagaucgaccgccugaacgagguggccaagaaccucaacgagucccugaucgaccugcaggagcucggcaaguacgagcaguacaucaaguggcccugguacaucuggcugggcuucaucgccgggcugaucgcgaucgugauggucaccaucaugcucugcugcaugaccagcugcugcuccugccugaagggcugcugcagcugcggguccugcugcaaguucgacgaggacgacagcgagccggugcugaagggcgugaagcuccacuacacgugaggacuaguuauaagacugacuagcccgaugggccucccaacgggcccuccuccccuccuugcaccgagauuaaucaaaggcucuuuucagagccaccaaaaaaaaaaaaaaaaaaaaaaaaaaaaaaaaaaaaaaaaaaaaaaaaaaaaaaaaaaaaaaaaaaaaaaaaaaaaaaaaaaaaaaaaaaaaaaaaaaaaa

SEQ ID NO: 24202 - RNA, 4035 nt, Artificial Sequence
  SARS-CoV-2/Wuhan/WIV05/2019__EPI_ISL_402128 spike protein mRNA gc (1-1273)(K986P_V987P_Y453F_D614G)
aggagaaagcuuaccauguucguguuccugguccuccugccccuggugagcucccagugcgugaaccucaccacccgcacgcagcugccgcccgccuacaccaacagcuucacccggggcgucuacuaccccgacaagguguuccgcuccagcgugcugcacuccacccaggaccucuuccugcccuucuucagcaacgucacgugguuccacgccauccacguguccgggaccaacggcaccaagcgguucgacaacccggugcugcccuucaacgacggggucuacuucgcgagcaccgagaaguccaacaucauccgcggcuggaucuucgggacgacccucgacagcaagacccagucccugcugaucgugaacaacgccaccaacguggucaucaaggugugcgaguuccaguucugcaacgaccccuuccucggcguguacuaccacaagaacaacaagagcuggauggaguccgaguuccgggucuacagcuccgccaacaacugcacguucgaguacgugagccagcccuuccugauggaccuggagggcaagcaggggaacuucaagaaccuccgcgaguucguguucaagaacaucgacggcuacuucaagaucuacuccaagcacaccccgaucaaccugguccgggaccugccccagggguucagcgcccucgagccccugguggaccugcccaucggcaucaacaucacccgcuuccagacccuccuggcccugcaccgguccuaccucacgccgggggacagcagcuccggcuggaccgcgggcgccgccgccuacuacgugggguaccugcagccccgcaccuuccugcucaaguacaacgagaacggcaccaucacggacgcggucgacugcgcccuggacccccugagcgagaccaagugcacccucaaguccuucaccguggagaaggggaucuaccagacgagcaacuuccgggugcagcccaccgaguccaucguccgcuucccgaacaucaccaaccugugccccuucggcgagguguucaacgccacccgguucgccagcgucuacgccuggaaccgcaagcggaucuccaacugcguggcggacuacagcgugcuguacaacuccgccagcuucuccacguucaagugcuacggcgucagccccaccaagcucaacgaccugugcuucaccaacguguacgccgacuccuucgugauccgcggggacgagguccggcagaucgcccccggccagaccgggaagaucgccgacuacaacuacaagcugccggacgacuucacgggcugcgugaucgcguggaacagcaacaaccucgacuccaaggucgggggcaacuacaacuaccuguuccgccuguuccgcaagagcaaccucaagcccuucgagcgggacaucuccaccgagaucuaccaggccggcagcacccccugcaacgggguggagggcuucaacugcuacuucccccugcaguccuacggguuccagccgaccaacggcgugggguaccagcccuaccggguggucgugcugagcuucgagcuccugcacgcccccgccacggugugcggccccaagaaguccaccaaccuggucaagaacaagugcgugaacuucaacuucaacggccucaccgggaccggcgugcugaccgagagcaacaagaaguuccugccguuccagcaguucgggcgcgacaucgccgacacgaccgacgcgguccgcgacccccagacccuggagauccucgacaucacccccugcagcuucggcgggguguccgugaucacgccgggcaccaacaccagcaaccaggucgccgugcuguaccagggcgugaacugcaccgagguccccguggccauccacgccgaccagcugacgcccaccuggcggguguacuccaccgggagcaacgucuuccagacccgcgccggcugccucaucggggcggagcacgugaacaacuccuacgagugcgacauccccaucggcgccggcaucugcgccagcuaccagacgcagaccaacuccccgcggcgcgcccggagcguggcgucccagagcaucaucgccuacaccaugucccugggggccgagaacagcgucgccuacuccaacaacagcaucgccauccccaccaacuucacgaucuccgugaccaccgagauccugcccgugagcaugaccaagacgagcgucgacugcaccauguacaucugcggcgacuccaccgagugcagcaaccuccugcugcaguacggguccuucugcacccagcucaaccgcgcgcugacgggcaucgccguggagcaggacaagaacacccaggagguguucgcccaggucaagcagaucuacaagacgcccccgaucaaggacuucgggggcuucaacuucagccagauccugcccgaccccuccaagcccagcaagcgguccuucaucgaggaccuccuguucaacaaggugacccuggccgacgccggcuucaucaagcaguacggggacugccucggcgacaucgcggcccgcgaccugaucugcgcccagaaguucaacgggcugaccgugcucccgccccugcugaccgacgagaugaucgcccaguacaccagcgcccuccuggcgggcaccaucacguccggguggaccuucggcgccggcgccgcccugcagauccccuucgcgaugcagauggccuaccgguucaacgggaucggcgucacccagaacgugcucuacgagaaccagaagcugaucgccaaccaguucaacagcgccaucgggaagauccaggacucccugagcuccaccgccagcgcgcucggcaagcugcaggacguggucaaccagaacgcccaggcccugaacacgcucgugaagcagcuguccagcaacuucggggccaucuccagcgugcugaacgacauccucucccgccuggacccgcccgaggccgagguccagaucgaccggcugaucaccggccgccuccagagccugcagaccuacgugacccagcagcugauccgggcggccgagauccgcgccagcgccaaccucgccgcgaccaagauguccgagugcgugcugggccagagcaagcgggucgacuucugcgggaagggcuaccaccugauguccuucccccagagcgcgccccacggggugguguuccuccacgucacguacgugcccgcccaggagaagaacuucaccaccgccccggccaucugccacgacggcaaggcccacuucccccgcgagggggucuucguguccaacggcacccacugguucgugacgcagcggaacuucuacgagccccagaucaucaccaccgacaacaccuucgucagcggcaacugcgacguggugaucgggaucgucaacaacacgguguacgacccccugcagccggagcuggacuccuucaaggaggagcucgacaaguacuucaagaaccacaccagccccgacguggaccugggcgacaucuccgggaucaacgccagcgucgugaacauccagaaggagaucgaccgccugaacgagguggccaagaaccucaacgagucccugaucgaccugcaggagcucggcaaguacgagcaguacaucaaguggcccugguacaucuggcugggcuucaucgccgggcugaucgcgaucgucauggugaccaucaugcucugcugcaugaccagcugcugcuccugccugaagggcugcugcagcugcggguccugcugcaaguucgacgaggacgacagcgagccggugcugaagggcgucaagcuccacuacacgugaggacuaguuauaagacugacuagcccgaugggccucccaacgggcccuccuccccuccuugcaccgagauuaaucaaaggcucuuuucagagccaccaaaaaaaaaaaaaaaaaaaaaaaaaaaaaaaaaaaaaaaaaaaaaaaaaaaaaaaaaaaaaaaaaaaaaaaaaaaaaaaaaaaaaaaaaaaaaaaaaaaaa

SEQ ID NO: 24203 - RNA, 4035 nt, Artificial Sequence
  SARS-CoV-2/Wuhan/WIV05/2019__EPI_ISL_402128 spike protein mRNA gc (1-1273)(K986P_V987P_D614G_I692V)
aggagaaagcuuaccauguucguguuccugguccuccugccccuggugagcucccagugcgugaaccucaccacccgcacgcagcugccgcccgccuacaccaacagcuucacccggggcgucuacuaccccgacaagguguuccgcuccagcgugcugcacuccacccaggaccucuuccugcccuucuucagcaacgucacgugguuccacgccauccacguguccgggaccaacggcaccaagcgguucgacaacccggugcugcccuucaacgacggggucuacuucgcgagcaccgagaaguccaacaucauccgcggcuggaucuucgggacgacccucgacagcaagacccagucccugcugaucgugaacaacgccaccaacguggucaucaaggugugcgaguuccaguucugcaacgaccccuuccucggcguguacuaccacaagaacaacaagagcuggauggaguccgaguuccgggucuacagcuccgccaacaacugcacguucgaguacgugagccagcccuuccugauggaccuggagggcaagcaggggaacuucaagaaccuccgcgaguucguguucaagaacaucgacggcuacuucaagaucuacuccaagcacaccccgaucaaccugguccgggaccugccccagggguucagcgcccucgagccccugguggaccugcccaucggcaucaacaucacccgcuuccagacccuccuggcccugcaccgguccuaccucacgccgggggacagcagcuccggcuggaccgcgggcgccgccgccuacuacgugggguaccugcagccccgcaccuuccugcucaaguacaacgagaacggcaccaucacggacgcggucgacugcgcccuggacccccugagcgagaccaagugcacccucaaguccuucaccguggagaaggggaucuaccagacgagcaacuuccgggugcagcccaccgaguccaucguccgcuucccgaacaucaccaaccugugccccuucggcgagguguucaacgccacccgguucgccagcgucuacgccuggaaccgcaagcggaucuccaacugcguggcggacuacagcgugcuguacaacuccgccagcuucuccacguucaagugcuacggcgucagccccaccaagcucaacgaccugugcuucaccaacguguacgccgacuccuucgugauccgcggggacgagguccggcagaucgcccccggccagaccgggaagaucgccgacuacaacuacaagcugccggacgacuucacgggcugcgugaucgcguggaacagcaacaaccucgacuccaaggucgggggcaacuacaacuaccuguaccgccuguuccgcaagagcaaccucaagcccuucgagcgggacaucuccaccgagaucuaccaggccggcagcacccccugcaacgggguggagggcuucaacugcuacuucccccugcaguccuacggguuccagccgaccaacggcgugggguaccagcccuaccggguggucgugcugagcuucgagcuccugcacgcccccgccacggugugcggccccaagaaguccaccaaccuggucaagaacaagugcgugaacuucaacuucaacggccucaccgggaccggcgugcugaccgagagcaacaagaaguuccugccguuccagcaguucgggcgcgacaucgccgacacgaccgacgcgguccgcgacccccagacccuggagauccucgacaucacccccugcagcuucggcgggguguccgugaucacgccgggcaccaacaccagcaaccaggucgccgugcuguaccagggcgugaacugcaccgagguccccguggccauccacgccgaccagcugacgcccaccuggcggguguacuccaccgggagcaacgucuuccagacccgcgccggcugccucaucggggcggagcacgugaacaacuccuacgagugcgacauccccaucggcgccggcaucugcgccagcuaccagacgcagaccaacuccccgcggcgcgcccggagcguggcgucccagagcgucaucgccuacaccaugucccugggggccgagaacagcguggccuacuccaacaacagcaucgccauccccaccaacuucacgaucuccgugaccaccgagauccugcccgucagcaugaccaagacgagcguggacugcaccauguacaucugcggcgacuccaccgagugcagcaaccuccugcugcaguacggguccuucugcacccagcucaaccgcgcgcugacgggcaucgccguggagcaggacaagaacacccaggaggucuucgcccaggugaagcagaucuacaagacgcccccgaucaaggacuucgggggcuucaacuucagccagauccugcccgaccccuccaagcccagcaagcgguccuucaucgaggaccuccuguucaacaaggugacccuggccgacgccggcuucaucaagcaguacggggacugccucggcgacaucgcggcccgcgaccugaucugcgcccagaaguucaacgggcugaccguccucccgccccugcugaccgacgagaugaucgcccaguacaccagcgcccuccuggcgggcaccaucacguccggguggaccuucggcgccggcgccgcccugcagauccccuucgcgaugcagauggccuaccgguucaacgggaucggcgugacccagaacgugcucuacgagaaccagaagcugaucgccaaccaguucaacagcgccaucgggaagauccaggacucccugagcuccaccgccagcgcgcucggcaagcugcaggacgucgugaaccagaacgcccaggcccugaacacgcucgugaagcagcuguccagcaacuucggggccaucuccagcguccugaacgacauccucucccgccuggacccgcccgaggccgaggugcagaucgaccggcugaucaccggccgccuccagagccugcagaccuacgugacccagcagcugauccgggcggccgagauccgcgccagcgccaaccucgccgcgaccaagauguccgagugcguccugggccagagcaagcggguggacuucugcgggaagggcuaccaccugauguccuucccccagagcgcgccccacgggguggucuuccuccacgugacguacguccccgcccaggagaagaacuucaccaccgccccggccaucugccacgacggcaaggcccacuucccccgcgaggggguguucguguccaacggcacccacugguucgucacgcagcggaacuucuacgagccccagaucaucaccaccgacaacaccuucgugagcggcaacugcgacguggucaucgggaucgugaacaacacgguguacgacccccugcagccggagcuggacuccuucaaggaggagcucgacaaguacuucaagaaccacaccagccccgacgucgaccugggcgacaucuccgggaucaacgccagcguggugaacauccagaaggagaucgaccgccugaacgaggucgccaagaaccucaacgagucccugaucgaccugcaggagcucggcaaguacgagcaguacaucaaguggcccugguacaucuggcugggcuucaucgccgggcugaucgcgaucgugauggugaccaucaugcucugcugcaugaccagcugcugcuccugccugaagggcugcugcagcugcggguccugcugcaaguucgacgaggacgacagcgagccgguccugaagggcgugaagcuccacuacacgugaggacuaguuauaagacugacuagcccgaugggccucccaacgggcccuccuccccuccuugcaccgagauuaaucaaaggcucuuuucagagccaccaaaaaaaaaaaaaaaaaaaaaaaaaaaaaaaaaaaaaaaaaaaaaaaaaaaaaaaaaaaaaaaaaaaaaaaaaaaaaaaaaaaaaaaaaaaaaaaaaaaaa

SEQ ID NO: 24204 - RNA, 4035 nt, Artificial Sequence
  SARS-CoV-2/Wuhan/WIV05/2019__EPI_ISL_402128 spike protein mRNA gc (1-1273)(K986P_V987P_D614G_M1229I)
aggagaaagcuuaccauguucguguuccugguccuccugccccuggugagcucccagugcgugaaccucaccacccgcacgcagcugccgcccgccuacaccaacagcuucacccggggcgucuacuaccccgacaagguguuccgcuccagcgugcugcacuccacccaggaccucuuccugcccuucuucagcaacgucacgugguuccacgccauccacguguccgggaccaacggcaccaagcgguucgacaacccggugcugcccuucaacgacggggucuacuucgcgagcaccgagaaguccaacaucauccgcggcuggaucuucgggacgacccucgacagcaagacccagucccugcugaucgugaacaacgccaccaacguggucaucaaggugugcgaguuccaguucugcaacgaccccuuccucggcguguacuaccacaagaacaacaagagcuggauggaguccgaguuccgggucuacagcuccgccaacaacugcacguucgaguacgugagccagcccuuccugauggaccuggagggcaagcaggggaacuucaagaaccuccgcgaguucguguucaagaacaucgacggcuacuucaagaucuacuccaagcacaccccgaucaaccugguccgggaccugccccagggguucagcgcccucgagccccugguggaccugcccaucggcaucaacaucacccgcuuccagacccuccuggcccugcaccgguccuaccucacgccgggggacagcagcuccggcuggaccgcgggcgccgccgccuacuacgugggguaccugcagccccgcaccuuccugcucaaguacaacgagaacggcaccaucacggacgcggucgacugcgcccuggacccccugagcgagaccaagugcacccucaaguccuucaccguggagaaggggaucuaccagacgagcaacuuccgggugcagcccaccgaguccaucguccgcuucccgaacaucaccaaccugugccccuucggcgagguguucaacgccacccgguucgccagcgucuacgccuggaaccgcaagcggaucuccaacugcguggcggacuacagcgugcuguacaacuccgccagcuucuccacguucaagugcuacggcgucagccccaccaagcucaacgaccugugcuucaccaacguguacgccgacuccuucgugauccgcggggacgagguccggcagaucgcccccggccagaccgggaagaucgccgacuacaacuacaagcugccggacgacuucacgggcugcgugaucgcguggaacagcaacaaccucgacuccaaggucgggggcaacuacaacuaccuguaccgccuguuccgcaagagcaaccucaagcccuucgagcgggacaucuccaccgagaucuaccaggccggcagcacccccugcaacgggguggagggcuucaacugcuacuucccccugcaguccuacggguuccagccgaccaacggcgugggguaccagcccuaccggguggucgugcugagcuucgagcuccugcacgcccccgccacggugugcggccccaagaaguccaccaaccuggucaagaacaagugcgugaacuucaacuucaacggccucaccgggaccggcgugcugaccgagagcaacaagaaguuccugccguuccagcaguucgggcgcgacaucgccgacacgaccgacgcgguccgcgacccccagacccuggagauccucgacaucacccccugcagcuucggcgggguguccgugaucacgccgggcaccaacaccagcaaccaggucgccgugcuguaccagggcgugaacugcaccgagguccccguggccauccacgccgaccagcugacgcccaccuggcggguguacuccaccgggagcaacgucuuccagacccgcgccggcugccucaucggggcggagcacgugaacaacuccuacgagugcgacauccccaucggcgccggcaucugcgccagcuaccagacgcagaccaacuccccgcggcgcgcccggagcguggcgucccagagcaucaucgccuacaccaugucccugggggccgagaacagcgucgccuacuccaacaacagcaucgccauccccaccaacuucacgaucuccgugaccaccgagauccugcccgugagcaugaccaagacgagcgucgacugcaccauguacaucugcggcgacuccaccgagugcagcaaccuccugcugcaguacggguccuucugcacccagcucaaccgcgcgcugacgggcaucgccguggagcaggacaagaacacccaggagguguucgcccaggucaagcagaucuacaagacgcccccgaucaaggacuucgggggcuucaacuucagccagauccugcccgaccccuccaagcccagcaagcgguccuucaucgaggaccuccuguucaacaaggugacccuggccgacgccggcuucaucaagcaguacggggacugccucggcgacaucgcggcccgcgaccugaucugcgcccagaaguucaacgggcugaccgugcucccgccccugcugaccgacgagaugaucgcccaguacaccagcgcccuccuggcgggcaccaucacguccggguggaccuucggcgccggcgccgcccugcagauccccuucgcgaugcagauggccuaccgguucaacgggaucggcgucacccagaacgugcucuacgagaaccagaagcugaucgccaaccaguucaacagcgccaucgggaagauccaggacucccugagcuccaccgccagcgcgcucggcaagcugcaggacguggucaaccagaacgcccaggcccugaacacgcucgugaagcagcuguccagcaacuucggggccaucuccagcgugcugaacgacauccucucccgccuggacccgcccgaggccgagguccagaucgaccggcugaucaccggccgccuccagagccugcagaccuacgugacccagcagcugauccgggcggccgagauccgcgccagcgccaaccucgccgcgaccaagauguccgagugcgugcugggccagagcaagcgggucgacuucugcgggaagggcuaccaccugauguccuucccccagagcgcgccccacggggugguguuccuccacgucacguacgugcccgcccaggagaagaacuucaccaccgccccggccaucugccacgacggcaaggcccacuucccccgcgagggggucuucguguccaacggcacccacugguucgugacgcagcggaacuucuacgagccccagaucaucaccaccgacaacaccuucgucagcggcaacugcgacguggugaucgggaucgucaacaacacgguguacgacccccugcagccggagcuggacuccuucaaggaggagcucgacaaguacuucaagaaccacaccagccccgacguggaccugggcgacaucuccgggaucaacgccagcgucgugaacauccagaaggagaucgaccgccugaacgagguggccaagaaccucaacgagucccugaucgaccugcaggagcucggcaaguacgagcaguacaucaaguggcccugguacaucuggcugggcuucaucgccgggcugaucgcgaucgucaucgugaccaucaugcucugcugcaugaccagcugcugcuccugccugaagggcugcugcagcugcggguccugcugcaaguucgacgaggacgacagcgagccggugcugaagggcgucaagcuccacuacacgugaggacuaguuauaagacugacuagcccgaugggccucccaacgggcccuccuccccuccuugcaccgagauuaaucaaaggcucuuuucagagccaccaaaaaaaaaaaaaaaaaaaaaaaaaaaaaaaaaaaaaaaaaaaaaaaaaaaaaaaaaaaaaaaaaaaaaaaaaaaaaaaaaaaaaaaaaaaaaaaaaaaaa

SEQ ID NO: 24205 - RNA, 4029 nt, Artificial Sequence
  SARS-CoV-2/Wuhan/WIV05/2019__EPI_ISL_402128 spike protein mRNA gc (1-1273)(K986P_V987P_H69del_V70del_A222V_Y453F_S477N_D614G_I692V)
aggagaaagcuuaccauguucguguuccugguccuccugccccuggugagcucccagugcgugaaccucaccacccgcacgcagcugccgcccgccuacaccaacagcuucacccggggcgucuacuaccccgacaagguguuccgcuccagcgugcugcacuccacccaggaccucuuccugcccuucuucagcaacgucacgugguuccacgccaucuccgggaccaacggcaccaagcgguucgacaacccggugcugcccuucaacgacgggguguacuucgcgagcaccgagaaguccaacaucauccgcggcuggaucuucgggacgacccucgacagcaagacccagucccugcugaucgucaacaacgccaccaacguggugaucaaggucugcgaguuccaguucugcaacgaccccuuccucggcguguacuaccacaagaacaacaagagcuggauggaguccgaguuccggguguacagcuccgccaacaacugcacguucgaguacgucagccagcccuuccugauggaccuggagggcaagcaggggaacuucaagaaccuccgcgaguucguguucaagaacaucgacggcuacuucaagaucuacuccaagcacaccccgaucaaccuggugcgggaccugccccagggguucagcguccucgagccccugguggaccugcccaucggcaucaacaucacccgcuuccagacccuccuggcccugcaccgguccuaccucacgccgggggacagcagcuccggcuggaccgccggcgcggccgccuacuacgugggguaccugcagccccgcaccuuccugcucaaguacaacgagaacggcaccaucacggacgccgucgacugcgcgcuggacccccugagcgagaccaagugcacccucaaguccuucaccguggagaaggggaucuaccagacgagcaacuuccgggugcagcccaccgaguccaucguccgcuucccgaacaucaccaaccugugccccuucggcgagguguucaacgccacccgguucgccagcgucuacgccuggaaccgcaagcggaucuccaacugcguggccgacuacagcgugcuguacaacuccgcgagcuucuccacguucaagugcuacggcgucagccccaccaagcucaacgaccugugcuucaccaacguguacgccgacuccuucgugauccgcggggacgagguccggcagaucgcccccggccagaccgggaagaucgccgacuacaacuacaagcugccggacgacuucacgggcugcgugaucgccuggaacagcaacaaccucgacuccaaggucgggggcaacuacaacuaccuguuccgccuguuccgcaagagcaaccucaagcccuucgagcgggacaucuccaccgagaucuaccaggcgggcaacacccccugcaacgggguggagggcuucaacugcuacuucccccugcagagcuacggguuccagccgaccaacggcgugggguaccagcccuaccggguggucgugcuguccuucgagcuccugcacgcccccgccacggugugcggccccaagaaguccaccaaccuggucaagaacaagugcgugaacuucaacuucaacggccucaccgggaccggcgugcugaccgagagcaacaagaaguuccugccguuccagcaguucgggcgcgacaucgccgacacgaccgacgccguccgcgacccccagacccuggagauccucgacaucacccccugcagcuucggcggggugagcgugaucacgccgggcaccaacaccuccaaccaggucgcggugcuguaccagggcgugaacugcaccgagguccccguggccauccacgccgaccagcugacgcccaccuggcggguguacagcaccggguccaacgucuuccagacccgcgccggcugccucaucggggccgagcacgugaacaacagcuacgagugcgacauccccaucggcgcgggcaucugcgccuccuaccagacgcagaccaacagcccgcggcgcgcccgguccguggccagccaguccgucaucgcguacaccaugagccugggggccgagaacuccguggccuacagcaacaacuccaucgccauccccaccaacuucacgaucagcgugaccaccgagauccugcccgucuccaugaccaagacgagcguggacugcaccauguacaucugcggcgacagcaccgagugcuccaaccuccugcugcaguacgggagcuucugcacccagcucaaccgcgcccugacgggcaucgcgguggagcaggacaagaacacccaggaggucuucgcccaggugaagcagaucuacaagacgcccccgaucaaggacuucgggggcuucaacuucucccagauccugcccgaccccagcaagcccuccaagcggagcuucaucgaggaccuccuguucaacaaggugacccuggccgacgccggcuucaucaagcaguacggggacugccucggcgacaucgccgcgcgcgaccugaucugcgcccagaaguucaacgggcugaccguccucccgccccugcugaccgacgagaugaucgcccaguacaccuccgcccuccuggccggcaccaucacgagcggguggaccuucggcgcgggcgccgcccugcagauccccuucgccaugcagauggcguaccgguucaacgggaucggcgugacccagaacgugcucuacgagaaccagaagcugaucgccaaccaguucaacuccgccaucgggaagauccaggacagccuguccagcaccgccuccgcccucggcaagcugcaggacgucgugaaccagaacgcgcaggcccugaacacgcucgugaagcagcugagcuccaacuucggggccaucagcuccguccugaacgacauccucagccgccuggacccgcccgaggccgaggugcagaucgaccggcugaucaccggccgccuccagucccugcagaccuacgugacccagcagcugauccgggccgcggagauccgcgccagcgccaaccucgccgccaccaagaugagcgagugcguccugggccaguccaagcggguggacuucugcgggaagggcuaccaccugaugagcuucccccaguccgcgccccacgggguggucuuccuccacgugacguacguccccgcccaggagaagaacuucaccaccgccccggccaucugccacgacggcaaggcgcacuucccccgcgaggggguguucgugagcaacggcacccacugguucgucacgcagcggaacuucuacgagccccagaucaucaccaccgacaacaccuucguguccggcaacugcgacguggucaucgggaucgugaacaacacgguguacgacccccugcagccggagcuggacagcuucaaggaggagcucgacaaguacuucaagaaccacaccucccccgacgucgaccugggcgacaucagcgggaucaacgccuccguggugaacauccagaaggagaucgaccgccugaacgaggucgccaagaaccucaacgagagccugaucgaccugcaggagcucggcaaguacgagcaguacaucaaguggcccugguacaucuggcugggcuucaucgccgggcugaucgccaucgugauggugaccaucaugcucugcugcaugaccuccugcugcagcugccugaagggcugcugcuccugcgggagcugcugcaaguucgacgaggacgacuccgagccgguccugaagggcgugaagcuccacuacacgugaggacuaguuauaagacugacuagcccgaugggccucccaacgggcccuccuccccuccuugcaccgagauuaaucaaaggcucuuuucagagccaccaaaaaaaaaaaaaaaaaaaaaaaaaaaaaaaaaaaaaaaaaaaaaaaaaaaaaaaaaaaaaaaaaaaaaaaaaaaaaaaaaaaaaaaaaaaaaaaaaaaaa

SEQ ID NO: 24206 - RNA, 4029 nt, Artificial Sequence
  SARS-CoV-2/Wuhan/WIV05/2019__EPI_ISL_402128 spike protein mRNA gc (1-1273)(K986P_V987P_H69del_V70del_Y453F_D614G_I692V_M1229I)
aggagaaagcuuaccauguucguguuccugguccuccugccccuggugagcucccagugcgugaaccucaccacccgcacgcagcugccgcccgccuacaccaacagcuucacccggggcgucuacuaccccgacaagguguuccgcuccagcgugcugcacuccacccaggaccucuuccugcccuucuucagcaacgucacgugguuccacgccaucuccgggaccaacggcaccaagcgguucgacaacccggugcugcccuucaacgacgggguguacuucgcgagcaccgagaaguccaacaucauccgcggcuggaucuucgggacgacccucgacagcaagacccagucccugcugaucgucaacaacgccaccaacguggugaucaaggucugcgaguuccaguucugcaacgaccccuuccucggcguguacuaccacaagaacaacaagagcuggauggaguccgaguuccggguguacagcuccgccaacaacugcacguucgaguacgucagccagcccuuccugauggaccuggagggcaagcaggggaacuucaagaaccuccgcgaguucguguucaagaacaucgacggcuacuucaagaucuacuccaagcacaccccgaucaaccuggugcgggaccugccccagggguucagcgcccucgagccccuggucgaccugcccaucggcaucaacaucacccgcuuccagacccuccuggcccugcaccgguccuaccucacgccgggggacagcagcuccggcuggaccgcgggcgccgccgccuacuacgugggguaccugcagccccgcaccuuccugcucaaguacaacgagaacggcaccaucacggacgcgguggacugcgcccuggacccccugagcgagaccaagugcacccucaaguccuucaccgucgagaaggggaucuaccagacgagcaacuuccgggugcagcccaccgaguccaucgugcgcuucccgaacaucaccaaccugugccccuucggcgaggucuucaacgccacccgguucgccagcguguacgccuggaaccgcaagcggaucuccaacugcgucgcggacuacagcgugcuguacaacuccgccagcuucuccacguucaagugcuacggcgugagccccaccaagcucaacgaccugugcuucaccaacgucuacgccgacuccuucgugauccgcggggacgaggugcggcagaucgcccccggccagaccgggaagaucgccgacuacaacuacaagcugccggacgacuucacgggcugcgucaucgcguggaacagcaacaaccucgacuccaaggucgggggcaacuacaacuaccuguuccgccuguuccgcaagagcaaccucaagcccuucgagcgggacaucuccaccgagaucuaccaggccggcagcacccccugcaacgggguggagggcuucaacugcuacuucccccugcaguccuacggguuccagccgaccaacggcgugggguaccagcccuaccggguggugguccugagcuucgagcuccugcacgcccccgccacggugugcggccccaagaaguccaccaaccuggugaagaacaagugcgucaacuucaacuucaacggccucaccgggaccggcgugcugaccgagagcaacaagaaguuccugccguuccagcaguucgggcgcgacaucgccgacacgaccgacgcggugcgcgacccccagacccuggagauccucgacaucacccccugcagcuucggcggggucuccgugaucacgccgggcaccaacaccagcaaccagguggccguccuguaccagggcgugaacugcaccgaggugcccgucgccauccacgccgaccagcugacgcccaccuggcggguguacuccaccgggagcaacguguuccagacccgcgccggcugccucaucggggcggagcacgucaacaacuccuacgagugcgacauccccaucggcgccggcaucugcgccagcuaccagacgcagaccaacuccccgcggcgcgcccggagcguggcgucccagagcgugaucgccuacaccaugucccugggggccgagaacagcgucgccuacuccaacaacagcaucgccauccccaccaacuucacgaucuccgugaccaccgagauccugcccgugagcaugaccaagacgagcgucgacugcaccauguacaucugcggcgacuccaccgagugcagcaaccuccugcugcaguacggguccuucugcacccagcucaaccgcgcgcugacgggcaucgccguggagcaggacaagaacacccaggagguguucgcccaggucaagcagaucuacaagacgcccccgaucaaggacuucgggggcuucaacuucagccagauccugcccgaccccuccaagcccagcaagcgguccuucaucgaggaccuccuguucaacaaggugacccuggccgacgccggcuucaucaagcaguacggggacugccucggcgacaucgcggcccgcgaccugaucugcgcccagaaguucaacgggcugaccgugcucccgccccugcugaccgacgagaugaucgcccaguacaccagcgcccuccuggcgggcaccaucacguccggguggaccuucggcgccggcgccgcccugcagauccccuucgcgaugcagauggccuaccgguucaacgggaucggcgucacccagaacgugcucuacgagaaccagaagcugaucgccaaccaguucaacagcgccaucgggaagauccaggacucccugagcuccaccgccagcgcgcucggcaagcugcaggacguggucaaccagaacgcccaggcccugaacacgcucgugaagcagcuguccagcaacuucggggccaucuccagcgugcugaacgacauccucucccgccuggacccgcccgaggccgagguccagaucgaccggcugaucaccggccgccuccagagccugcagaccuacgugacccagcagcugauccgggcggccgagauccgcgccagcgccaaccucgccgcgaccaagauguccgagugcgugcugggccagagcaagcgggucgacuucugcgggaagggcuaccaccugauguccuucccccagagcgcgccccacggggugguguuccuccacgucacguacgugcccgcccaggagaagaacuucaccaccgccccggccaucugccacgacggcaaggcccacuucccccgcgagggggucuucguguccaacggcacccacugguucgugacgcagcggaacuucuacgagccccagaucaucaccaccgacaacaccuucgucagcggcaacugcgacguggugaucgggaucgucaacaacacgguguacgacccccugcagccggagcuggacuccuucaaggaggagcucgacaaguacuucaagaaccacaccagccccgacguggaccugggcgacaucuccgggaucaacgccagcgucgugaacauccagaaggagaucgaccgccugaacgagguggccaagaaccucaacgagucccugaucgaccugcaggagcucggcaaguacgagcaguacaucaaguggcccugguacaucuggcugggcuucaucgccgggcugaucgcgaucgucaucgugaccaucaugcucugcugcaugaccagcugcugcuccugccugaagggcugcugcagcugcggguccugcugcaaguucgacgaggacgacagcgagccggugcugaagggcgucaagcuccacuacacgugaggacuaguuauaagacugacuagcccgaugggccucccaacgggcccuccuccccuccuugcaccgagauuaaucaaaggcucuuuucagagccaccaaaaaaaaaaaaaaaaaaaaaaaaaaaaaaaaaaaaaaaaaaaaaaaaaaaaaaaaaaaaaaaaaaaaaaaaaaaaaaaaaaaaaaaaaaaaaaaaaaaaa

SEQ ID NO: 24207 - RNA, 4026 nt, Artificial Sequence
  SARS-CoV-2/Wuhan/WIV05/2019__EPI_ISL_402128 spike protein mRNA gc (1-1273)(K986P_V987P_K986P_V987P_H69del_V70del_Y144del_N501Y_A570 D_D614G_P681H_T716I_S982A_D1118H)
aggagaaagcuuaccauguucguguuccugguccuccugccccuggugagcucccagugcgugaaccucaccacccgcacgcagcugccgcccgccuacaccaacagcuucacccggggcgucuacuaccccgacaagguguuccgcuccagcgugcugcacuccacccaggaccucuuccugcccuucuucagcaacgucacgugguuccacgccaucuccgggaccaacggcaccaagcgguucgacaacccggugcugcccuucaacgacgggguguacuucgcgagcaccgagaaguccaacaucauccgcggcuggaucuucgggacgacccucgacagcaagacccagucccugcugaucgucaacaacgccaccaacguggugaucaaggucugcgaguuccaguucugcaacgaccccuuccucggcguguaccacaagaacaacaagagcuggauggaguccgaguuccggguguacagcuccgccaacaacugcacguucgaguacgucagccagcccuuccugauggaccuggagggcaagcaggggaacuucaagaaccuccgcgaguucguguucaagaacaucgacggcuacuucaagaucuacuccaagcacaccccgaucaaccuggugcgggaccugccccagggguucagcgcccucgagccccuggucgaccugcccaucggcaucaacaucacccgcuuccagacccuccuggcccugcaccgguccuaccucacgccgggggacagcagcuccggcuggaccgcgggcgccgccgccuacuacgugggguaccugcagccccgcaccuuccugcucaaguacaacgagaacggcaccaucacggacgcgguggacugcgcccuggacccccugagcgagaccaagugcacccucaaguccuucaccgucgagaaggggaucuaccagacgagcaacuuccgggugcagcccaccgaguccaucgugcgcuucccgaacaucaccaaccugugccccuucggcgaggucuucaacgccacccgguucgccagcguguacgccuggaaccgcaagcggaucuccaacugcgucgcggacuacagcgugcuguacaacuccgccagcuucuccacguucaagugcuacggcgugagccccaccaagcucaacgaccugugcuucaccaacgucuacgccgacuccuucgugauccgcggggacgaggugcggcagaucgcccccggccagaccgggaagaucgccgacuacaacuacaagcugccggacgacuucacgggcugcgucaucgcguggaacagcaacaaccucgacuccaaggucgggggcaacuacaacuaccuguaccgccuguuccgcaagagcaaccucaagcccuucgagcgggacaucuccaccgagaucuaccaggccggcagcacccccugcaacgggguggagggcuucaacugcuacuucccccugcaguccuacggguuccagccgaccuacggcgugggguaccagcccuaccggguggugguccugagcuucgagcuccugcacgcccccgccacggugugcggccccaagaaguccaccaaccuggugaagaacaagugcgucaacuucaacuucaacggccucaccgggaccggcgugcugaccgagagcaacaagaaguuccugccguuccagcaguucgggcgcgacaucgacgacacgaccgacgccgugcgcgacccccagacccuggagauccucgacaucacccccugcagcuucggcggggucuccgugaucacgccgggcaccaacaccagcaaccagguggcgguccuguaccagggcgugaacugcaccgaggugcccgucgccauccacgccgaccagcugacgcccaccuggcggguguacuccaccgggagcaacguguuccagacccgcgccggcugccucaucggggccgagcacgucaacaacuccuacgagugcgacauccccaucggcgcgggcaucugcgccagcuaccagacgcagaccaacucccaccggcgcgcccggagcguggccucccagagcaucaucgcguacaccaugucccugggggccgagaacagcguggccuacuccaacaacagcaucgccaucccgaucaacuucaccaucuccgucacgaccgagauccugcccgugagcaugaccaagaccagcguggacugcacgauguacaucugcggcgacuccaccgagugcagcaaccuccugcugcaguacggguccuucugcacccagcucaaccgcgcccugaccggcaucgcggucgagcaggacaagaacacgcaggagguguucgcccaggugaagcagaucuacaagaccccgcccaucaaggacuucgggggcuucaacuucagccagauccugcccgaccccuccaagcccagcaagcgguccuucaucgaggaccuccuguucaacaaggucacccuggccgacgccggcuucaucaagcaguacggggacugccucggcgacaucgccgcgcgcgaccugaucugcgcccagaaguucaacgggcugaccgugcugcccccgcuccugacggacgagaugaucgcccaguacaccagcgcccuccuggccggcaccaucaccuccggguggacguucggcgcgggcgccgcccugcagauccccuucgccaugcagauggcguaccgguucaacgggaucggcgugacccagaacguccucuacgagaaccagaagcugaucgccaaccaguucaacagcgccaucgggaagauccaggacucccugagcuccaccgccagcgcccucggcaagcugcaggacguggugaaccagaacgcgcaggcccugaacacccucgucaagcagcuguccagcaacuucggggccaucuccagcgugcugaacgacauccucgcccgccuggacccgcccgaggccgaggugcagaucgaccggcugaucacgggccgccuccagucccugcagaccuacgucacccagcagcugauccgggcggccgagauccgcgccagcgccaaccucgccgcgaccaagaugagcgagugcgugcugggccaguccaagcggguggacuucugcgggaagggcuaccaccugaugagcuucccccaguccgcgccccacggggucguguuccuccacgugaccuacguccccgcccaggagaagaacuucacgaccgcccccgccaucugccacgacggcaaggcccacuucccgcgcgaggggguguucgucagcaacggcacccacugguucgugacccagcggaacuucuacgagccccagaucaucacgacccacaacaccuucguguccggcaacugcgacgucgugaucgggaucgugaacaacaccgucuacgacccccugcagcccgagcuggacagcuucaaggaggagcucgacaaguacuucaagaaccacacguccccggacguggaccugggcgacaucagcgggaucaacgccuccguggucaacauccagaaggagaucgaccgccugaacgagguggccaagaaccucaacgagagccugaucgaccugcaggagcucggcaaguacgagcaguacaucaaguggcccugguacaucuggcugggcuucaucgccgggcugaucgcgaucgugauggucaccaucaugcucugcugcaugaccuccugcugcagcugccugaagggcugcugcuccugcgggagcugcugcaaguucgacgaggacgacuccgagcccgugcugaagggcgugaagcuccacuacaccugaggacuaguuauaagacugacuagcccgaugggccucccaacgggcccuccuccccuccuugcaccgagauuaaucaaaggcucuuuucagagccaccaaaaaaaaaaaaaaaaaaaaaaaaaaaaaaaaaaaaaaaaaaaaaaaaaaaaaaaaaaaaaaaaaaaaaaaaaaaaaaaaaaaaaaaaaaaaaaaaaaaaa

SEQ ID NO: 24208 - RNA, 4035 nt, Artificial Sequence
  SARS-CoV-2/Wuhan/WIV05/2019__EPI_ISL_402128 spike protein mRNA gc (1-1273)(K986P_V987P_K986P_V987P_K417N_E484K_N501Y_D614G)
aggagaaagcuuaccauguucguguuccugguccuccugccccuggugagcucccagugcgugaaccucaccacccgcacgcagcugccgcccgccuacaccaacagcuucacccggggcgucuacuaccccgacaagguguuccgcuccagcgugcugcacuccacccaggaccucuuccugcccuucuucagcaacgucacgugguuccacgccauccacguguccgggaccaacggcaccaagcgguucgacaacccggugcugcccuucaacgacggggucuacuucgcgagcaccgagaaguccaacaucauccgcggcuggaucuucgggacgacccucgacagcaagacccagucccugcugaucgugaacaacgccaccaacguggucaucaaggugugcgaguuccaguucugcaacgaccccuuccucggcguguacuaccacaagaacaacaagagcuggauggaguccgaguuccgggucuacagcuccgccaacaacugcacguucgaguacgugagccagcccuuccugauggaccuggagggcaagcaggggaacuucaagaaccuccgcgaguucguguucaagaacaucgacggcuacuucaagaucuacuccaagcacaccccgaucaaccugguccgggaccugccccagggguucagcgcccucgagccccugguggaccugcccaucggcaucaacaucacccgcuuccagacccuccuggcccugcaccgguccuaccucacgccgggggacagcagcuccggcuggaccgcgggcgccgccgccuacuacgugggguaccugcagccccgcaccuuccugcucaaguacaacgagaacggcaccaucacggacgcggucgacugcgcccuggacccccugagcgagaccaagugcacccucaaguccuucaccguggagaaggggaucuaccagacgagcaacuuccgggugcagcccaccgaguccaucguccgcuucccgaacaucaccaaccugugccccuucggcgagguguucaacgccacccgguucgccagcgucuacgccuggaaccgcaagcggaucuccaacugcguggcggacuacagcgugcuguacaacuccgccagcuucuccacguucaagugcuacggcgucagccccaccaagcucaacgaccugugcuucaccaacguguacgccgacuccuucgugauccgcggggacgagguccggcagaucgcccccggccagaccgggaacaucgccgacuacaacuacaagcugccggacgacuucacgggcugcgugaucgcguggaacagcaacaaccucgacuccaaggucgggggcaacuacaacuaccuguaccgccuguuccgcaagagcaaccucaagcccuucgagcgggacaucuccaccgagaucuaccaggccggcagcacccccugcaacggggugaagggcuucaacugcuacuucccccugcaguccuacggguuccagccgaccuacggcgugggguaccagcccuaccggguggucgugcugagcuucgagcuccugcacgcccccgccacggugugcggccccaagaaguccaccaaccuggucaagaacaagugcgugaacuucaacuucaacggccucaccgggaccggcgugcugaccgagagcaacaagaaguuccugccguuccagcaguucgggcgcgacaucgccgacacgaccgacgcgguccgcgacccccagacccuggagauccucgacaucacccccugcagcuucggcgggguguccgugaucacgccgggcaccaacaccagcaaccaggucgccgugcuguaccagggcgugaacugcaccgagguccccguggccauccacgccgaccagcugacgcccaccuggcggguguacuccaccgggagcaacgucuuccagacccgcgccggcugccucaucggggcggagcacgugaacaacuccuacgagugcgacauccccaucggcgccggcaucugcgccagcuaccagacgcagaccaacuccccgcggcgcgcccggagcguggcgucccagagcaucaucgccuacaccaugucccugggggccgagaacagcgucgccuacuccaacaacagcaucgccauccccaccaacuucacgaucuccgugaccaccgagauccugcccgugagcaugaccaagacgagcgucgacugcaccauguacaucugcggcgacuccaccgagugcagcaaccuccugcugcaguacggguccuucugcacccagcucaaccgcgcgcugacgggcaucgccguggagcaggacaagaacacccaggagguguucgcccaggucaagcagaucuacaagacgcccccgaucaaggacuucgggggcuucaacuucagccagauccugcccgaccccuccaagcccagcaagcgguccuucaucgaggaccuccuguucaacaaggugacccuggccgacgccggcuucaucaagcaguacggggacugccucggcgacaucgcggcccgcgaccugaucugcgcccagaaguucaacgggcugaccgugcucccgccccugcugaccgacgagaugaucgcccaguacaccagcgcccuccuggcgggcaccaucacguccggguggaccuucggcgccggcgccgcccugcagauccccuucgcgaugcagauggccuaccgguucaacgggaucggcgucacccagaacgugcucuacgagaaccagaagcugaucgccaaccaguucaacagcgccaucgggaagauccaggacucccugagcuccaccgccagcgcgcucggcaagcugcaggacguggucaaccagaacgcccaggcccugaacacgcucgugaagcagcuguccagcaacuucggggccaucuccagcgugcugaacgacauccucucccgccuggacccgcccgaggccgagguccagaucgaccggcugaucaccggccgccuccagagccugcagaccuacgugacccagcagcugauccgggcggccgagauccgcgccagcgccaaccucgccgcgaccaagauguccgagugcgugcugggccagagcaagcgggucgacuucugcgggaagggcuaccaccugauguccuucccccagagcgcgccccacggggugguguuccuccacgucacguacgugcccgcccaggagaagaacuucaccaccgccccggccaucugccacgacggcaaggcccacuucccccgcgagggggucuucguguccaacggcacccacugguucgugacgcagcggaacuucuacgagccccagaucaucaccaccgacaacaccuucgucagcggcaacugcgacguggugaucgggaucgucaacaacacgguguacgacccccugcagccggagcuggacuccuucaaggaggagcucgacaaguacuucaagaaccacaccagccccgacguggaccugggcgacaucuccgggaucaacgccagcgucgugaacauccagaaggagaucgaccgccugaacgagguggccaagaaccucaacgagucccugaucgaccugcaggagcucggcaaguacgagcaguacaucaaguggcccugguacaucuggcugggcuucaucgccgggcugaucgcgaucgucauggugaccaucaugcucugcugcaugaccagcugcugcuccugccugaagggcugcugcagcugcggguccugcugcaaguucgacgaggacgacagcgagccggugcugaagggcgucaagcuccacuacacgugaggacuaguuauaagacugacuagcccgaugggccucccaacgggcccuccuccccuccuugcaccgagauuaaucaaaggcucuuuucagagccaccaaaaaaaaaaaaaaaaaaaaaaaaaaaaaaaaaaaaaaaaaaaaaaaaaaaaaaaaaaaaaaaaaaaaaaaaaaaaaaaaaaaaaaaaaaaaaaaaaaaaa

SEQ ID NO: 24209 - RNA, 4026 nt, Artificial Sequence
  SARS-CoV-2/Wuhan/WIV05/2019__EPI_ISL_402128 spike protein mRNA gc (1-1273)(K986P_V987P_K986P_V987P_L18F_D80A_D215G_L242del_A243del_ L244del_R246I_K417N_E484K_N501Y_D614G_A701V)
aggagaaagcuuaccauguucguguuccugguccuccugccccuggugagcucccagugcgugaacuucaccacccgcacgcagcucccgcccgccuacaccaacagcuucacccggggcgucuacuaccccgacaagguguuccgcuccagcgugcugcacuccacccaggaccuguuccuccccuucuucagcaacgucacgugguuccacgccauccacguguccgggaccaacggcaccaagcgguucgcgaacccggugcugcccuucaacgacggggucuacuucgccagcaccgagaaguccaacaucauccgcggcuggaucuucgggacgacccuggacagcaagacccagucccuccugaucgugaacaacgccaccaacguggucaucaaggugugcgaguuccaguucugcaacgaccccuuccugggcguguacuaccacaagaacaacaagagcuggauggaguccgaguuccgggucuacagcuccgccaacaacugcacguucgaguacgugagccagcccuuccucauggaccuggagggcaagcaggggaacuucaagaaccugcgcgaguucguguucaagaacaucgacggcuacuucaagaucuacuccaagcacaccccgaucaaccucguccgggggcugccccagggcuucagcgcccuggagccccucguggaccugcccaucgggaucaacaucacccgcuuccagacccugcacaucuccuaccucacgccgggcgacagcagcuccggcuggaccgcgggggccgccgccuacuacgugggcuaccugcagccccggaccuuccugcucaaguacaacgagaacgggaccaucacggacgcggucgacugcgcccuggacccccugagcgagaccaagugcacccucaaguccuucaccguggagaagggcaucuaccagacgagcaacuuccgcgugcagcccaccgaguccaucguccgguucccgaacaucaccaaccugugccccuucggcgagguguucaacgccacccgcuucgccagcgucuacgccuggaaccggaagcgcaucuccaacugcguggcggacuacagcgugcuguacaacuccgccagcuucuccacguucaagugcuacggggucagccccaccaagcucaacgaccugugcuucaccaacguguacgccgacuccuucgugauccggggcgacgagguccgccagaucgcccccgggcagaccggcaacaucgccgacuacaacuacaagcugccggacgacuucacggggugcgugaucgcguggaacagcaacaaccucgacuccaaggugggcggcaacuacaacuaccuguaccggcuguuccgcaagagcaaccucaagcccuucgagcgggacaucuccaccgagaucuaccaggccgggagcacccccugcaacggcgucaagggguucaacugcuacuucccccugcaguccuacggcuuccagccgaccuacggggugggcuaccagcccuaccgcguggucgugcugagcuucgagcuccugcacgcccccgccacggugugcggccccaagaaguccaccaaccuggucaagaacaagugcgugaacuucaacuucaacgggcucaccggcaccggggugcugaccgagagcaacaagaaguuccugccguuccagcaguucggccgggacaucgccgacacgaccgacgcgguccgcgacccccagacccucgagauccuggacaucacccccugcagcuucgggggcguguccgugaucacgccgggcaccaacaccagcaaccaggucgccgugcuguaccagggggugaacugcaccgagguccccguggccauccacgccgaccagcugacgcccaccuggcgcguguacuccaccggcagcaacgucuuccagacccgggccgggugccucaucggcgcggagcacgugaacaacuccuacgagugcgacauccccaucggcgccgggaucugcgccagcuaccagacgcagaccaacuccccgcgccgggcccgcagcguggcgucccagagcaucaucgccuacaccaugucccugggcgucgagaacagcguggccuacuccaacaacagcaucgccauccccaccaacuucacgaucuccgugaccaccgagauccugcccgucagcaugaccaagacgagcguggacugcaccauguacaucugcggggacuccaccgagugcagcaaccuccugcugcaguacggcuccuucugcacccagcucaaccgggcccugacggggaucgcgguggagcaggacaagaacacccaggaggucuucgcccaggugaagcagaucuacaagacgcccccgaucaaggacuucggcggcuucaacuucagccagauccugcccgaccccuccaagcccagcaagcgcuccuucaucgaggaccuccuguucaacaaggugacccuggccgacgccggguucaucaagcaguacggcgacugccucggggacaucgccgcgcgggaccugaucugcgcccagaaguucaacggccugaccguccucccgccccugcugaccgacgagaugaucgcccaguacaccagcgcccuccuggccgggaccaucacguccggcuggaccuucggcgcgggggccgcccugcagauccccuucgccaugcagauggcguaccgcuucaacggcaucggggugacccagaacgugcucuacgagaaccagaagcugaucgccaaccaguucaacagcgccaucggcaagauccaggacucccugagcuccaccgccagcgcccucgggaagcugcaggacgucgugaaccagaacgcgcaggcccugaacacgcucgugaagcagcuguccagcaacuucggcgccaucuccagcguccugaacgacauccucucccggcuggacccgcccgaggccgaggugcagaucgaccgccugaucaccggccggcuccagagccugcagaccuacgugacccagcagcugauccgcgccgcggagauccgggccagcgccaaccucgccgccaccaagauguccgagugcguccuggggcagagcaagcgcguggacuucugcggcaagggguaccaccugauguccuucccccagagcgcgccccacggcguggucuuccuccacgugacguacguccccgcccaggagaagaacuucaccaccgccccggccaucugccacgacgggaaggcgcacuucccccgggagggcguguucguguccaacggcacccacugguucgucacgcagcgcaacuucuacgagccccagaucaucaccaccgacaacaccuucgugagcgggaacugcgacguggucaucggcaucgugaacaacacgguguacgacccccugcagccggagcuggacuccuucaaggaggagcucgacaaguacuucaagaaccacaccagccccgacgucgaccugggggacaucuccggcaucaacgccagcguggugaacauccagaaggagaucgaccggcugaacgaggucgccaagaaccucaacgagucccugaucgaccugcaggagcucggcaaguacgagcaguacaucaaguggcccugguacaucuggcugggguucaucgccggccugaucgccaucgugauggugaccaucaugcucugcugcaugaccagcugcugcuccugccugaaggggugcugcagcugcggcuccugcugcaaguucgacgaggacgacagcgagccgguccugaagggggugaagcuccacuacacgugaggacuaguuauaagacugacuagcccgaugggccucccaacgggcccuccuccccuccuugcaccgagauuaaucaaaggcucuuuucagagccaccaaaaaaaaaaaaaaaaaaaaaaaaaaaaaaaaaaaaaaaaaaaaaaaaaaaaaaaaaaaaaaaaaaaaaaaaaaaaaaaaaaaaaaaaaaaaaaaaaaaaa

SEQ ID NO: 24210 - RNA, 4035 nt, Artificial Sequence
  SARS-CoV-2/Wuhan/WIV05/2019__EPI_ISL_402128 spike protein mRNA gc (1-1273)(K986P_V987P_K986P_V987P_E484K_D614G)
aggagaaagcuuaccauguucguguuccugguccuccugccccuggugagcucccagugcgugaaccucaccacccgcacgcagcugccgcccgccuacaccaacagcuucacccggggcgucuacuaccccgacaagguguuccgcuccagcgugcugcacuccacccaggaccucuuccugcccuucuucagcaacgucacgugguuccacgccauccacguguccgggaccaacggcaccaagcgguucgacaacccggugcugcccuucaacgacggggucuacuucgcgagcaccgagaaguccaacaucauccgcggcuggaucuucgggacgacccucgacagcaagacccagucccugcugaucgugaacaacgccaccaacguggucaucaaggugugcgaguuccaguucugcaacgaccccuuccucggcguguacuaccacaagaacaacaagagcuggauggaguccgaguuccgggucuacagcuccgccaacaacugcacguucgaguacgugagccagcccuuccugauggaccuggagggcaagcaggggaacuucaagaaccuccgcgaguucguguucaagaacaucgacggcuacuucaagaucuacuccaagcacaccccgaucaaccugguccgggaccugccccagggguucagcgcccucgagccccugguggaccugcccaucggcaucaacaucacccgcuuccagacccuccuggcccugcaccgguccuaccucacgccgggggacagcagcuccggcuggaccgcgggcgccgccgccuacuacgugggguaccugcagccccgcaccuuccugcucaaguacaacgagaacggcaccaucacggacgcggucgacugcgcccuggacccccugagcgagaccaagugcacccucaaguccuucaccguggagaaggggaucuaccagacgagcaacuuccgggugcagcccaccgaguccaucguccgcuucccgaacaucaccaaccugugccccuucggcgagguguucaacgccacccgguucgccagcgucuacgccuggaaccgcaagcggaucuccaacugcguggcggacuacagcgugcuguacaacuccgccagcuucuccacguucaagugcuacggcgucagccccaccaagcucaacgaccugugcuucaccaacguguacgccgacuccuucgugauccgcggggacgagguccggcagaucgcccccggccagaccgggaagaucgccgacuacaacuacaagcugccggacgacuucacgggcugcgugaucgcguggaacagcaacaaccucgacuccaaggucgggggcaacuacaacuaccuguaccgccuguuccgcaagagcaaccucaagcccuucgagcgggacaucuccaccgagaucuaccaggccggcagcacccccugcaacggggugaagggcuucaacugcuacuucccccugcaguccuacggguuccagccgaccaacggcgugggguaccagcccuaccggguggucgugcugagcuucgagcuccugcacgcccccgccacggugugcggccccaagaaguccaccaaccuggucaagaacaagugcgugaacuucaacuucaacggccucaccgggaccggcgugcugaccgagagcaacaagaaguuccugccguuccagcaguucgggcgcgacaucgccgacacgaccgacgcgguccgcgacccccagacccuggagauccucgacaucacccccugcagcuucggcgggguguccgugaucacgccgggcaccaacaccagcaaccaggucgccgugcuguaccagggcgugaacugcaccgagguccccguggccauccacgccgaccagcugacgcccaccuggcggguguacuccaccgggagcaacgucuuccagacccgcgccggcugccucaucggggcggagcacgugaacaacuccuacgagugcgacauccccaucggcgccggcaucugcgccagcuaccagacgcagaccaacuccccgcggcgcgcccggagcguggcgucccagagcaucaucgccuacaccaugucccugggggccgagaacagcgucgccuacuccaacaacagcaucgccauccccaccaacuucacgaucuccgugaccaccgagauccugcccgugagcaugaccaagacgagcgucgacugcaccauguacaucugcggcgacuccaccgagugcagcaaccuccugcugcaguacggguccuucugcacccagcucaaccgcgcgcugacgggcaucgccguggagcaggacaagaacacccaggagguguucgcccaggucaagcagaucuacaagacgcccccgaucaaggacuucgggggcuucaacuucagccagauccugcccgaccccuccaagcccagcaagcgguccuucaucgaggaccuccuguucaacaaggugacccuggccgacgccggcuucaucaagcaguacggggacugccucggcgacaucgcggcccgcgaccugaucugcgcccagaaguucaacgggcugaccgugcucccgccccugcugaccgacgagaugaucgcccaguacaccagcgcccuccuggcgggcaccaucacguccggguggaccuucggcgccggcgccgcccugcagauccccuucgcgaugcagauggccuaccgguucaacgggaucggcgucacccagaacgugcucuacgagaaccagaagcugaucgccaaccaguucaacagcgccaucgggaagauccaggacucccugagcuccaccgccagcgcgcucggcaagcugcaggacguggucaaccagaacgcccaggcccugaacacgcucgugaagcagcuguccagcaacuucggggccaucuccagcgugcugaacgacauccucucccgccuggacccgcccgaggccgagguccagaucgaccggcugaucaccggccgccuccagagccugcagaccuacgugacccagcagcugauccgggcggccgagauccgcgccagcgccaaccucgccgcgaccaagauguccgagugcgugcugggccagagcaagcgggucgacuucugcgggaagggcuaccaccugauguccuucccccagagcgcgccccacggggugguguuccuccacgucacguacgugcccgcccaggagaagaacuucaccaccgccccggccaucugccacgacggcaaggcccacuucccccgcgagggggucuucguguccaacggcacccacugguucgugacgcagcggaacuucuacgagccccagaucaucaccaccgacaacaccuucgucagcggcaacugcgacguggugaucgggaucgucaacaacacgguguacgacccccugcagccggagcuggacuccuucaaggaggagcucgacaaguacuucaagaaccacaccagccccgacguggaccugggcgacaucuccgggaucaacgccagcgucgugaacauccagaaggagaucgaccgccugaacgagguggccaagaaccucaacgagucccugaucgaccugcaggagcucggcaaguacgagcaguacaucaaguggcccugguacaucuggcugggcuucaucgccgggcugaucgcgaucgucauggugaccaucaugcucugcugcaugaccagcugcugcuccugccugaagggcugcugcagcugcggguccugcugcaaguucgacgaggacgacagcgagccggugcugaagggcgucaagcuccacuacacgugaggacuaguuauaagacugacuagcccgaugggccucccaacgggcccuccuccccuccuugcaccgagauuaaucaaaggcucuuuucagagccaccaaaaaaaaaaaaaaaaaaaaaaaaaaaaaaaaaaaaaaaaaaaaaaaaaaaaaaaaaaaaaaaaaaaaaaaaaaaaaaaaaaaaaaaaaaaaaaaaaaaaa

SEQ ID NO: 24211 - RNA, 4035 nt, Artificial Sequence
  SARS-CoV-2/Wuhan/WIV05/2019__EPI_ISL_402128 spike protein mRNA gc (1-1273)(K986P_V987P_K986P_V987P_L18F_T20N_P26S_D138Y_R190S_K417T _E484K_N501Y_D614G_H655Y_T1027I)
aggagaaagcuuaccauguucguguuccugguccuccugccccuggugagcucccagugcgugaacuucaccaaccgcacccagcucccgagcgccuacacgaacuccuucacccggggcgucuacuaccccgacaagguguuccgcagcuccgugcugcacagcacccaggaccuguuccuccccuucuucuccaacgucaccugguuccacgccauccacgugagcgggacgaacggcaccaagcgguucgacaaccccgugcugccguucaacgacggggucuacuucgcguccaccgagaaguccaacaucauccgcggcuggaucuucgggaccacgcuggacuccaagacccagagccuccugaucgugaacaacgccaccaacguggucaucaaggugugcgaguuccaguucugcaacuaccccuuccugggcguguacuaccacaagaacaacaaguccuggauggagagcgaguuccgggucuacuccagcgccaacaacugcaccuucgaguacgugucccagcccuuccucauggaccuggagggcaagcaggggaacuucaagaaccugagcgaguucguguucaagaacaucgacggcuacuucaagaucuacuccaagcacacgcccaucaaccucguccgcgaccugccgcagggguucagcgcccuggagccccucguggaccugcccaucggcaucaacaucacccgguuccagacccugcucgcccugcaccgcagcuaccugacccccggggacuccagcuccggcuggacggcgggcgccgccgccuacuacgugggguaccuccagccgcggaccuuccugcugaaguacaacgagaacggcaccaucaccgacgcggucgacugcgcccucgacccccugagcgagacgaagugcacccugaaguccuucaccguggagaaggggaucuaccagaccagcaacuuccgcgugcagcccacggaguccaucguccgguuccccaacaucaccaaccucugcccguucggcgagguguucaacgccacccgcuucgccagcgucuacgccuggaaccggaagcgcaucuccaacugcguggcggacuacagcgugcuguacaacuccgccagcuucuccaccuucaagugcuacggcgucagccccacgaagcugaacgaccucugcuucaccaacguguacgccgacuccuucgugauccgcggggacgagguccggcagaucgcccccggccagaccgggaccaucgccgacuacaacuacaagcugcccgacgacuucacgggcugcgugaucgcguggaacagcaacaaccuggacuccaaggucgggggcaacuacaacuaccucuaccggcuguuccgcaagagcaaccugaagccguucgagcgggacaucuccaccgagaucuaccaggccggcagcacccccugcaacggggugaagggcuucaacugcuacuucccccuccagagcuacggguuccagcccaccuacggcgugggguaccagccguaccgcguggucgugcuguccuucgagcugcuccacgcccccgccacggugugcggccccaagaaguccaccaaccuggucaagaacaagugcgugaacuucaacuucaacggccugaccgggaccggcgugcucaccgagagcaacaagaaguuccugcccuuccagcaguucgggcgggacaucgccgacacgaccgacgcgguccgcgacccgcagacccuggagauccuggacaucacccccugcagcuucggcgggguguccgugaucacgcccggcaccaacaccagcaaccaggucgccgugcucuaccagggcgugaacugcaccgaggucccgguggccauccacgccgaccagcugacgcccaccuggcgcguguacuccaccgggagcaacgucuuccagacccgggccggcugccugaucggggcggaguacgugaacaacuccuacgagugcgacauccccaucggcgccggcaucugcgccagcuaccagacgcagaccaacagcccccgccgggcccgcagcguggcgucccagagcaucaucgccuacaccaugucccucggggccgagaacagcgucgccuacuccaacaacagcaucgccaucccgaccaacuucacgaucagcgugaccaccgagauccugcccguguccaugaccaagacgagcgucgacugcaccauguacaucugcggcgacuccaccgagugcagcaaccugcuccugcaguacggguccuucugcacccagcugaaccgggcgcucacgggcaucgccguggagcaggacaagaacacccaggagguguucgcccaggucaagcagaucuacaagaccccgcccaucaaggacuucgggggcuucaacuucagccagauccugcccgaccccuccaagcccagcaagcgcuccuucaucgaggaccuccuguucaacaaggugacccuggccgacgccggcuucaucaagcaguacggggacugccugggcgacaucgcggcccgggaccucaucugcgcccagaaguucaacgggcugacggugcugcccccgcuccugaccgacgagaugaucgcccaguacaccagcgcccugcucgcgggcaccaucacguccggguggaccuucggcgccggcgccgcccugcagauccccuucgcgaugcagauggccuaccgcuucaacgggaucggcgucacccagaacgugcuguacgagaaccagaagcucaucgccaaccaguucaacagcgccaucgggaagauccaggacucccugagcuccaccgccagcgcgcugggcaagcuccaggacguggucaaccagaacgcccaggcccugaacacgcuggugaagcagcucuccagcaacuucggggccaucuccagcgugcugaacgacauccugagccggcucgacccgcccgaggccgagguccagaucgaccgccugaucaccggccggcugcagucccuccagaccuacgugacccagcagcugauccgcgcggccgagauccgggccagcgccaaccuggccgcgaucaagauguccgagugcgugcucggccagagcaagcgcgucgacuucugcgggaagggcuaccaccugauguccuucccccagagcgcgccccacggggugguguuccugcacgucaccuacgugcccgcccaggagaagaacuucacgaccgcccccgccaucugccacgacggcaaggcccacuucccgcgggagggggucuucguguccaacggcacccacugguucgugacccagcgcaacuucuacgagccccagaucaucacgaccgacaacaccuucgucagcggcaacugcgacguggugaucgggaucgucaacaacaccguguacgacccccuccagcccgagcuggacuccuucaaggaggagcuggacaaguacuucaagaaccacacgagcccggacguggaccucggcgacaucuccgggaucaacgccagcgucgugaacauccagaaggagaucgaccggcugaacgagguggccaagaaccugaacgagucccucaucgaccugcaggagcugggcaaguacgagcaguacaucaaguggcccugguacaucuggcucggcuucaucgccgggcugaucgcgaucgucauggugaccaucaugcugugcugcaugaccagcugcugcuccugccucaagggcugcugcagcugcggguccugcugcaaguucgacgaggacgacagcgagcccgugcugaagggcgucaagcugcacuacaccugaggacuaguuauaagacugacuagcccgaugggccucccaacgggcccuccuccccuccuugcaccgagauuaaucaaaggcucuuuucagagccaccaaaaaaaaaaaaaaaaaaaaaaaaaaaaaaaaaaaaaaaaaaaaaaaaaaaaaaaaaaaaaaaaaaaaaaaaaaaaaaaaaaaaaaaaaaaaaaaaaaaaa

SEQ ID NO: 24212 - RNA, 4035 nt, Artificial Sequence
  SARS-CoV-2/Wuhan/WIV05/2019__EPI_ISL_402128 spike protein mRNA gc (1-1273)(K986P_V987P_K986P_V987P_S13I_W152C_L452R_D614G)
aggagaaagcuuaccauguucguguuccugguccuccugccccuggugagcauccagugcgugaaccucaccacccgcacgcagcugccgcccgccuacaccaacuccuucacccggggcgucuacuaccccgacaagguguuccgcagcuccgugcugcacagcacccaggaccucuuccugcccuucuucuccaacgucacgugguuccacgccauccacgugagcgggaccaacggcaccaagcgguucgacaacccggugcugcccuucaacgacggggucuacuucgcguccaccgagaaguccaacaucauccgcggcuggaucuucgggacgacccucgacagcaagacccagagccugcugaucgugaacaacgccaccaacguggucaucaaggugugcgaguuccaguucugcaacgaccccuuccucggcguguacuaccacaagaacaacaaguccugcauggagagcgaguuccgggucuacuccagcgccaacaacugcacguucgaguacgugucccagcccuuccugauggaccuggagggcaagcaggggaacuucaagaaccuccgcgaguucguguucaagaacaucgacggcuacuucaagaucuacagcaagcacaccccgaucaaccugguccgggaccugccccagggguucuccgcccucgagccccugguggaccugcccaucggcaucaacaucacccgcuuccagacccuccuggcccugcaccggagcuaccucacgccgggggacuccagcagcggcuggaccgcgggcgccgccgccuacuacgugggguaccugcagccccgcaccuuccugcucaaguacaacgagaacggcaccaucacggacgcggucgacugcgcccuggacccccuguccgagaccaagugcacccucaagagcuucaccguggagaaggggaucuaccagacguccaacuuccgggugcagcccaccgagagcaucguccgcuucccgaacaucaccaaccugugccccuucggcgagguguucaacgccacccgguucgccuccgucuacgccuggaaccgcaagcggaucagcaacugcguggcggacuacuccgugcuguacaacagcgccuccuucagcacguucaagugcuacggcgucucccccaccaagcucaacgaccugugcuucaccaacguguacgccgacagcuucgugauccgcggggacgagguccggcagaucgcccccggccagaccgggaagaucgccgacuacaacuacaagcugccggacgacuucacgggcugcgugaucgcguggaacuccaacaaccucgacagcaaggucgggggcaacuacaacuaccgcuaccggcuguuccgcaaguccaaccugaagcccuucgagcgggacaucagcaccgagaucuaccaggccggcuccacccccugcaacgggguggagggcuucaacugcuacuucccccuccagagcuacggguuccagccgaccaacggcgugggguaccagcccuaccgcguggucgugcuguccuucgagcugcuccacgcccccgccacggugugcggccccaagaaguccaccaaccuggucaagaacaagugcgugaacuucaacuucaacggccugaccgggaccggcgugcucaccgagagcaacaagaaguuccugccguuccagcaguucgggcgcgacaucgccgacacgaccgacgcgguccgggacccccagacccuggagauccuggacaucacccccugcagcuucggcggggugagcgugaucacgccgggcaccaacaccuccaaccaggucgccgugcucuaccagggcgugaacugcaccgagguccccguggccauccacgccgaccagcugacgcccaccuggcgcguguacagcaccggguccaacgucuuccagacccgggccggcugccugaucggggcggagcacgugaacaacagcuacgagugcgacauccccaucggcgccggcaucugcgccuccuaccagacgcagaccaacagcccgcgccgggcccgcuccguggcgagccaguccaucaucgccuacaccaugagccucggggccgagaacuccgucgccuacagcaacaacuccaucgccauccccaccaacuucacgaucagcgugaccaccgagauccugcccguguccaugaccaagacgagcgucgacugcaccauguacaucugcggcgacagcaccgagugcuccaaccugcuccugcaguacgggagcuucugcacccagcugaaccgggcgcucacgggcaucgccguggagcaggacaagaacacccaggagguguucgcccaggucaagcagaucuacaagacgcccccgaucaaggacuucgggggcuucaacuucucccagauccugcccgaccccagcaagcccuccaagcgcagcuucaucgaggaccuccuguucaacaaggugacccuggccgacgccggcuucaucaagcaguacggggacugccugggcgacaucgcggcccgggaccucaucugcgcccagaaguucaacgggcugaccgugcugccgccccuccugaccgacgagaugaucgcccaguacaccuccgcccugcucgcgggcaccaucacgagcggguggaccuucggcgccggcgccgcccugcagauccccuucgcgaugcagauggccuaccgcuucaacgggaucggcgucacccagaacgugcuguacgagaaccagaagcucaucgccaaccaguucaacuccgccaucgggaagauccaggacagccuguccagcaccgccuccgcgcugggcaagcuccaggacguggucaaccagaacgcccaggcccugaacacgcuggugaagcagcucagcuccaacuucggggccaucagcuccgugcugaacgacauccugagccggcucgacccgcccgaggccgagguccagaucgaccgccugaucaccggccggcugcagucccuccagaccuacgugacccagcagcugauccgcgcggccgagauccgggccagcgccaaccuggccgcgaccaagaugagcgagugcgugcucggccaguccaagcgcgucgacuucugcgggaagggcuaccaccugaugagcuucccccaguccgcgccccacggggugguguuccugcacgucacguacgugcccgcccaggagaagaacuucaccaccgccccggccaucugccacgacggcaaggcccacuucccccgggagggggucuucgugagcaacggcacccacugguucgugacgcagcgcaacuucuacgagccccagaucaucaccaccgacaacaccuucgucuccggcaacugcgacguggugaucgggaucgucaacaacacgguguacgacccccuccagccggagcuggacagcuucaaggaggagcuggacaaguacuucaagaaccacaccucccccgacguggaccucggcgacaucagcgggaucaacgccuccgucgugaacauccagaaggagaucgaccggcugaacgagguggccaagaaccugaacgagagccucaucgaccugcaggagcugggcaaguacgagcaguacaucaaguggcccugguacaucuggcucggcuucaucgccgggcugaucgcgaucgucauggugaccaucaugcugugcugcaugaccuccugcugcagcugccucaagggcugcugcuccugcgggagcugcugcaaguucgacgaggacgacuccgagccggugcugaagggcgucaagcugcacuacacgugaggacuaguuauaagacugacuagcccgaugggccucccaacgggcccuccuccccuccuugcaccgagauuaaucaaaggcucuuuucagagccaccaaaaaaaaaaaaaaaaaaaaaaaaaaaaaaaaaaaaaaaaaaaaaaaaaaaaaaaaaaaaaaaaaaaaaaaaaaaaaaaaaaaaaaaaaaaaaaaaaaaaa

SEQ ID NO: 24213 - RNA, 4035 nt, Artificial Sequence
  SARS-CoV-2/Wuhan/WIV05/2019__EPI_ISL_402128 spike protein mRNA gc (1-1273)(K986P_V987P)
aggagaaagcuuaccauguucguguuccuggugcugcugccccuggugagcagccagugcgugaaccugaccacccggacccagcugccaccagccuacaccaacagcuucacccggggcgucuacuaccccgacaagguguuccggagcagcguccugcacagcacccaggaccuguuccugcccuucuucagcaacgugaccugguuccacgccauccacgugagcggcaccaacggcaccaagcgguucgacaaccccgugcugcccuucaacgacggcguguacuucgccagcaccgagaagagcaacaucauccggggcuggaucuucggcaccacccuggacagcaagacccagagccugcugaucgugaauaacgccaccaacguggugaucaaggugugcgaguuccaguucugcaacgaccccuuccugggcguguacuaccacaagaacaacaagagcuggauggagagcgaguuccggguguacagcagcgccaacaacugcaccuucgaguacgugagccagcccuuccugauggaccuggagggcaagcagggcaacuucaagaaccugcgggaguucguguucaagaacaucgacggcuacuucaagaucuacagcaagcacaccccaaucaaccuggugcgggaucugccccagggcuucucagcccuggagccccugguggaccugcccaucggcaucaacaucacccgguuccagacccugcuggcccugcaccggagcuaccugaccccaggcgacagcagcagcggguggacagcaggcgcggcugcuuacuacgugggcuaccugcagccccggaccuuccugcugaaguacaacgagaacggcaccaucaccgacgccguggacugcgcccuggacccucugagcgagaccaagugcacccugaagagcuucaccguggagaagggcaucuaccagaccagcaacuuccgggugcagcccaccgagagcaucgugcgguuccccaacaucaccaaccugugccccuucggcgagguguucaacgccacccgguucgccagcguguacgccuggaaccggaagcggaucagcaacugcguggccgacuacagcgugcuguacaacagcgccagcuucagcaccuucaagugcuacggcgugagccccaccaagcugaacgaccugugcuucaccaacguguacgccgacagcuucgugauccguggcgacgaggugcggcagaucgcacccggccagacaggcaagaucgccgacuacaacuacaagcugcccgacgacuucaccggcugcgugaucgccuggaacagcaacaaccucgacagcaaggugggcggcaacuacaacuaccuguaccggcuguuccggaagagcaaccugaagcccuucgagcgggacaucagcaccgagaucuaccaagccggcuccaccccuugcaacggcguggagggcuucaacugcuacuucccucugcagagcuacggcuuccagcccaccaacggcgugggcuaccagcccuaccgggugguggugcugagcuucgagcugcugcacgccccagccaccguguguggccccaagaagagcaccaaccuggugaagaacaagugcgugaacuucaacuucaacggccuuaccggcaccggcgugcugaccgagagcaacaagaaauuccugcccuuucagcaguucggccgggacaucgccgacaccaccgacgcugugcgggauccccagacccuggagauccuggacaucaccccuugcagcuucggcggcgugagcgugaucaccccaggcaccaacaccagcaaccagguggccgugcuguaccaggacgugaacugcaccgaggugcccguggccauccacgccgaccagcugacacccaccuggcgggucuacagcaccggcagcaacguguuccagacccgggccgguugccugaucggcgccgagcacgugaacaacagcuacgagugcgacauccccaucggcgccggcaucugugccagcuaccagacccagaccaauucaccccggagggcaaggagcguggccagccagagcaucaucgccuacaccaugagccugggcgccgagaacagcguggccuacagcaacaacagcaucgccauccccaccaacuucaccaucagcgugaccaccgagauucugcccgugagcaugaccaagaccagcguggacugcaccauguacaucugcggcgacagcaccgagugcagcaaccugcugcugcaguacggcagcuucugcacccagcugaaccgggcccugaccggcaucgccguggagcaggacaagaacacccaggagguguucgcccaggugaagcagaucuacaagaccccucccaucaaggacuucggcggcuucaacuucagccagauccugcccgaccccagcaagcccagcaagcggagcuucaucgaggaccugcuguucaacaaggugacccuagccgacgccggcuucaucaagcaguacggcgacugccucggcgacauagccgcccgggaccugaucugcgcccagaaguucaacggccugaccgugcugccuccccugcugaccgacgagaugaucgcccaguacaccagcgcccuguuagccggaaccaucaccagcggcuggacuuucggcgcuggagccgcucugcagauccccuucgccaugcagauggccuaccgguucaacggcaucggcgugacccagaacgugcuguacgagaaccagaagcugaucgccaaccaguucaacagcgccaucggcaagauccaggacagccugagcagcaccgcuagcgcccugggcaagcugcaggacguggugaaccagaacgcccaggcccugaacacccuggugaagcagcugagcagcaacuucggcgccaucagcagcgugcugaacgacauccugagccggcuggacccucccgaggccgaggugcagaucgaccggcugaucacuggccggcugcagagccugcagaccuacgugacccagcagcugauccgggccgccgagauucgggccagcgccaaccuggccgccaccaagaugagcgagugcgugcugggccagagcaagcggguggacuucugcggcaagggcuaccaccugaugagcuuuccccagagcgcaccccacggagugguguuccugcacgugaccuacgugcccgcccaggagaagaacuucaccaccgccccagccaucugccacgacggcaaggcccacuuuccccgggagggcguguucgugagcaacggcacccacugguucgugacccagcggaacuucuacgagccccagaucaucaccaccgacaacaccuucgugagcggcaacugcgacguggugaucggcaucgugaacaacaccguguacgauccccugcagcccgagcuggacagcuucaaggaggagcuggacaaguacuucaagaaucacaccagccccgacguggaccugggcgacaucagcggcaucaacgccagcguggugaacauccagaaggagaucgaucggcugaacgagguggccaagaaccugaacgagagccugaucgaccugcaggagcugggcaaguacgagcaguacaucaaguggcccugguacaucuggcugggcuucaucgccggccugaucgccaucgugauggugaccaucaugcugugcugcaugaccagcugcugcagcugccugaagggcuguugcagcugcggcagcugcugcaaguucgacgaggacgacagcgagcccgugcugaagggcgugaagcugcacuacaccugaggacuaguuauaagacugacuagcccgaugggccucccaacgggcccuccuccccuccuugcaccgagauuaaucaaaggcucuuuucagagccaccaaaaaaaaaaaaaaaaaaaaaaaaaaaaaaaaaaaaaaaaaaaaaaaaaaaaaaaaaaaaaaaaaaaaaaaaaaaaaaaaaaaaaaaaaaaaaaaaaaaaa

SEQ ID NO: 24214 - RNA, 4035 nt, Artificial Sequence
  SARS-CoV-2/Wuhan/WIV05/2019__EPI_ISL_402128 spike protein mRNA gc (1-1273)(K986P_V987P_ D614G)
aggagaaagcuuaccauguucguguuccuggugcugcugccccuggugagcagccagugcgugaaccugaccacccggacccagcugccaccagccuacaccaacagcuucacccggggcgucuacuaccccgacaagguguuccggagcagcguccugcacagcacccaggaccuguuccugcccuucuucagcaacgugaccugguuccacgccauccacgugagcggcaccaacggcaccaagcgguucgacaaccccgugcugcccuucaacgacggcguguacuucgccagcaccgagaagagcaacaucauccggggcuggaucuucggcaccacccuggacagcaagacccagagccugcugaucgugaauaacgccaccaacguggugaucaaggugugcgaguuccaguucugcaacgaccccuuccugggcguguacuaccacaagaacaacaagagcuggauggagagcgaguuccggguguacagcagcgccaacaacugcaccuucgaguacgugagccagcccuuccugauggaccuggagggcaagcagggcaacuucaagaaccugcgggaguucguguucaagaacaucgacggcuacuucaagaucuacagcaagcacaccccaaucaaccuggugcgggaucugccccagggcuucucagcccuggagccccugguggaccugcccaucggcaucaacaucacccgguuccagacccugcuggcccugcaccggagcuaccugaccccaggcgacagcagcagcggguggacagcaggcgcggcugcuuacuacgugggcuaccugcagccccggaccuuccugcugaaguacaacgagaacggcaccaucaccgacgccguggacugcgcccuggacccucugagcgagaccaagugcacccugaagagcuucaccguggagaagggcaucuaccagaccagcaacuuccgggugcagcccaccgagagcaucgugcgguuccccaacaucaccaaccugugccccuucggcgagguguucaacgccacccgguucgccagcguguacgccuggaaccggaagcggaucagcaacugcguggccgacuacagcgugcuguacaacagcgccagcuucagcaccuucaagugcuacggcgugagccccaccaagcugaacgaccugugcuucaccaacguguacgccgacagcuucgugauccguggcgacgaggugcggcagaucgcacccggccagacaggcaagaucgccgacuacaacuacaagcugcccgacgacuucaccggcugcgugaucgccuggaacagcaacaaccucgacagcaaggugggcggcaacuacaacuaccuguaccggcuguuccggaagagcaaccugaagcccuucgagcgggacaucagcaccgagaucuaccaagccggcuccaccccuugcaacggcguggagggcuucaacugcuacuucccucugcagagcuacggcuuccagcccaccaacggcgugggcuaccagcccuaccgggugguggugcugagcuucgagcugcugcacgccccagccaccguguguggccccaagaagagcaccaaccuggugaagaacaagugcgugaacuucaacuucaacggccuuaccggcaccggcgugcugaccgagagcaacaagaaauuccugcccuuucagcaguucggccgggacaucgccgacaccaccgacgcugugcgggauccccagacccuggagauccuggacaucaccccuugcagcuucggcggcgugagcgugaucaccccaggcaccaacaccagcaaccagguggccgugcuguaccagggcgugaacugcaccgaggugcccguggccauccacgccgaccagcugacacccaccuggcgggucuacagcaccggcagcaacguguuccagacccgggccgguugccugaucggcgccgagcacgugaacaacagcuacgagugcgacauccccaucggcgccggcaucugugccagcuaccagacccagaccaauucaccccggagggcaaggagcguggccagccagagcaucaucgccuacaccaugagccugggcgccgagaacagcguggccuacagcaacaacagcaucgccauccccaccaacuucaccaucagcgugaccaccgagauucugcccgugagcaugaccaagaccagcguggacugcaccauguacaucugcggcgacagcaccgagugcagcaaccugcugcugcaguacggcagcuucugcacccagcugaaccgggcccugaccggcaucgccguggagcaggacaagaacacccaggagguguucgcccaggugaagcagaucuacaagaccccucccaucaaggacuucggcggcuucaacuucagccagauccugcccgaccccagcaagcccagcaagcggagcuucaucgaggaccugcuguucaacaaggugacccuagccgacgccggcuucaucaagcaguacggcgacugccucggcgacauagccgcccgggaccugaucugcgcccagaaguucaacggccugaccgugcugccuccccugcugaccgacgagaugaucgcccaguacaccagcgcccuguuagccggaaccaucaccagcggcuggacuuucggcgcuggagccgcucugcagauccccuucgccaugcagauggccuaccgguucaacggcaucggcgugacccagaacgugcuguacgagaaccagaagcugaucgccaaccaguucaacagcgccaucggcaagauccaggacagccugagcagcaccgcuagcgcccugggcaagcugcaggacguggugaaccagaacgcccaggcccugaacacccuggugaagcagcugagcagcaacuucggcgccaucagcagcgugcugaacgacauccugagccggcuggacccucccgaggccgaggugcagaucgaccggcugaucacuggccggcugcagagccugcagaccuacgugacccagcagcugauccgggccgccgagauucgggccagcgccaaccuggccgccaccaagaugagcgagugcgugcugggccagagcaagcggguggacuucugcggcaagggcuaccaccugaugagcuuuccccagagcgcaccccacggagugguguuccugcacgugaccuacgugcccgcccaggagaagaacuucaccaccgccccagccaucugccacgacggcaaggcccacuuuccccgggagggcguguucgugagcaacggcacccacugguucgugacccagcggaacuucuacgagccccagaucaucaccaccgacaacaccuucgugagcggcaacugcgacguggugaucggcaucgugaacaacaccguguacgauccccugcagcccgagcuggacagcuucaaggaggagcuggacaaguacuucaagaaucacaccagccccgacguggaccugggcgacaucagcggcaucaacgccagcguggugaacauccagaaggagaucgaucggcugaacgagguggccaagaaccugaacgagagccugaucgaccugcaggagcugggcaaguacgagcaguacaucaaguggcccugguacaucuggcugggcuucaucgccggccugaucgccaucgugauggugaccaucaugcugugcugcaugaccagcugcugcagcugccugaagggcuguugcagcugcggcagcugcugcaaguucgacgaggacgacagcgagcccgugcugaagggcgugaagcugcacuacaccugaggacuaguuauaagacugacuagcccgaugggccucccaacgggcccuccuccccuccuugcaccgagauuaaucaaaggcucuuuucagagccaccaaaaaaaaaaaaaaaaaaaaaaaaaaaaaaaaaaaaaaaaaaaaaaaaaaaaaaaaaaaaaaaaaaaaaaaaaaaaaaaaaaaaaaaaaaaaaaaaaaaaa

SEQ ID NO: 24215 - RNA, 4035 nt, Artificial Sequence
  SARS-CoV-2/Wuhan/WIV05/2019__EPI_ISL_402128 spike protein mRNA gc (1-1273)(K986P_V987P_A222V_D614G)
aggagaaagcuuaccauguucguguuccuggugcugcugccccuggugagcagccagugcgugaaccugaccacccggacccagcugccaccagccuacaccaacagcuucacccggggcgucuacuaccccgacaagguguuccggagcagcguccugcacagcacccaggaccuguuccugcccuucuucagcaacgugaccugguuccacgccauccacgugagcggcaccaacggcaccaagcgguucgacaaccccgugcugcccuucaacgacggcguguacuucgccagcaccgagaagagcaacaucauccggggcuggaucuucggcaccacccuggacagcaagacccagagccugcugaucgugaauaacgccaccaacguggugaucaaggugugcgaguuccaguucugcaacgaccccuuccugggcguguacuaccacaagaacaacaagagcuggauggagagcgaguuccggguguacagcagcgccaacaacugcaccuucgaguacgugagccagcccuuccugauggaccuggagggcaagcagggcaacuucaagaaccugcgggaguucguguucaagaacaucgacggcuacuucaagaucuacagcaagcacaccccaaucaaccuggugcgggaucugccccagggcuucucagugcuggagccccugguggaccugcccaucggcaucaacaucacccgguuccagacccugcuggcccugcaccggagcuaccugaccccaggcgacagcagcagcggguggacagcaggcgcggcugcuuacuacgugggcuaccugcagccccggaccuuccugcugaaguacaacgagaacggcaccaucaccgacgccguggacugcgcccuggacccucugagcgagaccaagugcacccugaagagcuucaccguggagaagggcaucuaccagaccagcaacuuccgggugcagcccaccgagagcaucgugcgguuccccaacaucaccaaccugugccccuucggcgagguguucaacgccacccgguucgccagcguguacgccuggaaccggaagcggaucagcaacugcguggccgacuacagcgugcuguacaacagcgccagcuucagcaccuucaagugcuacggcgugagccccaccaagcugaacgaccugugcuucaccaacguguacgccgacagcuucgugauccguggcgacgaggugcggcagaucgcacccggccagacaggcaagaucgccgacuacaacuacaagcugcccgacgacuucaccggcugcgugaucgccuggaacagcaacaaccucgacagcaaggugggcggcaacuacaacuaccuguaccggcuguuccggaagagcaaccugaagcccuucgagcgggacaucagcaccgagaucuaccaagccggcuccaccccuugcaacggcguggagggcuucaacugcuacuucccucugcagagcuacggcuuccagcccaccaacggcgugggcuaccagcccuaccgggugguggugcugagcuucgagcugcugcacgccccagccaccguguguggccccaagaagagcaccaaccuggugaagaacaagugcgugaacuucaacuucaacggccuuaccggcaccggcgugcugaccgagagcaacaagaaauuccugcccuuucagcaguucggccgggacaucgccgacaccaccgacgcugugcgggauccccagacccuggagauccuggacaucaccccuugcagcuucggcggcgugagcgugaucaccccaggcaccaacaccagcaaccagguggccgugcuguaccagggcgugaacugcaccgaggugcccguggccauccacgccgaccagcugacacccaccuggcgggucuacagcaccggcagcaacguguuccagacccgggccgguugccugaucggcgccgagcacgugaacaacagcuacgagugcgacauccccaucggcgccggcaucugugccagcuaccagacccagaccaauucaccccggagggcaaggagcguggccagccagagcaucaucgccuacaccaugagccugggcgccgagaacagcguggccuacagcaacaacagcaucgccauccccaccaacuucaccaucagcgugaccaccgagauucugcccgugagcaugaccaagaccagcguggacugcaccauguacaucugcggcgacagcaccgagugcagcaaccugcugcugcaguacggcagcuucugcacccagcugaaccgggcccugaccggcaucgccguggagcaggacaagaacacccaggagguguucgcccaggugaagcagaucuacaagaccccucccaucaaggacuucggcggcuucaacuucagccagauccugcccgaccccagcaagcccagcaagcggagcuucaucgaggaccugcuguucaacaaggugacccuagccgacgccggcuucaucaagcaguacggcgacugccucggcgacauagccgcccgggaccugaucugcgcccagaaguucaacggccugaccgugcugccuccccugcugaccgacgagaugaucgcccaguacaccagcgcccuguuagccggaaccaucaccagcggcuggacuuucggcgcuggagccgcucugcagauccccuucgccaugcagauggccuaccgguucaacggcaucggcgugacccagaacgugcuguacgagaaccagaagcugaucgccaaccaguucaacagcgccaucggcaagauccaggacagccugagcagcaccgcuagcgcccugggcaagcugcaggacguggugaaccagaacgcccaggcccugaacacccuggugaagcagcugagcagcaacuucggcgccaucagcagcgugcugaacgacauccugagccggcuggacccucccgaggccgaggugcagaucgaccggcugaucacuggccggcugcagagccugcagaccuacgugacccagcagcugauccgggccgccgagauucgggccagcgccaaccuggccgccaccaagaugagcgagugcgugcugggccagagcaagcggguggacuucugcggcaagggcuaccaccugaugagcuuuccccagagcgcaccccacggagugguguuccugcacgugaccuacgugcccgcccaggagaagaacuucaccaccgccccagccaucugccacgacggcaaggcccacuuuccccgggagggcguguucgugagcaacggcacccacugguucgugacccagcggaacuucuacgagccccagaucaucaccaccgacaacaccuucgugagcggcaacugcgacguggugaucggcaucgugaacaacaccguguacgauccccugcagcccgagcuggacagcuucaaggaggagcuggacaaguacuucaagaaucacaccagccccgacguggaccugggcgacaucagcggcaucaacgccagcguggugaacauccagaaggagaucgaucggcugaacgagguggccaagaaccugaacgagagccugaucgaccugcaggagcugggcaaguacgagcaguacaucaaguggcccugguacaucuggcugggcuucaucgccggccugaucgccaucgugauggugaccaucaugcugugcugcaugaccagcugcugcagcugccugaagggcuguugcagcugcggcagcugcugcaaguucgacgaggacgacagcgagcccgugcugaagggcgugaagcugcacuacaccugaggacuaguuauaagacugacuagcccgaugggccucccaacgggcccuccuccccuccuugcaccgagauuaaucaaaggcucuuuucagagccaccaaaaaaaaaaaaaaaaaaaaaaaaaaaaaaaaaaaaaaaaaaaaaaaaaaaaaaaaaaaaaaaaaaaaaaaaaaaaaaaaaaaaaaaaaaaaaaaaaaaaa

SEQ ID NO: 24216 - RNA, 4035 nt, Artificial Sequence
  SARS-CoV-2/Wuhan/WIV05/2019__EPI_ISL_402128 spike protein mRNA gc (1-1273)(K986P_V987P_N439K_D614G)
aggagaaagcuuaccauguucguguuccuggugcugcugccccuggugagcagccagugcgugaaccugaccacccggacccagcugccaccagccuacaccaacagcuucacccggggcgucuacuaccccgacaagguguuccggagcagcguccugcacagcacccaggaccuguuccugcccuucuucagcaacgugaccugguuccacgccauccacgugagcggcaccaacggcaccaagcgguucgacaaccccgugcugcccuucaacgacggcguguacuucgccagcaccgagaagagcaacaucauccggggcuggaucuucggcaccacccuggacagcaagacccagagccugcugaucgugaauaacgccaccaacguggugaucaaggugugcgaguuccaguucugcaacgaccccuuccugggcguguacuaccacaagaacaacaagagcuggauggagagcgaguuccggguguacagcagcgccaacaacugcaccuucgaguacgugagccagcccuuccugauggaccuggagggcaagcagggcaacuucaagaaccugcgggaguucguguucaagaacaucgacggcuacuucaagaucuacagcaagcacaccccaaucaaccuggugcgggaucugccccagggcuucucagcccuggagccccugguggaccugcccaucggcaucaacaucacccgguuccagacccugcuggcccugcaccggagcuaccugaccccaggcgacagcagcagcggguggacagcaggcgcggcugcuuacuacgugggcuaccugcagccccggaccuuccugcugaaguacaacgagaacggcaccaucaccgacgccguggacugcgcccuggacccucugagcgagaccaagugcacccugaagagcuucaccguggagaagggcaucuaccagaccagcaacuuccgggugcagcccaccgagagcaucgugcgguuccccaacaucaccaaccugugccccuucggcgagguguucaacgccacccgguucgccagcguguacgccuggaaccggaagcggaucagcaacugcguggccgacuacagcgugcuguacaacagcgccagcuucagcaccuucaagugcuacggcgugagccccaccaagcugaacgaccugugcuucaccaacguguacgccgacagcuucgugauccguggcgacgaggugcggcagaucgcacccggccagacaggcaagaucgccgacuacaacuacaagcugcccgacgacuucaccggcugcgugaucgccuggaacagcaagaaccucgacagcaaggugggcggcaacuacaacuaccuguaccggcuguuccggaagagcaaccugaagcccuucgagcgggacaucagcaccgagaucuaccaagccggcuccaccccuugcaacggcguggagggcuucaacugcuacuucccucugcagagcuacggcuuccagcccaccaacggcgugggcuaccagcccuaccgggugguggugcugagcuucgagcugcugcacgccccagccaccguguguggccccaagaagagcaccaaccuggugaagaacaagugcgugaacuucaacuucaacggccuuaccggcaccggcgugcugaccgagagcaacaagaaauuccugcccuuucagcaguucggccgggacaucgccgacaccaccgacgcugugcgggauccccagacccuggagauccuggacaucaccccuugcagcuucggcggcgugagcgugaucaccccaggcaccaacaccagcaaccagguggccgugcuguaccagggcgugaacugcaccgaggugcccguggccauccacgccgaccagcugacacccaccuggcgggucuacagcaccggcagcaacguguuccagacccgggccgguugccugaucggcgccgagcacgugaacaacagcuacgagugcgacauccccaucggcgccggcaucugugccagcuaccagacccagaccaauucaccccggagggcaaggagcguggccagccagagcaucaucgccuacaccaugagccugggcgccgagaacagcguggccuacagcaacaacagcaucgccauccccaccaacuucaccaucagcgugaccaccgagauucugcccgugagcaugaccaagaccagcguggacugcaccauguacaucugcggcgacagcaccgagugcagcaaccugcugcugcaguacggcagcuucugcacccagcugaaccgggcccugaccggcaucgccguggagcaggacaagaacacccaggagguguucgcccaggugaagcagaucuacaagaccccucccaucaaggacuucggcggcuucaacuucagccagauccugcccgaccccagcaagcccagcaagcggagcuucaucgaggaccugcuguucaacaaggugacccuagccgacgccggcuucaucaagcaguacggcgacugccucggcgacauagccgcccgggaccugaucugcgcccagaaguucaacggccugaccgugcugccuccccugcugaccgacgagaugaucgcccaguacaccagcgcccuguuagccggaaccaucaccagcggcuggacuuucggcgcuggagccgcucugcagauccccuucgccaugcagauggccuaccgguucaacggcaucggcgugacccagaacgugcuguacgagaaccagaagcugaucgccaaccaguucaacagcgccaucggcaagauccaggacagccugagcagcaccgcuagcgcccugggcaagcugcaggacguggugaaccagaacgcccaggcccugaacacccuggugaagcagcugagcagcaacuucggcgccaucagcagcgugcugaacgacauccugagccggcuggacccucccgaggccgaggugcagaucgaccggcugaucacuggccggcugcagagccugcagaccuacgugacccagcagcugauccgggccgccgagauucgggccagcgccaaccuggccgccaccaagaugagcgagugcgugcugggccagagcaagcggguggacuucugcggcaagggcuaccaccugaugagcuuuccccagagcgcaccccacggagugguguuccugcacgugaccuacgugcccgcccaggagaagaacuucaccaccgccccagccaucugccacgacggcaaggcccacuuuccccgggagggcguguucgugagcaacggcacccacugguucgugacccagcggaacuucuacgagccccagaucaucaccaccgacaacaccuucgugagcggcaacugcgacguggugaucggcaucgugaacaacaccguguacgauccccugcagcccgagcuggacagcuucaaggaggagcuggacaaguacuucaagaaucacaccagccccgacguggaccugggcgacaucagcggcaucaacgccagcguggugaacauccagaaggagaucgaucggcugaacgagguggccaagaaccugaacgagagccugaucgaccugcaggagcugggcaaguacgagcaguacaucaaguggcccugguacaucuggcugggcuucaucgccggccugaucgccaucgugauggugaccaucaugcugugcugcaugaccagcugcugcagcugccugaagggcuguugcagcugcggcagcugcugcaaguucgacgaggacgacagcgagcccgugcugaagggcgugaagcugcacuacaccugaggacuaguuauaagacugacuagcccgaugggccucccaacgggcccuccuccccuccuugcaccgagauuaaucaaaggcucuuuucagagccaccaaaaaaaaaaaaaaaaaaaaaaaaaaaaaaaaaaaaaaaaaaaaaaaaaaaaaaaaaaaaaaaaaaaaaaaaaaaaaaaaaaaaaaaaaaaaaaaaaaaaa

SEQ ID NO: 24217 - RNA, 4035 nt, Artificial Sequence
  SARS-CoV-2/Wuhan/WIV05/2019__EPI_ISL_402128 spike protein mRNA gc (1-1273)(K986P_V987P_S477N_D614G)
aggagaaagcuuaccauguucguguuccuggugcugcugccccuggugagcagccagugcgugaaccugaccacccggacccagcugccaccagccuacaccaacagcuucacccggggcgucuacuaccccgacaagguguuccggagcagcguccugcacagcacccaggaccuguuccugcccuucuucagcaacgugaccugguuccacgccauccacgugagcggcaccaacggcaccaagcgguucgacaaccccgugcugcccuucaacgacggcguguacuucgccagcaccgagaagagcaacaucauccggggcuggaucuucggcaccacccuggacagcaagacccagagccugcugaucgugaauaacgccaccaacguggugaucaaggugugcgaguuccaguucugcaacgaccccuuccugggcguguacuaccacaagaacaacaagagcuggauggagagcgaguuccggguguacagcagcgccaacaacugcaccuucgaguacgugagccagcccuuccugauggaccuggagggcaagcagggcaacuucaagaaccugcgggaguucguguucaagaacaucgacggcuacuucaagaucuacagcaagcacaccccaaucaaccuggugcgggaucugccccagggcuucucagcccuggagccccugguggaccugcccaucggcaucaacaucacccgguuccagacccugcuggcccugcaccggagcuaccugaccccaggcgacagcagcagcggguggacagcaggcgcggcugcuuacuacgugggcuaccugcagccccggaccuuccugcugaaguacaacgagaacggcaccaucaccgacgccguggacugcgcccuggacccucugagcgagaccaagugcacccugaagagcuucaccguggagaagggcaucuaccagaccagcaacuuccgggugcagcccaccgagagcaucgugcgguuccccaacaucaccaaccugugccccuucggcgagguguucaacgccacccgguucgccagcguguacgccuggaaccggaagcggaucagcaacugcguggccgacuacagcgugcuguacaacagcgccagcuucagcaccuucaagugcuacggcgugagccccaccaagcugaacgaccugugcuucaccaacguguacgccgacagcuucgugauccguggcgacgaggugcggcagaucgcacccggccagacaggcaagaucgccgacuacaacuacaagcugcccgacgacuucaccggcugcgugaucgccuggaacagcaacaaccucgacagcaaggugggcggcaacuacaacuaccuguaccggcuguuccggaagagcaaccugaagcccuucgagcgggacaucagcaccgagaucuaccaagccggcaacaccccuugcaacggcguggagggcuucaacugcuacuucccucugcagagcuacggcuuccagcccaccaacggcgugggcuaccagcccuaccgggugguggugcugagcuucgagcugcugcacgccccagccaccguguguggccccaagaagagcaccaaccuggugaagaacaagugcgugaacuucaacuucaacggccuuaccggcaccggcgugcugaccgagagcaacaagaaauuccugcccuuucagcaguucggccgggacaucgccgacaccaccgacgcugugcgggauccccagacccuggagauccuggacaucaccccuugcagcuucggcggcgugagcgugaucaccccaggcaccaacaccagcaaccagguggccgugcuguaccagggcgugaacugcaccgaggugcccguggccauccacgccgaccagcugacacccaccuggcgggucuacagcaccggcagcaacguguuccagacccgggccgguugccugaucggcgccgagcacgugaacaacagcuacgagugcgacauccccaucggcgccggcaucugugccagcuaccagacccagaccaauucaccccggagggcaaggagcguggccagccagagcaucaucgccuacaccaugagccugggcgccgagaacagcguggccuacagcaacaacagcaucgccauccccaccaacuucaccaucagcgugaccaccgagauucugcccgugagcaugaccaagaccagcguggacugcaccauguacaucugcggcgacagcaccgagugcagcaaccugcugcugcaguacggcagcuucugcacccagcugaaccgggcccugaccggcaucgccguggagcaggacaagaacacccaggagguguucgcccaggugaagcagaucuacaagaccccucccaucaaggacuucggcggcuucaacuucagccagauccugcccgaccccagcaagcccagcaagcggagcuucaucgaggaccugcuguucaacaaggugacccuagccgacgccggcuucaucaagcaguacggcgacugccucggcgacauagccgcccgggaccugaucugcgcccagaaguucaacggccugaccgugcugccuccccugcugaccgacgagaugaucgcccaguacaccagcgcccuguuagccggaaccaucaccagcggcuggacuuucggcgcuggagccgcucugcagauccccuucgccaugcagauggccuaccgguucaacggcaucggcgugacccagaacgugcuguacgagaaccagaagcugaucgccaaccaguucaacagcgccaucggcaagauccaggacagccugagcagcaccgcuagcgcccugggcaagcugcaggacguggugaaccagaacgcccaggcccugaacacccuggugaagcagcugagcagcaacuucggcgccaucagcagcgugcugaacgacauccugagccggcuggacccucccgaggccgaggugcagaucgaccggcugaucacuggccggcugcagagccugcagaccuacgugacccagcagcugauccgggccgccgagauucgggccagcgccaaccuggccgccaccaagaugagcgagugcgugcugggccagagcaagcggguggacuucugcggcaagggcuaccaccugaugagcuuuccccagagcgcaccccacggagugguguuccugcacgugaccuacgugcccgcccaggagaagaacuucaccaccgccccagccaucugccacgacggcaaggcccacuuuccccgggagggcguguucgugagcaacggcacccacugguucgugacccagcggaacuucuacgagccccagaucaucaccaccgacaacaccuucgugagcggcaacugcgacguggugaucggcaucgugaacaacaccguguacgauccccugcagcccgagcuggacagcuucaaggaggagcuggacaaguacuucaagaaucacaccagccccgacguggaccugggcgacaucagcggcaucaacgccagcguggugaacauccagaaggagaucgaucggcugaacgagguggccaagaaccugaacgagagccugaucgaccugcaggagcugggcaaguacgagcaguacaucaaguggcccugguacaucuggcugggcuucaucgccggccugaucgccaucgugauggugaccaucaugcugugcugcaugaccagcugcugcagcugccugaagggcuguugcagcugcggcagcugcugcaaguucgacgaggacgacagcgagcccgugcugaagggcgugaagcugcacuacaccugaggacuaguuauaagacugacuagcccgaugggccucccaacgggcccuccuccccuccuugcaccgagauuaaucaaaggcucuuuucagagccaccaaaaaaaaaaaaaaaaaaaaaaaaaaaaaaaaaaaaaaaaaaaaaaaaaaaaaaaaaaaaaaaaaaaaaaaaaaaaaaaaaaaaaaaaaaaaaaaaaaaaa

SEQ ID NO: 24218 - RNA, 4035 nt, Artificial Sequence
  SARS-CoV-2/Wuhan/WIV05/2019__EPI_ISL_402128 spike protein mRNA gc (1-1273)(K986P_V987P_N501Y_D614G)
aggagaaagcuuaccauguucguguuccuggugcugcugccccuggugagcagccagugcgugaaccugaccacccggacccagcugccaccagccuacaccaacagcuucacccggggcgucuacuaccccgacaagguguuccggagcagcguccugcacagcacccaggaccuguuccugcccuucuucagcaacgugaccugguuccacgccauccacgugagcggcaccaacggcaccaagcgguucgacaaccccgugcugcccuucaacgacggcguguacuucgccagcaccgagaagagcaacaucauccggggcuggaucuucggcaccacccuggacagcaagacccagagccugcugaucgugaauaacgccaccaacguggugaucaaggugugcgaguuccaguucugcaacgaccccuuccugggcguguacuaccacaagaacaacaagagcuggauggagagcgaguuccggguguacagcagcgccaacaacugcaccuucgaguacgugagccagcccuuccugauggaccuggagggcaagcagggcaacuucaagaaccugcgggaguucguguucaagaacaucgacggcuacuucaagaucuacagcaagcacaccccaaucaaccuggugcgggaucugccccagggcuucucagcccuggagccccugguggaccugcccaucggcaucaacaucacccgguuccagacccugcuggcccugcaccggagcuaccugaccccaggcgacagcagcagcggguggacagcaggcgcggcugcuuacuacgugggcuaccugcagccccggaccuuccugcugaaguacaacgagaacggcaccaucaccgacgccguggacugcgcccuggacccucugagcgagaccaagugcacccugaagagcuucaccguggagaagggcaucuaccagaccagcaacuuccgggugcagcccaccgagagcaucgugcgguuccccaacaucaccaaccugugccccuucggcgagguguucaacgccacccgguucgccagcguguacgccuggaaccggaagcggaucagcaacugcguggccgacuacagcgugcuguacaacagcgccagcuucagcaccuucaagugcuacggcgugagccccaccaagcugaacgaccugugcuucaccaacguguacgccgacagcuucgugauccguggcgacgaggugcggcagaucgcacccggccagacaggcaagaucgccgacuacaacuacaagcugcccgacgacuucaccggcugcgugaucgccuggaacagcaacaaccucgacagcaaggugggcggcaacuacaacuaccuguaccggcuguuccggaagagcaaccugaagcccuucgagcgggacaucagcaccgagaucuaccaagccggcuccaccccuugcaacggcguggagggcuucaacugcuacuucccucugcagagcuacggcuuccagcccaccuacggcgugggcuaccagcccuaccgggugguggugcugagcuucgagcugcugcacgccccagccaccguguguggccccaagaagagcaccaaccuggugaagaacaagugcgugaacuucaacuucaacggccuuaccggcaccggcgugcugaccgagagcaacaagaaauuccugcccuuucagcaguucggccgggacaucgccgacaccaccgacgcugugcgggauccccagacccuggagauccuggacaucaccccuugcagcuucggcggcgugagcgugaucaccccaggcaccaacaccagcaaccagguggccgugcuguaccagggcgugaacugcaccgaggugcccguggccauccacgccgaccagcugacacccaccuggcgggucuacagcaccggcagcaacguguuccagacccgggccgguugccugaucggcgccgagcacgugaacaacagcuacgagugcgacauccccaucggcgccggcaucugugccagcuaccagacccagaccaauucaccccggagggcaaggagcguggccagccagagcaucaucgccuacaccaugagccugggcgccgagaacagcguggccuacagcaacaacagcaucgccauccccaccaacuucaccaucagcgugaccaccgagauucugcccgugagcaugaccaagaccagcguggacugcaccauguacaucugcggcgacagcaccgagugcagcaaccugcugcugcaguacggcagcuucugcacccagcugaaccgggcccugaccggcaucgccguggagcaggacaagaacacccaggagguguucgcccaggugaagcagaucuacaagaccccucccaucaaggacuucggcggcuucaacuucagccagauccugcccgaccccagcaagcccagcaagcggagcuucaucgaggaccugcuguucaacaaggugacccuagccgacgccggcuucaucaagcaguacggcgacugccucggcgacauagccgcccgggaccugaucugcgcccagaaguucaacggccugaccgugcugccuccccugcugaccgacgagaugaucgcccaguacaccagcgcccuguuagccggaaccaucaccagcggcuggacuuucggcgcuggagccgcucugcagauccccuucgccaugcagauggccuaccgguucaacggcaucggcgugacccagaacgugcuguacgagaaccagaagcugaucgccaaccaguucaacagcgccaucggcaagauccaggacagccugagcagcaccgcuagcgcccugggcaagcugcaggacguggugaaccagaacgcccaggcccugaacacccuggugaagcagcugagcagcaacuucggcgccaucagcagcgugcugaacgacauccugagccggcuggacccucccgaggccgaggugcagaucgaccggcugaucacuggccggcugcagagccugcagaccuacgugacccagcagcugauccgggccgccgagauucgggccagcgccaaccuggccgccaccaagaugagcgagugcgugcugggccagagcaagcggguggacuucugcggcaagggcuaccaccugaugagcuuuccccagagcgcaccccacggagugguguuccugcacgugaccuacgugcccgcccaggagaagaacuucaccaccgccccagccaucugccacgacggcaaggcccacuuuccccgggagggcguguucgugagcaacggcacccacugguucgugacccagcggaacuucuacgagccccagaucaucaccaccgacaacaccuucgugagcggcaacugcgacguggugaucggcaucgugaacaacaccguguacgauccccugcagcccgagcuggacagcuucaaggaggagcuggacaaguacuucaagaaucacaccagccccgacguggaccugggcgacaucagcggcaucaacgccagcguggugaacauccagaaggagaucgaucggcugaacgagguggccaagaaccugaacgagagccugaucgaccugcaggagcugggcaaguacgagcaguacaucaaguggcccugguacaucuggcugggcuucaucgccggccugaucgccaucgugauggugaccaucaugcugugcugcaugaccagcugcugcagcugccugaagggcuguugcagcugcggcagcugcugcaaguucgacgaggacgacagcgagcccgugcugaagggcgugaagcugcacuacaccugaggacuaguuauaagacugacuagcccgaugggccucccaacgggcccuccuccccuccuugcaccgagauuaaucaaaggcucuuuucagagccaccaaaaaaaaaaaaaaaaaaaaaaaaaaaaaaaaaaaaaaaaaaaaaaaaaaaaaaaaaaaaaaaaaaaaaaaaaaaaaaaaaaaaaaaaaaaaaaaaaaaaa

SEQ ID NO: 24219 - RNA, 4029 nt, Artificial Sequence
  SARS-CoV-2/Wuhan/WIV05/2019__EPI_ISL_402128 spike protein mRNA gc (1-1273)(K986P_V987P_H69del_V70del_D614G)
aggagaaagcuuaccauguucguguuccuggugcugcugccccuggugagcagccagugcgugaaccugaccacccggacccagcugccaccagccuacaccaacagcuucacccggggcgucuacuaccccgacaagguguuccggagcagcguccugcacagcacccaggaccuguuccugcccuucuucagcaacgugaccugguuccacgccaucagcggcaccaacggcaccaagcgguucgacaaccccgugcugcccuucaacgacggcguguacuucgccagcaccgagaagagcaacaucauccggggcuggaucuucggcaccacccuggacagcaagacccagagccugcugaucgugaauaacgccaccaacguggugaucaaggugugcgaguuccaguucugcaacgaccccuuccugggcguguacuaccacaagaacaacaagagcuggauggagagcgaguuccggguguacagcagcgccaacaacugcaccuucgaguacgugagccagcccuuccugauggaccuggagggcaagcagggcaacuucaagaaccugcgggaguucguguucaagaacaucgacggcuacuucaagaucuacagcaagcacaccccaaucaaccuggugcgggaucugccccagggcuucucagcccuggagccccugguggaccugcccaucggcaucaacaucacccgguuccagacccugcuggcccugcaccggagcuaccugaccccaggcgacagcagcagcggguggacagcaggcgcggcugcuuacuacgugggcuaccugcagccccggaccuuccugcugaaguacaacgagaacggcaccaucaccgacgccguggacugcgcccuggacccucugagcgagaccaagugcacccugaagagcuucaccguggagaagggcaucuaccagaccagcaacuuccgggugcagcccaccgagagcaucgugcgguuccccaacaucaccaaccugugccccuucggcgagguguucaacgccacccgguucgccagcguguacgccuggaaccggaagcggaucagcaacugcguggccgacuacagcgugcuguacaacagcgccagcuucagcaccuucaagugcuacggcgugagccccaccaagcugaacgaccugugcuucaccaacguguacgccgacagcuucgugauccguggcgacgaggugcggcagaucgcacccggccagacaggcaagaucgccgacuacaacuacaagcugcccgacgacuucaccggcugcgugaucgccuggaacagcaacaaccucgacagcaaggugggcggcaacuacaacuaccuguaccggcuguuccggaagagcaaccugaagcccuucgagcgggacaucagcaccgagaucuaccaagccggcuccaccccuugcaacggcguggagggcuucaacugcuacuucccucugcagagcuacggcuuccagcccaccaacggcgugggcuaccagcccuaccgggugguggugcugagcuucgagcugcugcacgccccagccaccguguguggccccaagaagagcaccaaccuggugaagaacaagugcgugaacuucaacuucaacggccuuaccggcaccggcgugcugaccgagagcaacaagaaauuccugcccuuucagcaguucggccgggacaucgccgacaccaccgacgcugugcgggauccccagacccuggagauccuggacaucaccccuugcagcuucggcggcgugagcgugaucaccccaggcaccaacaccagcaaccagguggccgugcuguaccagggcgugaacugcaccgaggugcccguggccauccacgccgaccagcugacacccaccuggcgggucuacagcaccggcagcaacguguuccagacccgggccgguugccugaucggcgccgagcacgugaacaacagcuacgagugcgacauccccaucggcgccggcaucugugccagcuaccagacccagaccaauucaccccggagggcaaggagcguggccagccagagcaucaucgccuacaccaugagccugggcgccgagaacagcguggccuacagcaacaacagcaucgccauccccaccaacuucaccaucagcgugaccaccgagauucugcccgugagcaugaccaagaccagcguggacugcaccauguacaucugcggcgacagcaccgagugcagcaaccugcugcugcaguacggcagcuucugcacccagcugaaccgggcccugaccggcaucgccguggagcaggacaagaacacccaggagguguucgcccaggugaagcagaucuacaagaccccucccaucaaggacuucggcggcuucaacuucagccagauccugcccgaccccagcaagcccagcaagcggagcuucaucgaggaccugcuguucaacaaggugacccuagccgacgccggcuucaucaagcaguacggcgacugccucggcgacauagccgcccgggaccugaucugcgcccagaaguucaacggccugaccgugcugccuccccugcugaccgacgagaugaucgcccaguacaccagcgcccuguuagccggaaccaucaccagcggcuggacuuucggcgcuggagccgcucugcagauccccuucgccaugcagauggccuaccgguucaacggcaucggcgugacccagaacgugcuguacgagaaccagaagcugaucgccaaccaguucaacagcgccaucggcaagauccaggacagccugagcagcaccgcuagcgcccugggcaagcugcaggacguggugaaccagaacgcccaggcccugaacacccuggugaagcagcugagcagcaacuucggcgccaucagcagcgugcugaacgacauccugagccggcuggacccucccgaggccgaggugcagaucgaccggcugaucacuggccggcugcagagccugcagaccuacgugacccagcagcugauccgggccgccgagauucgggccagcgccaaccuggccgccaccaagaugagcgagugcgugcugggccagagcaagcggguggacuucugcggcaagggcuaccaccugaugagcuuuccccagagcgcaccccacggagugguguuccugcacgugaccuacgugcccgcccaggagaagaacuucaccaccgccccagccaucugccacgacggcaaggcccacuuuccccgggagggcguguucgugagcaacggcacccacugguucgugacccagcggaacuucuacgagccccagaucaucaccaccgacaacaccuucgugagcggcaacugcgacguggugaucggcaucgugaacaacaccguguacgauccccugcagcccgagcuggacagcuucaaggaggagcuggacaaguacuucaagaaucacaccagccccgacguggaccugggcgacaucagcggcaucaacgccagcguggugaacauccagaaggagaucgaucggcugaacgagguggccaagaaccugaacgagagccugaucgaccugcaggagcugggcaaguacgagcaguacaucaaguggcccugguacaucuggcugggcuucaucgccggccugaucgccaucgugauggugaccaucaugcugugcugcaugaccagcugcugcagcugccugaagggcuguugcagcugcggcagcugcugcaaguucgacgaggacgacagcgagcccgugcugaagggcgugaagcugcacuacaccugaggacuaguuauaagacugacuagcccgaugggccucccaacgggcccuccuccccuccuugcaccgagauuaaucaaaggcucuuuucagagccaccaaaaaaaaaaaaaaaaaaaaaaaaaaaaaaaaaaaaaaaaaaaaaaaaaaaaaaaaaaaaaaaaaaaaaaaaaaaaaaaaaaaaaaaaaaaaaaaaaaaaa

SEQ ID NO: 24220 - RNA, 4035 nt, Artificial Sequence
  SARS-CoV-2/Wuhan/WIV05/2019__EPI_ISL_402128 spike protein mRNA gc (1-1273)(K986P_V987P_Y453F_D614G)
aggagaaagcuuaccauguucguguuccuggugcugcugccccuggugagcagccagugcgugaaccugaccacccggacccagcugccaccagccuacaccaacagcuucacccggggcgucuacuaccccgacaagguguuccggagcagcguccugcacagcacccaggaccuguuccugcccuucuucagcaacgugaccugguuccacgccauccacgugagcggcaccaacggcaccaagcgguucgacaaccccgugcugcccuucaacgacggcguguacuucgccagcaccgagaagagcaacaucauccggggcuggaucuucggcaccacccuggacagcaagacccagagccugcugaucgugaauaacgccaccaacguggugaucaaggugugcgaguuccaguucugcaacgaccccuuccugggcguguacuaccacaagaacaacaagagcuggauggagagcgaguuccggguguacagcagcgccaacaacugcaccuucgaguacgugagccagcccuuccugauggaccuggagggcaagcagggcaacuucaagaaccugcgggaguucguguucaagaacaucgacggcuacuucaagaucuacagcaagcacaccccaaucaaccuggugcgggaucugccccagggcuucucagcccuggagccccugguggaccugcccaucggcaucaacaucacccgguuccagacccugcuggcccugcaccggagcuaccugaccccaggcgacagcagcagcggguggacagcaggcgcggcugcuuacuacgugggcuaccugcagccccggaccuuccugcugaaguacaacgagaacggcaccaucaccgacgccguggacugcgcccuggacccucugagcgagaccaagugcacccugaagagcuucaccguggagaagggcaucuaccagaccagcaacuuccgggugcagcccaccgagagcaucgugcgguuccccaacaucaccaaccugugccccuucggcgagguguucaacgccacccgguucgccagcguguacgccuggaaccggaagcggaucagcaacugcguggccgacuacagcgugcuguacaacagcgccagcuucagcaccuucaagugcuacggcgugagccccaccaagcugaacgaccugugcuucaccaacguguacgccgacagcuucgugauccguggcgacgaggugcggcagaucgcacccggccagacaggcaagaucgccgacuacaacuacaagcugcccgacgacuucaccggcugcgugaucgccuggaacagcaacaaccucgacagcaaggugggcggcaacuacaacuaccuguuccggcuguuccggaagagcaaccugaagcccuucgagcgggacaucagcaccgagaucuaccaagccggcuccaccccuugcaacggcguggagggcuucaacugcuacuucccucugcagagcuacggcuuccagcccaccaacggcgugggcuaccagcccuaccgggugguggugcugagcuucgagcugcugcacgccccagccaccguguguggccccaagaagagcaccaaccuggugaagaacaagugcgugaacuucaacuucaacggccuuaccggcaccggcgugcugaccgagagcaacaagaaauuccugcccuuucagcaguucggccgggacaucgccgacaccaccgacgcugugcgggauccccagacccuggagauccuggacaucaccccuugcagcuucggcggcgugagcgugaucaccccaggcaccaacaccagcaaccagguggccgugcuguaccagggcgugaacugcaccgaggugcccguggccauccacgccgaccagcugacacccaccuggcgggucuacagcaccggcagcaacguguuccagacccgggccgguugccugaucggcgccgagcacgugaacaacagcuacgagugcgacauccccaucggcgccggcaucugugccagcuaccagacccagaccaauucaccccggagggcaaggagcguggccagccagagcaucaucgccuacaccaugagccugggcgccgagaacagcguggccuacagcaacaacagcaucgccauccccaccaacuucaccaucagcgugaccaccgagauucugcccgugagcaugaccaagaccagcguggacugcaccauguacaucugcggcgacagcaccgagugcagcaaccugcugcugcaguacggcagcuucugcacccagcugaaccgggcccugaccggcaucgccguggagcaggacaagaacacccaggagguguucgcccaggugaagcagaucuacaagaccccucccaucaaggacuucggcggcuucaacuucagccagauccugcccgaccccagcaagcccagcaagcggagcuucaucgaggaccugcuguucaacaaggugacccuagccgacgccggcuucaucaagcaguacggcgacugccucggcgacauagccgcccgggaccugaucugcgcccagaaguucaacggccugaccgugcugccuccccugcugaccgacgagaugaucgcccaguacaccagcgcccuguuagccggaaccaucaccagcggcuggacuuucggcgcuggagccgcucugcagauccccuucgccaugcagauggccuaccgguucaacggcaucggcgugacccagaacgugcuguacgagaaccagaagcugaucgccaaccaguucaacagcgccaucggcaagauccaggacagccugagcagcaccgcuagcgcccugggcaagcugcaggacguggugaaccagaacgcccaggcccugaacacccuggugaagcagcugagcagcaacuucggcgccaucagcagcgugcugaacgacauccugagccggcuggacccucccgaggccgaggugcagaucgaccggcugaucacuggccggcugcagagccugcagaccuacgugacccagcagcugauccgggccgccgagauucgggccagcgccaaccuggccgccaccaagaugagcgagugcgugcugggccagagcaagcggguggacuucugcggcaagggcuaccaccugaugagcuuuccccagagcgcaccccacggagugguguuccugcacgugaccuacgugcccgcccaggagaagaacuucaccaccgccccagccaucugccacgacggcaaggcccacuuuccccgggagggcguguucgugagcaacggcacccacugguucgugacccagcggaacuucuacgagccccagaucaucaccaccgacaacaccuucgugagcggcaacugcgacguggugaucggcaucgugaacaacaccguguacgauccccugcagcccgagcuggacagcuucaaggaggagcuggacaaguacuucaagaaucacaccagccccgacguggaccugggcgacaucagcggcaucaacgccagcguggugaacauccagaaggagaucgaucggcugaacgagguggccaagaaccugaacgagagccugaucgaccugcaggagcugggcaaguacgagcaguacaucaaguggcccugguacaucuggcugggcuucaucgccggccugaucgccaucgugauggugaccaucaugcugugcugcaugaccagcugcugcagcugccugaagggcuguugcagcugcggcagcugcugcaaguucgacgaggacgacagcgagcccgugcugaagggcgugaagcugcacuacaccugaggacuaguuauaagacugacuagcccgaugggccucccaacgggcccuccuccccuccuugcaccgagauuaaucaaaggcucuuuucagagccaccaaaaaaaaaaaaaaaaaaaaaaaaaaaaaaaaaaaaaaaaaaaaaaaaaaaaaaaaaaaaaaaaaaaaaaaaaaaaaaaaaaaaaaaaaaaaaaaaaaaaa

SEQ ID NO: 24221 - RNA, 4035 nt, Artificial Sequence
  SARS-CoV-2/Wuhan/WIV05/2019__EPI_ISL_402128 spike protein mRNA gc (1-1273)(K986P_V987P_D614G_I692V)
aggagaaagcuuaccauguucguguuccuggugcugcugccccuggugagcagccagugcgugaaccugaccacccggacccagcugccaccagccuacaccaacagcuucacccggggcgucuacuaccccgacaagguguuccggagcagcguccugcacagcacccaggaccuguuccugcccuucuucagcaacgugaccugguuccacgccauccacgugagcggcaccaacggcaccaagcgguucgacaaccccgugcugcccuucaacgacggcguguacuucgccagcaccgagaagagcaacaucauccggggcuggaucuucggcaccacccuggacagcaagacccagagccugcugaucgugaauaacgccaccaacguggugaucaaggugugcgaguuccaguucugcaacgaccccuuccugggcguguacuaccacaagaacaacaagagcuggauggagagcgaguuccggguguacagcagcgccaacaacugcaccuucgaguacgugagccagcccuuccugauggaccuggagggcaagcagggcaacuucaagaaccugcgggaguucguguucaagaacaucgacggcuacuucaagaucuacagcaagcacaccccaaucaaccuggugcgggaucugccccagggcuucucagcccuggagccccugguggaccugcccaucggcaucaacaucacccgguuccagacccugcuggcccugcaccggagcuaccugaccccaggcgacagcagcagcggguggacagcaggcgcggcugcuuacuacgugggcuaccugcagccccggaccuuccugcugaaguacaacgagaacggcaccaucaccgacgccguggacugcgcccuggacccucugagcgagaccaagugcacccugaagagcuucaccguggagaagggcaucuaccagaccagcaacuuccgggugcagcccaccgagagcaucgugcgguuccccaacaucaccaaccugugccccuucggcgagguguucaacgccacccgguucgccagcguguacgccuggaaccggaagcggaucagcaacugcguggccgacuacagcgugcuguacaacagcgccagcuucagcaccuucaagugcuacggcgugagccccaccaagcugaacgaccugugcuucaccaacguguacgccgacagcuucgugauccguggcgacgaggugcggcagaucgcacccggccagacaggcaagaucgccgacuacaacuacaagcugcccgacgacuucaccggcugcgugaucgccuggaacagcaacaaccucgacagcaaggugggcggcaacuacaacuaccuguaccggcuguuccggaagagcaaccugaagcccuucgagcgggacaucagcaccgagaucuaccaagccggcuccaccccuugcaacggcguggagggcuucaacugcuacuucccucugcagagcuacggcuuccagcccaccaacggcgugggcuaccagcccuaccgggugguggugcugagcuucgagcugcugcacgccccagccaccguguguggccccaagaagagcaccaaccuggugaagaacaagugcgugaacuucaacuucaacggccuuaccggcaccggcgugcugaccgagagcaacaagaaauuccugcccuuucagcaguucggccgggacaucgccgacaccaccgacgcugugcgggauccccagacccuggagauccuggacaucaccccuugcagcuucggcggcgugagcgugaucaccccaggcaccaacaccagcaaccagguggccgugcuguaccagggcgugaacugcaccgaggugcccguggccauccacgccgaccagcugacacccaccuggcgggucuacagcaccggcagcaacguguuccagacccgggccgguugccugaucggcgccgagcacgugaacaacagcuacgagugcgacauccccaucggcgccggcaucugugccagcuaccagacccagaccaauucaccccggagggcaaggagcguggccagccagagcgugaucgccuacaccaugagccugggcgccgagaacagcguggccuacagcaacaacagcaucgccauccccaccaacuucaccaucagcgugaccaccgagauucugcccgugagcaugaccaagaccagcguggacugcaccauguacaucugcggcgacagcaccgagugcagcaaccugcugcugcaguacggcagcuucugcacccagcugaaccgggcccugaccggcaucgccguggagcaggacaagaacacccaggagguguucgcccaggugaagcagaucuacaagaccccucccaucaaggacuucggcggcuucaacuucagccagauccugcccgaccccagcaagcccagcaagcggagcuucaucgaggaccugcuguucaacaaggugacccuagccgacgccggcuucaucaagcaguacggcgacugccucggcgacauagccgcccgggaccugaucugcgcccagaaguucaacggccugaccgugcugccuccccugcugaccgacgagaugaucgcccaguacaccagcgcccuguuagccggaaccaucaccagcggcuggacuuucggcgcuggagccgcucugcagauccccuucgccaugcagauggccuaccgguucaacggcaucggcgugacccagaacgugcuguacgagaaccagaagcugaucgccaaccaguucaacagcgccaucggcaagauccaggacagccugagcagcaccgcuagcgcccugggcaagcugcaggacguggugaaccagaacgcccaggcccugaacacccuggugaagcagcugagcagcaacuucggcgccaucagcagcgugcugaacgacauccugagccggcuggacccucccgaggccgaggugcagaucgaccggcugaucacuggccggcugcagagccugcagaccuacgugacccagcagcugauccgggccgccgagauucgggccagcgccaaccuggccgccaccaagaugagcgagugcgugcugggccagagcaagcggguggacuucugcggcaagggcuaccaccugaugagcuuuccccagagcgcaccccacggagugguguuccugcacgugaccuacgugcccgcccaggagaagaacuucaccaccgccccagccaucugccacgacggcaaggcccacuuuccccgggagggcguguucgugagcaacggcacccacugguucgugacccagcggaacuucuacgagccccagaucaucaccaccgacaacaccuucgugagcggcaacugcgacguggugaucggcaucgugaacaacaccguguacgauccccugcagcccgagcuggacagcuucaaggaggagcuggacaaguacuucaagaaucacaccagccccgacguggaccugggcgacaucagcggcaucaacgccagcguggugaacauccagaaggagaucgaucggcugaacgagguggccaagaaccugaacgagagccugaucgaccugcaggagcugggcaaguacgagcaguacaucaaguggcccugguacaucuggcugggcuucaucgccggccugaucgccaucgugauggugaccaucaugcugugcugcaugaccagcugcugcagcugccugaagggcuguugcagcugcggcagcugcugcaaguucgacgaggacgacagcgagcccgugcugaagggcgugaagcugcacuacaccugaggacuaguuauaagacugacuagcccgaugggccucccaacgggcccuccuccccuccuugcaccgagauuaaucaaaggcucuuuucagagccaccaaaaaaaaaaaaaaaaaaaaaaaaaaaaaaaaaaaaaaaaaaaaaaaaaaaaaaaaaaaaaaaaaaaaaaaaaaaaaaaaaaaaaaaaaaaaaaaaaaaaa

SEQ ID NO: 24222 - RNA, 4035 nt, Artificial Sequence
  SARS-CoV-2/Wuhan/WIV05/2019__EPI_ISL_402128 spike protein mRNA gc (1-1273)(K986P_V987P_D614G_M1229I)
aggagaaagcuuaccauguucguguuccuggugcugcugccccuggugagcagccagugcgugaaccugaccacccggacccagcugccaccagccuacaccaacagcuucacccggggcgucuacuaccccgacaagguguuccggagcagcguccugcacagcacccaggaccuguuccugcccuucuucagcaacgugaccugguuccacgccauccacgugagcggcaccaacggcaccaagcgguucgacaaccccgugcugcccuucaacgacggcguguacuucgccagcaccgagaagagcaacaucauccggggcuggaucuucggcaccacccuggacagcaagacccagagccugcugaucgugaauaacgccaccaacguggugaucaaggugugcgaguuccaguucugcaacgaccccuuccugggcguguacuaccacaagaacaacaagagcuggauggagagcgaguuccggguguacagcagcgccaacaacugcaccuucgaguacgugagccagcccuuccugauggaccuggagggcaagcagggcaacuucaagaaccugcgggaguucguguucaagaacaucgacggcuacuucaagaucuacagcaagcacaccccaaucaaccuggugcgggaucugccccagggcuucucagcccuggagccccugguggaccugcccaucggcaucaacaucacccgguuccagacccugcuggcccugcaccggagcuaccugaccccaggcgacagcagcagcggguggacagcaggcgcggcugcuuacuacgugggcuaccugcagccccggaccuuccugcugaaguacaacgagaacggcaccaucaccgacgccguggacugcgcccuggacccucugagcgagaccaagugcacccugaagagcuucaccguggagaagggcaucuaccagaccagcaacuuccgggugcagcccaccgagagcaucgugcgguuccccaacaucaccaaccugugccccuucggcgagguguucaacgccacccgguucgccagcguguacgccuggaaccggaagcggaucagcaacugcguggccgacuacagcgugcuguacaacagcgccagcuucagcaccuucaagugcuacggcgugagccccaccaagcugaacgaccugugcuucaccaacguguacgccgacagcuucgugauccguggcgacgaggugcggcagaucgcacccggccagacaggcaagaucgccgacuacaacuacaagcugcccgacgacuucaccggcugcgugaucgccuggaacagcaacaaccucgacagcaaggugggcggcaacuacaacuaccuguaccggcuguuccggaagagcaaccugaagcccuucgagcgggacaucagcaccgagaucuaccaagccggcuccaccccuugcaacggcguggagggcuucaacugcuacuucccucugcagagcuacggcuuccagcccaccaacggcgugggcuaccagcccuaccgggugguggugcugagcuucgagcugcugcacgccccagccaccguguguggccccaagaagagcaccaaccuggugaagaacaagugcgugaacuucaacuucaacggccuuaccggcaccggcgugcugaccgagagcaacaagaaauuccugcccuuucagcaguucggccgggacaucgccgacaccaccgacgcugugcgggauccccagacccuggagauccuggacaucaccccuugcagcuucggcggcgugagcgugaucaccccaggcaccaacaccagcaaccagguggccgugcuguaccagggcgugaacugcaccgaggugcccguggccauccacgccgaccagcugacacccaccuggcgggucuacagcaccggcagcaacguguuccagacccgggccgguugccugaucggcgccgagcacgugaacaacagcuacgagugcgacauccccaucggcgccggcaucugugccagcuaccagacccagaccaauucaccccggagggcaaggagcguggccagccagagcaucaucgccuacaccaugagccugggcgccgagaacagcguggccuacagcaacaacagcaucgccauccccaccaacuucaccaucagcgugaccaccgagauucugcccgugagcaugaccaagaccagcguggacugcaccauguacaucugcggcgacagcaccgagugcagcaaccugcugcugcaguacggcagcuucugcacccagcugaaccgggcccugaccggcaucgccguggagcaggacaagaacacccaggagguguucgcccaggugaagcagaucuacaagaccccucccaucaaggacuucggcggcuucaacuucagccagauccugcccgaccccagcaagcccagcaagcggagcuucaucgaggaccugcuguucaacaaggugacccuagccgacgccggcuucaucaagcaguacggcgacugccucggcgacauagccgcccgggaccugaucugcgcccagaaguucaacggccugaccgugcugccuccccugcugaccgacgagaugaucgcccaguacaccagcgcccuguuagccggaaccaucaccagcggcuggacuuucggcgcuggagccgcucugcagauccccuucgccaugcagauggccuaccgguucaacggcaucggcgugacccagaacgugcuguacgagaaccagaagcugaucgccaaccaguucaacagcgccaucggcaagauccaggacagccugagcagcaccgcuagcgcccugggcaagcugcaggacguggugaaccagaacgcccaggcccugaacacccuggugaagcagcugagcagcaacuucggcgccaucagcagcgugcugaacgacauccugagccggcuggacccucccgaggccgaggugcagaucgaccggcugaucacuggccggcugcagagccugcagaccuacgugacccagcagcugauccgggccgccgagauucgggccagcgccaaccuggccgccaccaagaugagcgagugcgugcugggccagagcaagcggguggacuucugcggcaagggcuaccaccugaugagcuuuccccagagcgcaccccacggagugguguuccugcacgugaccuacgugcccgcccaggagaagaacuucaccaccgccccagccaucugccacgacggcaaggcccacuuuccccgggagggcguguucgugagcaacggcacccacugguucgugacccagcggaacuucuacgagccccagaucaucaccaccgacaacaccuucgugagcggcaacugcgacguggugaucggcaucgugaacaacaccguguacgauccccugcagcccgagcuggacagcuucaaggaggagcuggacaaguacuucaagaaucacaccagccccgacguggaccugggcgacaucagcggcaucaacgccagcguggugaacauccagaaggagaucgaucggcugaacgagguggccaagaaccugaacgagagccugaucgaccugcaggagcugggcaaguacgagcaguacaucaaguggcccugguacaucuggcugggcuucaucgccggccugaucgccaucgugaucgugaccaucaugcugugcugcaugaccagcugcugcagcugccugaagggcuguugcagcugcggcagcugcugcaaguucgacgaggacgacagcgagcccgugcugaagggcgugaagcugcacuacaccugaggacuaguuauaagacugacuagcccgaugggccucccaacgggcccuccuccccuccuugcaccgagauuaaucaaaggcucuuuucagagccaccaaaaaaaaaaaaaaaaaaaaaaaaaaaaaaaaaaaaaaaaaaaaaaaaaaaaaaaaaaaaaaaaaaaaaaaaaaaaaaaaaaaaaaaaaaaaaaaaaaaaa

SEQ ID NO: 24223 - RNA, 4029 nt, Artificial Sequence
  SARS-CoV-2/Wuhan/WIV05/2019__EPI_ISL_402128 spike protein mRNA gc (1-1273)(K986P_V987P_H69del_V70del_A222V_Y453F_S477N_D614G_I692V)
aggagaaagcuuaccauguucguguuccuggugcugcugccccuggugagcagccagugcgugaaccugaccacccggacccagcugccaccagccuacaccaacagcuucacccggggcgucuacuaccccgacaagguguuccggagcagcguccugcacagcacccaggaccuguuccugcccuucuucagcaacgugaccugguuccacgccaucagcggcaccaacggcaccaagcgguucgacaaccccgugcugcccuucaacgacggcguguacuucgccagcaccgagaagagcaacaucauccggggcuggaucuucggcaccacccuggacagcaagacccagagccugcugaucgugaauaacgccaccaacguggugaucaaggugugcgaguuccaguucugcaacgaccccuuccugggcguguacuaccacaagaacaacaagagcuggauggagagcgaguuccggguguacagcagcgccaacaacugcaccuucgaguacgugagccagcccuuccugauggaccuggagggcaagcagggcaacuucaagaaccugcgggaguucguguucaagaacaucgacggcuacuucaagaucuacagcaagcacaccccaaucaaccuggugcgggaucugccccagggcuucucagugcuggagccccugguggaccugcccaucggcaucaacaucacccgguuccagacccugcuggcccugcaccggagcuaccugaccccaggcgacagcagcagcggguggacagcaggcgcggcugcuuacuacgugggcuaccugcagccccggaccuuccugcugaaguacaacgagaacggcaccaucaccgacgccguggacugcgcccuggacccucugagcgagaccaagugcacccugaagagcuucaccguggagaagggcaucuaccagaccagcaacuuccgggugcagcccaccgagagcaucgugcgguuccccaacaucaccaaccugugccccuucggcgagguguucaacgccacccgguucgccagcguguacgccuggaaccggaagcggaucagcaacugcguggccgacuacagcgugcuguacaacagcgccagcuucagcaccuucaagugcuacggcgugagccccaccaagcugaacgaccugugcuucaccaacguguacgccgacagcuucgugauccguggcgacgaggugcggcagaucgcacccggccagacaggcaagaucgccgacuacaacuacaagcugcccgacgacuucaccggcugcgugaucgccuggaacagcaacaaccucgacagcaaggugggcggcaacuacaacuaccuguuccggcuguuccggaagagcaaccugaagcccuucgagcgggacaucagcaccgagaucuaccaagccggcaacaccccuugcaacggcguggagggcuucaacugcuacuucccucugcagagcuacggcuuccagcccaccaacggcgugggcuaccagcccuaccgggugguggugcugagcuucgagcugcugcacgccccagccaccguguguggccccaagaagagcaccaaccuggugaagaacaagugcgugaacuucaacuucaacggccuuaccggcaccggcgugcugaccgagagcaacaagaaauuccugcccuuucagcaguucggccgggacaucgccgacaccaccgacgcugugcgggauccccagacccuggagauccuggacaucaccccuugcagcuucggcggcgugagcgugaucaccccaggcaccaacaccagcaaccagguggccgugcuguaccagggcgugaacugcaccgaggugcccguggccauccacgccgaccagcugacacccaccuggcgggucuacagcaccggcagcaacguguuccagacccgggccgguugccugaucggcgccgagcacgugaacaacagcuacgagugcgacauccccaucggcgccggcaucugugccagcuaccagacccagaccaauucaccccggagggcaaggagcguggccagccagagcgugaucgccuacaccaugagccugggcgccgagaacagcguggccuacagcaacaacagcaucgccauccccaccaacuucaccaucagcgugaccaccgagauucugcccgugagcaugaccaagaccagcguggacugcaccauguacaucugcggcgacagcaccgagugcagcaaccugcugcugcaguacggcagcuucugcacccagcugaaccgggcccugaccggcaucgccguggagcaggacaagaacacccaggagguguucgcccaggugaagcagaucuacaagaccccucccaucaaggacuucggcggcuucaacuucagccagauccugcccgaccccagcaagcccagcaagcggagcuucaucgaggaccugcuguucaacaaggugacccuagccgacgccggcuucaucaagcaguacggcgacugccucggcgacauagccgcccgggaccugaucugcgcccagaaguucaacggccugaccgugcugccuccccugcugaccgacgagaugaucgcccaguacaccagcgcccuguuagccggaaccaucaccagcggcuggacuuucggcgcuggagccgcucugcagauccccuucgccaugcagauggccuaccgguucaacggcaucggcgugacccagaacgugcuguacgagaaccagaagcugaucgccaaccaguucaacagcgccaucggcaagauccaggacagccugagcagcaccgcuagcgcccugggcaagcugcaggacguggugaaccagaacgcccaggcccugaacacccuggugaagcagcugagcagcaacuucggcgccaucagcagcgugcugaacgacauccugagccggcuggacccucccgaggccgaggugcagaucgaccggcugaucacuggccggcugcagagccugcagaccuacgugacccagcagcugauccgggccgccgagauucgggccagcgccaaccuggccgccaccaagaugagcgagugcgugcugggccagagcaagcggguggacuucugcggcaagggcuaccaccugaugagcuuuccccagagcgcaccccacggagugguguuccugcacgugaccuacgugcccgcccaggagaagaacuucaccaccgccccagccaucugccacgacggcaaggcccacuuuccccgggagggcguguucgugagcaacggcacccacugguucgugacccagcggaacuucuacgagccccagaucaucaccaccgacaacaccuucgugagcggcaacugcgacguggugaucggcaucgugaacaacaccguguacgauccccugcagcccgagcuggacagcuucaaggaggagcuggacaaguacuucaagaaucacaccagccccgacguggaccugggcgacaucagcggcaucaacgccagcguggugaacauccagaaggagaucgaucggcugaacgagguggccaagaaccugaacgagagccugaucgaccugcaggagcugggcaaguacgagcaguacaucaaguggcccugguacaucuggcugggcuucaucgccggccugaucgccaucgugauggugaccaucaugcugugcugcaugaccagcugcugcagcugccugaagggcuguugcagcugcggcagcugcugcaaguucgacgaggacgacagcgagcccgugcugaagggcgugaagcugcacuacaccugaggacuaguuauaagacugacuagcccgaugggccucccaacgggcccuccuccccuccuugcaccgagauuaaucaaaggcucuuuucagagccaccaaaaaaaaaaaaaaaaaaaaaaaaaaaaaaaaaaaaaaaaaaaaaaaaaaaaaaaaaaaaaaaaaaaaaaaaaaaaaaaaaaaaaaaaaaaaaaaaaaaaa

SEQ ID NO: 24224 - RNA, 4029 nt, Artificial Sequence
  SARS-CoV-2/Wuhan/WIV05/2019__EPI_ISL_402128 spike protein mRNA gc (1-1273)(K986P_V987P_H69del_V70del_Y453F_D614G_I692V_M1229I)
aggagaaagcuuaccauguucguguuccuggugcugcugccccuggugagcagccagugcgugaaccugaccacccggacccagcugccaccagccuacaccaacagcuucacccggggcgucuacuaccccgacaagguguuccggagcagcguccugcacagcacccaggaccuguuccugcccuucuucagcaacgugaccugguuccacgccaucagcggcaccaacggcaccaagcgguucgacaaccccgugcugcccuucaacgacggcguguacuucgccagcaccgagaagagcaacaucauccggggcuggaucuucggcaccacccuggacagcaagacccagagccugcugaucgugaauaacgccaccaacguggugaucaaggugugcgaguuccaguucugcaacgaccccuuccugggcguguacuaccacaagaacaacaagagcuggauggagagcgaguuccggguguacagcagcgccaacaacugcaccuucgaguacgugagccagcccuuccugauggaccuggagggcaagcagggcaacuucaagaaccugcgggaguucguguucaagaacaucgacggcuacuucaagaucuacagcaagcacaccccaaucaaccuggugcgggaucugccccagggcuucucagcccuggagccccugguggaccugcccaucggcaucaacaucacccgguuccagacccugcuggcccugcaccggagcuaccugaccccaggcgacagcagcagcggguggacagcaggcgcggcugcuuacuacgugggcuaccugcagccccggaccuuccugcugaaguacaacgagaacggcaccaucaccgacgccguggacugcgcccuggacccucugagcgagaccaagugcacccugaagagcuucaccguggagaagggcaucuaccagaccagcaacuuccgggugcagcccaccgagagcaucgugcgguuccccaacaucaccaaccugugccccuucggcgagguguucaacgccacccgguucgccagcguguacgccuggaaccggaagcggaucagcaacugcguggccgacuacagcgugcuguacaacagcgccagcuucagcaccuucaagugcuacggcgugagccccaccaagcugaacgaccugugcuucaccaacguguacgccgacagcuucgugauccguggcgacgaggugcggcagaucgcacccggccagacaggcaagaucgccgacuacaacuacaagcugcccgacgacuucaccggcugcgugaucgccuggaacagcaacaaccucgacagcaaggugggcggcaacuacaacuaccuguuccggcuguuccggaagagcaaccugaagcccuucgagcgggacaucagcaccgagaucuaccaagccggcuccaccccuugcaacggcguggagggcuucaacugcuacuucccucugcagagcuacggcuuccagcccaccaacggcgugggcuaccagcccuaccgggugguggugcugagcuucgagcugcugcacgccccagccaccguguguggccccaagaagagcaccaaccuggugaagaacaagugcgugaacuucaacuucaacggccuuaccggcaccggcgugcugaccgagagcaacaagaaauuccugcccuuucagcaguucggccgggacaucgccgacaccaccgacgcugugcgggauccccagacccuggagauccuggacaucaccccuugcagcuucggcggcgugagcgugaucaccccaggcaccaacaccagcaaccagguggccgugcuguaccagggcgugaacugcaccgaggugcccguggccauccacgccgaccagcugacacccaccuggcgggucuacagcaccggcagcaacguguuccagacccgggccgguugccugaucggcgccgagcacgugaacaacagcuacgagugcgacauccccaucggcgccggcaucugugccagcuaccagacccagaccaauucaccccggagggcaaggagcguggccagccagagcgugaucgccuacaccaugagccugggcgccgagaacagcguggccuacagcaacaacagcaucgccauccccaccaacuucaccaucagcgugaccaccgagauucugcccgugagcaugaccaagaccagcguggacugcaccauguacaucugcggcgacagcaccgagugcagcaaccugcugcugcaguacggcagcuucugcacccagcugaaccgggcccugaccggcaucgccguggagcaggacaagaacacccaggagguguucgcccaggugaagcagaucuacaagaccccucccaucaaggacuucggcggcuucaacuucagccagauccugcccgaccccagcaagcccagcaagcggagcuucaucgaggaccugcuguucaacaaggugacccuagccgacgccggcuucaucaagcaguacggcgacugccucggcgacauagccgcccgggaccugaucugcgcccagaaguucaacggccugaccgugcugccuccccugcugaccgacgagaugaucgcccaguacaccagcgcccuguuagccggaaccaucaccagcggcuggacuuucggcgcuggagccgcucugcagauccccuucgccaugcagauggccuaccgguucaacggcaucggcgugacccagaacgugcuguacgagaaccagaagcugaucgccaaccaguucaacagcgccaucggcaagauccaggacagccugagcagcaccgcuagcgcccugggcaagcugcaggacguggugaaccagaacgcccaggcccugaacacccuggugaagcagcugagcagcaacuucggcgccaucagcagcgugcugaacgacauccugagccggcuggacccucccgaggccgaggugcagaucgaccggcugaucacuggccggcugcagagccugcagaccuacgugacccagcagcugauccgggccgccgagauucgggccagcgccaaccuggccgccaccaagaugagcgagugcgugcugggccagagcaagcggguggacuucugcggcaagggcuaccaccugaugagcuuuccccagagcgcaccccacggagugguguuccugcacgugaccuacgugcccgcccaggagaagaacuucaccaccgccccagccaucugccacgacggcaaggcccacuuuccccgggagggcguguucgugagcaacggcacccacugguucgugacccagcggaacuucuacgagccccagaucaucaccaccgacaacaccuucgugagcggcaacugcgacguggugaucggcaucgugaacaacaccguguacgauccccugcagcccgagcuggacagcuucaaggaggagcuggacaaguacuucaagaaucacaccagccccgacguggaccugggcgacaucagcggcaucaacgccagcguggugaacauccagaaggagaucgaucggcugaacgagguggccaagaaccugaacgagagccugaucgaccugcaggagcugggcaaguacgagcaguacaucaaguggcccugguacaucuggcugggcuucaucgccggccugaucgccaucgugaucgugaccaucaugcugugcugcaugaccagcugcugcagcugccugaagggcuguugcagcugcggcagcugcugcaaguucgacgaggacgacagcgagcccgugcugaagggcgugaagcugcacuacaccugaggacuaguuauaagacugacuagcccgaugggccucccaacgggcccuccuccccuccuugcaccgagauuaaucaaaggcucuuuucagagccaccaaaaaaaaaaaaaaaaaaaaaaaaaaaaaaaaaaaaaaaaaaaaaaaaaaaaaaaaaaaaaaaaaaaaaaaaaaaaaaaaaaaaaaaaaaaaaaaaaaaaa

SEQ ID NO: 24225 - RNA, 4026 nt, Artificial Sequence
  SARS-CoV-2/Wuhan/WIV05/2019__EPI_ISL_402128 spike protein mRNA gc (1-1273)(K986P_V987P_K986P_V987P_H69del_V70del_Y144del_N501Y_A570 D_D614G_P681H_T716I_S982A_D1118H)
aggagaaagcuuaccauguucguguuccuggugcugcugccccuggugagcagccagugcgugaaccugaccacccggacccagcugccaccagccuacaccaacagcuucacccggggcgucuacuaccccgacaagguguuccggagcagcguccugcacagcacccaggaccuguuccugcccuucuucagcaacgugaccugguuccacgccaucagcggcaccaacggcaccaagcgguucgacaaccccgugcugcccuucaacgacggcguguacuucgccagcaccgagaagagcaacaucauccggggcuggaucuucggcaccacccuggacagcaagacccagagccugcugaucgugaauaacgccaccaacguggugaucaaggugugcgaguuccaguucugcaacgaccccuuccugggcguguaccacaagaacaacaagagcuggauggagagcgaguuccggguguacagcagcgccaacaacugcaccuucgaguacgugagccagcccuuccugauggaccuggagggcaagcagggcaacuucaagaaccugcgggaguucguguucaagaacaucgacggcuacuucaagaucuacagcaagcacaccccaaucaaccuggugcgggaucugccccagggcuucucagcccuggagccccugguggaccugcccaucggcaucaacaucacccgguuccagacccugcuggcccugcaccggagcuaccugaccccaggcgacagcagcagcggguggacagcaggcgcggcugcuuacuacgugggcuaccugcagccccggaccuuccugcugaaguacaacgagaacggcaccaucaccgacgccguggacugcgcccuggacccucugagcgagaccaagugcacccugaagagcuucaccguggagaagggcaucuaccagaccagcaacuuccgggugcagcccaccgagagcaucgugcgguuccccaacaucaccaaccugugccccuucggcgagguguucaacgccacccgguucgccagcguguacgccuggaaccggaagcggaucagcaacugcguggccgacuacagcgugcuguacaacagcgccagcuucagcaccuucaagugcuacggcgugagccccaccaagcugaacgaccugugcuucaccaacguguacgccgacagcuucgugauccguggcgacgaggugcggcagaucgcacccggccagacaggcaagaucgccgacuacaacuacaagcugcccgacgacuucaccggcugcgugaucgccuggaacagcaacaaccucgacagcaaggugggcggcaacuacaacuaccuguaccggcuguuccggaagagcaaccugaagcccuucgagcgggacaucagcaccgagaucuaccaagccggcuccaccccuugcaacggcguggagggcuucaacugcuacuucccucugcagagcuacggcuuccagcccaccuacggcgugggcuaccagcccuaccgggugguggugcugagcuucgagcugcugcacgccccagccaccguguguggccccaagaagagcaccaaccuggugaagaacaagugcgugaacuucaacuucaacggccuuaccggcaccggcgugcugaccgagagcaacaagaaauuccugcccuuucagcaguucggccgggacaucgacgacaccaccgacgcugugcgggauccccagacccuggagauccuggacaucaccccuugcagcuucggcggcgugagcgugaucaccccaggcaccaacaccagcaaccagguggccgugcuguaccagggcgugaacugcaccgaggugcccguggccauccacgccgaccagcugacacccaccuggcgggucuacagcaccggcagcaacguguuccagacccgggccgguugccugaucggcgccgagcacgugaacaacagcuacgagugcgacauccccaucggcgccggcaucugugccagcuaccagacccagaccaauucacaccggagggcaaggagcguggccagccagagcaucaucgccuacaccaugagccugggcgccgagaacagcguggccuacagcaacaacagcaucgccauccccaucaacuucaccaucagcgugaccaccgagauucugcccgugagcaugaccaagaccagcguggacugcaccauguacaucugcggcgacagcaccgagugcagcaaccugcugcugcaguacggcagcuucugcacccagcugaaccgggcccugaccggcaucgccguggagcaggacaagaacacccaggagguguucgcccaggugaagcagaucuacaagaccccucccaucaaggacuucggcggcuucaacuucagccagauccugcccgaccccagcaagcccagcaagcggagcuucaucgaggaccugcuguucaacaaggugacccuagccgacgccggcuucaucaagcaguacggcgacugccucggcgacauagccgcccgggaccugaucugcgcccagaaguucaacggccugaccgugcugccuccccugcugaccgacgagaugaucgcccaguacaccagcgcccuguuagccggaaccaucaccagcggcuggacuuucggcgcuggagccgcucugcagauccccuucgccaugcagauggccuaccgguucaacggcaucggcgugacccagaacgugcuguacgagaaccagaagcugaucgccaaccaguucaacagcgccaucggcaagauccaggacagccugagcagcaccgcuagcgcccugggcaagcugcaggacguggugaaccagaacgcccaggcccugaacacccuggugaagcagcugagcagcaacuucggcgccaucagcagcgugcugaacgacauccuggcccggcuggacccucccgaggccgaggugcagaucgaccggcugaucacuggccggcugcagagccugcagaccuacgugacccagcagcugauccgggccgccgagauucgggccagcgccaaccuggccgccaccaagaugagcgagugcgugcugggccagagcaagcggguggacuucugcggcaagggcuaccaccugaugagcuuuccccagagcgcaccccacggagugguguuccugcacgugaccuacgugcccgcccaggagaagaacuucaccaccgccccagccaucugccacgacggcaaggcccacuuuccccgggagggcguguucgugagcaacggcacccacugguucgugacccagcggaacuucuacgagccccagaucaucaccacccacaacaccuucgugagcggcaacugcgacguggugaucggcaucgugaacaacaccguguacgauccccugcagcccgagcuggacagcuucaaggaggagcuggacaaguacuucaagaaucacaccagccccgacguggaccugggcgacaucagcggcaucaacgccagcguggugaacauccagaaggagaucgaucggcugaacgagguggccaagaaccugaacgagagccugaucgaccugcaggagcugggcaaguacgagcaguacaucaaguggcccugguacaucuggcugggcuucaucgccggccugaucgccaucgugauggugaccaucaugcugugcugcaugaccagcugcugcagcugccugaagggcuguugcagcugcggcagcugcugcaaguucgacgaggacgacagcgagcccgugcugaagggcgugaagcugcacuacaccugaggacuaguuauaagacugacuagcccgaugggccucccaacgggcccuccuccccuccuugcaccgagauuaaucaaaggcucuuuucagagccaccaaaaaaaaaaaaaaaaaaaaaaaaaaaaaaaaaaaaaaaaaaaaaaaaaaaaaaaaaaaaaaaaaaaaaaaaaaaaaaaaaaaaaaaaaaaaaaaaaaaaa

SEQ ID NO: 24226 - RNA, 4035 nt, Artificial Sequence
  SARS-CoV-2/Wuhan/WIV05/2019__EPI_ISL_402128 spike protein mRNA gc (1-1273)(K986P_V987P_K986P_V987P_K417N_E484K_N501Y_D614G)
aggagaaagcuuaccauguucguguuccuggugcugcugccccuggugagcagccagugcgugaaccugaccacccggacccagcugccaccagccuacaccaacagcuucacccggggcgucuacuaccccgacaagguguuccggagcagcguccugcacagcacccaggaccuguuccugcccuucuucagcaacgugaccugguuccacgccauccacgugagcggcaccaacggcaccaagcgguucgacaaccccgugcugcccuucaacgacggcguguacuucgccagcaccgagaagagcaacaucauccggggcuggaucuucggcaccacccuggacagcaagacccagagccugcugaucgugaauaacgccaccaacguggugaucaaggugugcgaguuccaguucugcaacgaccccuuccugggcguguacuaccacaagaacaacaagagcuggauggagagcgaguuccggguguacagcagcgccaacaacugcaccuucgaguacgugagccagcccuuccugauggaccuggagggcaagcagggcaacuucaagaaccugcgggaguucguguucaagaacaucgacggcuacuucaagaucuacagcaagcacaccccaaucaaccuggugcgggaucugccccagggcuucucagcccuggagccccugguggaccugcccaucggcaucaacaucacccgguuccagacccugcuggcccugcaccggagcuaccugaccccaggcgacagcagcagcggguggacagcaggcgcggcugcuuacuacgugggcuaccugcagccccggaccuuccugcugaaguacaacgagaacggcaccaucaccgacgccguggacugcgcccuggacccucugagcgagaccaagugcacccugaagagcuucaccguggagaagggcaucuaccagaccagcaacuuccgggugcagcccaccgagagcaucgugcgguuccccaacaucaccaaccugugccccuucggcgagguguucaacgccacccgguucgccagcguguacgccuggaaccggaagcggaucagcaacugcguggccgacuacagcgugcuguacaacagcgccagcuucagcaccuucaagugcuacggcgugagccccaccaagcugaacgaccugugcuucaccaacguguacgccgacagcuucgugauccguggcgacgaggugcggcagaucgcacccggccagacaggcaacaucgccgacuacaacuacaagcugcccgacgacuucaccggcugcgugaucgccuggaacagcaacaaccucgacagcaaggugggcggcaacuacaacuaccuguaccggcuguuccggaagagcaaccugaagcccuucgagcgggacaucagcaccgagaucuaccaagccggcuccaccccuugcaacggcgugaagggcuucaacugcuacuucccucugcagagcuacggcuuccagcccaccuacggcgugggcuaccagcccuaccgggugguggugcugagcuucgagcugcugcacgccccagccaccguguguggccccaagaagagcaccaaccuggugaagaacaagugcgugaacuucaacuucaacggccuuaccggcaccggcgugcugaccgagagcaacaagaaauuccugcccuuucagcaguucggccgggacaucgccgacaccaccgacgcugugcgggauccccagacccuggagauccuggacaucaccccuugcagcuucggcggcgugagcgugaucaccccaggcaccaacaccagcaaccagguggccgugcuguaccagggcgugaacugcaccgaggugcccguggccauccacgccgaccagcugacacccaccuggcgggucuacagcaccggcagcaacguguuccagacccgggccgguugccugaucggcgccgagcacgugaacaacagcuacgagugcgacauccccaucggcgccggcaucugugccagcuaccagacccagaccaauucaccccggagggcaaggagcguggccagccagagcaucaucgccuacaccaugagccugggcgccgagaacagcguggccuacagcaacaacagcaucgccauccccaccaacuucaccaucagcgugaccaccgagauucugcccgugagcaugaccaagaccagcguggacugcaccauguacaucugcggcgacagcaccgagugcagcaaccugcugcugcaguacggcagcuucugcacccagcugaaccgggcccugaccggcaucgccguggagcaggacaagaacacccaggagguguucgcccaggugaagcagaucuacaagaccccucccaucaaggacuucggcggcuucaacuucagccagauccugcccgaccccagcaagcccagcaagcggagcuucaucgaggaccugcuguucaacaaggugacccuagccgacgccggcuucaucaagcaguacggcgacugccucggcgacauagccgcccgggaccugaucugcgcccagaaguucaacggccugaccgugcugccuccccugcugaccgacgagaugaucgcccaguacaccagcgcccuguuagccggaaccaucaccagcggcuggacuuucggcgcuggagccgcucugcagauccccuucgccaugcagauggccuaccgguucaacggcaucggcgugacccagaacgugcuguacgagaaccagaagcugaucgccaaccaguucaacagcgccaucggcaagauccaggacagccugagcagcaccgcuagcgcccugggcaagcugcaggacguggugaaccagaacgcccaggcccugaacacccuggugaagcagcugagcagcaacuucggcgccaucagcagcgugcugaacgacauccugagccggcuggacccucccgaggccgaggugcagaucgaccggcugaucacuggccggcugcagagccugcagaccuacgugacccagcagcugauccgggccgccgagauucgggccagcgccaaccuggccgccaccaagaugagcgagugcgugcugggccagagcaagcggguggacuucugcggcaagggcuaccaccugaugagcuuuccccagagcgcaccccacggagugguguuccugcacgugaccuacgugcccgcccaggagaagaacuucaccaccgccccagccaucugccacgacggcaaggcccacuuuccccgggagggcguguucgugagcaacggcacccacugguucgugacccagcggaacuucuacgagccccagaucaucaccaccgacaacaccuucgugagcggcaacugcgacguggugaucggcaucgugaacaacaccguguacgauccccugcagcccgagcuggacagcuucaaggaggagcuggacaaguacuucaagaaucacaccagccccgacguggaccugggcgacaucagcggcaucaacgccagcguggugaacauccagaaggagaucgaucggcugaacgagguggccaagaaccugaacgagagccugaucgaccugcaggagcugggcaaguacgagcaguacaucaaguggcccugguacaucuggcugggcuucaucgccggccugaucgccaucgugauggugaccaucaugcugugcugcaugaccagcugcugcagcugccugaagggcuguugcagcugcggcagcugcugcaaguucgacgaggacgacagcgagcccgugcugaagggcgugaagcugcacuacaccugaggacuaguuauaagacugacuagcccgaugggccucccaacgggcccuccuccccuccuugcaccgagauuaaucaaaggcucuuuucagagccaccaaaaaaaaaaaaaaaaaaaaaaaaaaaaaaaaaaaaaaaaaaaaaaaaaaaaaaaaaaaaaaaaaaaaaaaaaaaaaaaaaaaaaaaaaaaaaaaaaaaaa

SEQ ID NO: 24227 - RNA, 4026 nt, Artificial Sequence
  SARS-CoV-2/Wuhan/WIV05/2019__EPI_ISL_402128 spike protein mRNA gc (1-1273)(K986P_V987P_K986P_V987P_L18F_D80A_D215G_L242del_A243del_ L244del_R246I_K417N_E484K_N501Y_D614G_A701V)
aggagaaagcuuaccauguucguguuccuggugcugcugccccuggugagcagccagugcgugaacuucaccacccggacccagcugccaccagccuacaccaacagcuucacccggggcgucuacuaccccgacaagguguuccggagcagcguccugcacagcacccaggaccuguuccugcccuucuucagcaacgugaccugguuccacgccauccacgugagcggcaccaacggcaccaagcgguucgccaaccccgugcugcccuucaacgacggcguguacuucgccagcaccgagaagagcaacaucauccggggcuggaucuucggcaccacccuggacagcaagacccagagccugcugaucgugaauaacgccaccaacguggugaucaaggugugcgaguuccaguucugcaacgaccccuuccugggcguguacuaccacaagaacaacaagagcuggauggagagcgaguuccggguguacagcagcgccaacaacugcaccuucgaguacgugagccagcccuuccugauggaccuggagggcaagcagggcaacuucaagaaccugcgggaguucguguucaagaacaucgacggcuacuucaagaucuacagcaagcacaccccaaucaaccuggugcggggccugccccagggcuucucagcccuggagccccugguggaccugcccaucggcaucaacaucacccgguuccagacccugcacaucagcuaccugaccccaggcgacagcagcagcggguggacagcaggcgcggcugcuuacuacgugggcuaccugcagccccggaccuuccugcugaaguacaacgagaacggcaccaucaccgacgccguggacugcgcccuggacccucugagcgagaccaagugcacccugaagagcuucaccguggagaagggcaucuaccagaccagcaacuuccgggugcagcccaccgagagcaucgugcgguuccccaacaucaccaaccugugccccuucggcgagguguucaacgccacccgguucgccagcguguacgccuggaaccggaagcggaucagcaacugcguggccgacuacagcgugcuguacaacagcgccagcuucagcaccuucaagugcuacggcgugagccccaccaagcugaacgaccugugcuucaccaacguguacgccgacagcuucgugauccguggcgacgaggugcggcagaucgcacccggccagacaggcaacaucgccgacuacaacuacaagcugcccgacgacuucaccggcugcgugaucgccuggaacagcaacaaccucgacagcaaggugggcggcaacuacaacuaccuguaccggcuguuccggaagagcaaccugaagcccuucgagcgggacaucagcaccgagaucuaccaagccggcuccaccccuugcaacggcgugaagggcuucaacugcuacuucccucugcagagcuacggcuuccagcccaccuacggcgugggcuaccagcccuaccgggugguggugcugagcuucgagcugcugcacgccccagccaccguguguggccccaagaagagcaccaaccuggugaagaacaagugcgugaacuucaacuucaacggccuuaccggcaccggcgugcugaccgagagcaacaagaaauuccugcccuuucagcaguucggccgggacaucgccgacaccaccgacgcugugcgggauccccagacccuggagauccuggacaucaccccuugcagcuucggcggcgugagcgugaucaccccaggcaccaacaccagcaaccagguggccgugcuguaccagggcgugaacugcaccgaggugcccguggccauccacgccgaccagcugacacccaccuggcgggucuacagcaccggcagcaacguguuccagacccgggccgguugccugaucggcgccgagcacgugaacaacagcuacgagugcgacauccccaucggcgccggcaucugugccagcuaccagacccagaccaauucaccccggagggcaaggagcguggccagccagagcaucaucgccuacaccaugagccugggcguggagaacagcguggccuacagcaacaacagcaucgccauccccaccaacuucaccaucagcgugaccaccgagauucugcccgugagcaugaccaagaccagcguggacugcaccauguacaucugcggcgacagcaccgagugcagcaaccugcugcugcaguacggcagcuucugcacccagcugaaccgggcccugaccggcaucgccguggagcaggacaagaacacccaggagguguucgcccaggugaagcagaucuacaagaccccucccaucaaggacuucggcggcuucaacuucagccagauccugcccgaccccagcaagcccagcaagcggagcuucaucgaggaccugcuguucaacaaggugacccuagccgacgccggcuucaucaagcaguacggcgacugccucggcgacauagccgcccgggaccugaucugcgcccagaaguucaacggccugaccgugcugccuccccugcugaccgacgagaugaucgcccaguacaccagcgcccuguuagccggaaccaucaccagcggcuggacuuucggcgcuggagccgcucugcagauccccuucgccaugcagauggccuaccgguucaacggcaucggcgugacccagaacgugcuguacgagaaccagaagcugaucgccaaccaguucaacagcgccaucggcaagauccaggacagccugagcagcaccgcuagcgcccugggcaagcugcaggacguggugaaccagaacgcccaggcccugaacacccuggugaagcagcugagcagcaacuucggcgccaucagcagcgugcugaacgacauccugagccggcuggacccucccgaggccgaggugcagaucgaccggcugaucacuggccggcugcagagccugcagaccuacgugacccagcagcugauccgggccgccgagauucgggccagcgccaaccuggccgccaccaagaugagcgagugcgugcugggccagagcaagcggguggacuucugcggcaagggcuaccaccugaugagcuuuccccagagcgcaccccacggagugguguuccugcacgugaccuacgugcccgcccaggagaagaacuucaccaccgccccagccaucugccacgacggcaaggcccacuuuccccgggagggcguguucgugagcaacggcacccacugguucgugacccagcggaacuucuacgagccccagaucaucaccaccgacaacaccuucgugagcggcaacugcgacguggugaucggcaucgugaacaacaccguguacgauccccugcagcccgagcuggacagcuucaaggaggagcuggacaaguacuucaagaaucacaccagccccgacguggaccugggcgacaucagcggcaucaacgccagcguggugaacauccagaaggagaucgaucggcugaacgagguggccaagaaccugaacgagagccugaucgaccugcaggagcugggcaaguacgagcaguacaucaaguggcccugguacaucuggcugggcuucaucgccggccugaucgccaucgugauggugaccaucaugcugugcugcaugaccagcugcugcagcugccugaagggcuguugcagcugcggcagcugcugcaaguucgacgaggacgacagcgagcccgugcugaagggcgugaagcugcacuacaccugaggacuaguuauaagacugacuagcccgaugggccucccaacgggcccuccuccccuccuugcaccgagauuaaucaaaggcucuuuucagagccaccaaaaaaaaaaaaaaaaaaaaaaaaaaaaaaaaaaaaaaaaaaaaaaaaaaaaaaaaaaaaaaaaaaaaaaaaaaaaaaaaaaaaaaaaaaaaaaaaaaaaa

SEQ ID NO: 24228 - RNA, 4035 nt, Artificial Sequence
  SARS-CoV-2/Wuhan/WIV05/2019__EPI_ISL_402128 spike protein mRNA gc (1-1273)(K986P_V987P_K986P_V987P_E484K_D614G)
aggagaaagcuuaccauguucguguuccuggugcugcugccccuggugagcagccagugcgugaaccugaccacccggacccagcugccaccagccuacaccaacagcuucacccggggcgucuacuaccccgacaagguguuccggagcagcguccugcacagcacccaggaccuguuccugcccuucuucagcaacgugaccugguuccacgccauccacgugagcggcaccaacggcaccaagcgguucgacaaccccgugcugcccuucaacgacggcguguacuucgccagcaccgagaagagcaacaucauccggggcuggaucuucggcaccacccuggacagcaagacccagagccugcugaucgugaauaacgccaccaacguggugaucaaggugugcgaguuccaguucugcaacgaccccuuccugggcguguacuaccacaagaacaacaagagcuggauggagagcgaguuccggguguacagcagcgccaacaacugcaccuucgaguacgugagccagcccuuccugauggaccuggagggcaagcagggcaacuucaagaaccugcgggaguucguguucaagaacaucgacggcuacuucaagaucuacagcaagcacaccccaaucaaccuggugcgggaucugccccagggcuucucagcccuggagccccugguggaccugcccaucggcaucaacaucacccgguuccagacccugcuggcccugcaccggagcuaccugaccccaggcgacagcagcagcggguggacagcaggcgcggcugcuuacuacgugggcuaccugcagccccggaccuuccugcugaaguacaacgagaacggcaccaucaccgacgccguggacugcgcccuggacccucugagcgagaccaagugcacccugaagagcuucaccguggagaagggcaucuaccagaccagcaacuuccgggugcagcccaccgagagcaucgugcgguuccccaacaucaccaaccugugccccuucggcgagguguucaacgccacccgguucgccagcguguacgccuggaaccggaagcggaucagcaacugcguggccgacuacagcgugcuguacaacagcgccagcuucagcaccuucaagugcuacggcgugagccccaccaagcugaacgaccugugcuucaccaacguguacgccgacagcuucgugauccguggcgacgaggugcggcagaucgcacccggccagacaggcaagaucgccgacuacaacuacaagcugcccgacgacuucaccggcugcgugaucgccuggaacagcaacaaccucgacagcaaggugggcggcaacuacaacuaccuguaccggcuguuccggaagagcaaccugaagcccuucgagcgggacaucagcaccgagaucuaccaagccggcuccaccccuugcaacggcgugaagggcuucaacugcuacuucccucugcagagcuacggcuuccagcccaccaacggcgugggcuaccagcccuaccgggugguggugcugagcuucgagcugcugcacgccccagccaccguguguggccccaagaagagcaccaaccuggugaagaacaagugcgugaacuucaacuucaacggccuuaccggcaccggcgugcugaccgagagcaacaagaaauuccugcccuuucagcaguucggccgggacaucgccgacaccaccgacgcugugcgggauccccagacccuggagauccuggacaucaccccuugcagcuucggcggcgugagcgugaucaccccaggcaccaacaccagcaaccagguggccgugcuguaccagggcgugaacugcaccgaggugcccguggccauccacgccgaccagcugacacccaccuggcgggucuacagcaccggcagcaacguguuccagacccgggccgguugccugaucggcgccgagcacgugaacaacagcuacgagugcgacauccccaucggcgccggcaucugugccagcuaccagacccagaccaauucaccccggagggcaaggagcguggccagccagagcaucaucgccuacaccaugagccugggcgccgagaacagcguggccuacagcaacaacagcaucgccauccccaccaacuucaccaucagcgugaccaccgagauucugcccgugagcaugaccaagaccagcguggacugcaccauguacaucugcggcgacagcaccgagugcagcaaccugcugcugcaguacggcagcuucugcacccagcugaaccgggcccugaccggcaucgccguggagcaggacaagaacacccaggagguguucgcccaggugaagcagaucuacaagaccccucccaucaaggacuucggcggcuucaacuucagccagauccugcccgaccccagcaagcccagcaagcggagcuucaucgaggaccugcuguucaacaaggugacccuagccgacgccggcuucaucaagcaguacggcgacugccucggcgacauagccgcccgggaccugaucugcgcccagaaguucaacggccugaccgugcugccuccccugcugaccgacgagaugaucgcccaguacaccagcgcccuguuagccggaaccaucaccagcggcuggacuuucggcgcuggagccgcucugcagauccccuucgccaugcagauggccuaccgguucaacggcaucggcgugacccagaacgugcuguacgagaaccagaagcugaucgccaaccaguucaacagcgccaucggcaagauccaggacagccugagcagcaccgcuagcgcccugggcaagcugcaggacguggugaaccagaacgcccaggcccugaacacccuggugaagcagcugagcagcaacuucggcgccaucagcagcgugcugaacgacauccugagccggcuggacccucccgaggccgaggugcagaucgaccggcugaucacuggccggcugcagagccugcagaccuacgugacccagcagcugauccgggccgccgagauucgggccagcgccaaccuggccgccaccaagaugagcgagugcgugcugggccagagcaagcggguggacuucugcggcaagggcuaccaccugaugagcuuuccccagagcgcaccccacggagugguguuccugcacgugaccuacgugcccgcccaggagaagaacuucaccaccgccccagccaucugccacgacggcaaggcccacuuuccccgggagggcguguucgugagcaacggcacccacugguucgugacccagcggaacuucuacgagccccagaucaucaccaccgacaacaccuucgugagcggcaacugcgacguggugaucggcaucgugaacaacaccguguacgauccccugcagcccgagcuggacagcuucaaggaggagcuggacaaguacuucaagaaucacaccagccccgacguggaccugggcgacaucagcggcaucaacgccagcguggugaacauccagaaggagaucgaucggcugaacgagguggccaagaaccugaacgagagccugaucgaccugcaggagcugggcaaguacgagcaguacaucaaguggcccugguacaucuggcugggcuucaucgccggccugaucgccaucgugauggugaccaucaugcugugcugcaugaccagcugcugcagcugccugaagggcuguugcagcugcggcagcugcugcaaguucgacgaggacgacagcgagcccgugcugaagggcgugaagcugcacuacaccugaggacuaguuauaagacugacuagcccgaugggccucccaacgggcccuccuccccuccuugcaccgagauuaaucaaaggcucuuuucagagccaccaaaaaaaaaaaaaaaaaaaaaaaaaaaaaaaaaaaaaaaaaaaaaaaaaaaaaaaaaaaaaaaaaaaaaaaaaaaaaaaaaaaaaaaaaaaaaaaaaaaaa

SEQ ID NO: 24229 - RNA, 4035 nt, Artificial Sequence
  SARS-CoV-2/Wuhan/WIV05/2019__EPI_ISL_402128 spike protein mRNA gc (1-1273)(K986P_V987P_K986P_V987P_L18F_T20N_P26S_D138Y_R190S_K417T _E484K_N501Y_D614G_H655Y_T1027I)
aggagaaagcuuaccauguucguguuccuggugcugcugccccuggugagcagccagugcgugaacuucaccaaccggacccagcugccaagcgccuacaccaacagcuucacccggggcgucuacuaccccgacaagguguuccggagcagcguccugcacagcacccaggaccuguuccugcccuucuucagcaacgugaccugguuccacgccauccacgugagcggcaccaacggcaccaagcgguucgacaaccccgugcugcccuucaacgacggcguguacuucgccagcaccgagaagagcaacaucauccggggcuggaucuucggcaccacccuggacagcaagacccagagccugcugaucgugaauaacgccaccaacguggugaucaaggugugcgaguuccaguucugcaacuaccccuuccugggcguguacuaccacaagaacaacaagagcuggauggagagcgaguuccggguguacagcagcgccaacaacugcaccuucgaguacgugagccagcccuuccugauggaccuggagggcaagcagggcaacuucaagaaccugagcgaguucguguucaagaacaucgacggcuacuucaagaucuacagcaagcacaccccaaucaaccuggugcgggaucugccccagggcuucucagcccuggagccccugguggaccugcccaucggcaucaacaucacccgguuccagacccugcuggcccugcaccggagcuaccugaccccaggcgacagcagcagcggguggacagcaggcgcggcugcuuacuacgugggcuaccugcagccccggaccuuccugcugaaguacaacgagaacggcaccaucaccgacgccguggacugcgcccuggacccucugagcgagaccaagugcacccugaagagcuucaccguggagaagggcaucuaccagaccagcaacuuccgggugcagcccaccgagagcaucgugcgguuccccaacaucaccaaccugugccccuucggcgagguguucaacgccacccgguucgccagcguguacgccuggaaccggaagcggaucagcaacugcguggccgacuacagcgugcuguacaacagcgccagcuucagcaccuucaagugcuacggcgugagccccaccaagcugaacgaccugugcuucaccaacguguacgccgacagcuucgugauccguggcgacgaggugcggcagaucgcacccggccagacaggcaccaucgccgacuacaacuacaagcugcccgacgacuucaccggcugcgugaucgccuggaacagcaacaaccucgacagcaaggugggcggcaacuacaacuaccuguaccggcuguuccggaagagcaaccugaagcccuucgagcgggacaucagcaccgagaucuaccaagccggcuccaccccuugcaacggcgugaagggcuucaacugcuacuucccucugcagagcuacggcuuccagcccaccuacggcgugggcuaccagcccuaccgggugguggugcugagcuucgagcugcugcacgccccagccaccguguguggccccaagaagagcaccaaccuggugaagaacaagugcgugaacuucaacuucaacggccuuaccggcaccggcgugcugaccgagagcaacaagaaauuccugcccuuucagcaguucggccgggacaucgccgacaccaccgacgcugugcgggauccccagacccuggagauccuggacaucaccccuugcagcuucggcggcgugagcgugaucaccccaggcaccaacaccagcaaccagguggccgugcuguaccagggcgugaacugcaccgaggugcccguggccauccacgccgaccagcugacacccaccuggcgggucuacagcaccggcagcaacguguuccagacccgggccgguugccugaucggcgccgaguacgugaacaacagcuacgagugcgacauccccaucggcgccggcaucugugccagcuaccagacccagaccaauucaccccggagggcaaggagcguggccagccagagcaucaucgccuacaccaugagccugggcgccgagaacagcguggccuacagcaacaacagcaucgccauccccaccaacuucaccaucagcgugaccaccgagauucugcccgugagcaugaccaagaccagcguggacugcaccauguacaucugcggcgacagcaccgagugcagcaaccugcugcugcaguacggcagcuucugcacccagcugaaccgggcccugaccggcaucgccguggagcaggacaagaacacccaggagguguucgcccaggugaagcagaucuacaagaccccucccaucaaggacuucggcggcuucaacuucagccagauccugcccgaccccagcaagcccagcaagcggagcuucaucgaggaccugcuguucaacaaggugacccuagccgacgccggcuucaucaagcaguacggcgacugccucggcgacauagccgcccgggaccugaucugcgcccagaaguucaacggccugaccgugcugccuccccugcugaccgacgagaugaucgcccaguacaccagcgcccuguuagccggaaccaucaccagcggcuggacuuucggcgcuggagccgcucugcagauccccuucgccaugcagauggccuaccgguucaacggcaucggcgugacccagaacgugcuguacgagaaccagaagcugaucgccaaccaguucaacagcgccaucggcaagauccaggacagccugagcagcaccgcuagcgcccugggcaagcugcaggacguggugaaccagaacgcccaggcccugaacacccuggugaagcagcugagcagcaacuucggcgccaucagcagcgugcugaacgacauccugagccggcuggacccucccgaggccgaggugcagaucgaccggcugaucacuggccggcugcagagccugcagaccuacgugacccagcagcugauccgggccgccgagauucgggccagcgccaaccuggccgccaucaagaugagcgagugcgugcugggccagagcaagcggguggacuucugcggcaagggcuaccaccugaugagcuuuccccagagcgcaccccacggagugguguuccugcacgugaccuacgugcccgcccaggagaagaacuucaccaccgccccagccaucugccacgacggcaaggcccacuuuccccgggagggcguguucgugagcaacggcacccacugguucgugacccagcggaacuucuacgagccccagaucaucaccaccgacaacaccuucgugagcggcaacugcgacguggugaucggcaucgugaacaacaccguguacgauccccugcagcccgagcuggacagcuucaaggaggagcuggacaaguacuucaagaaucacaccagccccgacguggaccugggcgacaucagcggcaucaacgccagcguggugaacauccagaaggagaucgaucggcugaacgagguggccaagaaccugaacgagagccugaucgaccugcaggagcugggcaaguacgagcaguacaucaaguggcccugguacaucuggcugggcuucaucgccggccugaucgccaucgugauggugaccaucaugcugugcugcaugaccagcugcugcagcugccugaagggcuguugcagcugcggcagcugcugcaaguucgacgaggacgacagcgagcccgugcugaagggcgugaagcugcacuacaccugaggacuaguuauaagacugacuagcccgaugggccucccaacgggcccuccuccccuccuugcaccgagauuaaucaaaggcucuuuucagagccaccaaaaaaaaaaaaaaaaaaaaaaaaaaaaaaaaaaaaaaaaaaaaaaaaaaaaaaaaaaaaaaaaaaaaaaaaaaaaaaaaaaaaaaaaaaaaaaaaaaaaa

SEQ ID NO: 24230 - RNA, 4035 nt, Artificial Sequence
  SARS-CoV-2/Wuhan/WIV05/2019__EPI_ISL_402128 spike protein mRNA gc (1-1273)(K986P_V987P_K986P_V987P_S13I_W152C_L452R_D614G)
aggagaaagcuuaccauguucguguuccuggugcugcugccccuggugagcauccagugcgugaaccugaccacccggacccagcugccaccagccuacaccaacagcuucacccggggcgucuacuaccccgacaagguguuccggagcagcguccugcacagcacccaggaccuguuccugcccuucuucagcaacgugaccugguuccacgccauccacgugagcggcaccaacggcaccaagcgguucgacaaccccgugcugcccuucaacgacggcguguacuucgccagcaccgagaagagcaacaucauccggggcuggaucuucggcaccacccuggacagcaagacccagagccugcugaucgugaauaacgccaccaacguggugaucaaggugugcgaguuccaguucugcaacgaccccuuccugggcguguacuaccacaagaacaacaagagcugcauggagagcgaguuccggguguacagcagcgccaacaacugcaccuucgaguacgugagccagcccuuccugauggaccuggagggcaagcagggcaacuucaagaaccugcgggaguucguguucaagaacaucgacggcuacuucaagaucuacagcaagcacaccccaaucaaccuggugcgggaucugccccagggcuucucagcccuggagccccugguggaccugcccaucggcaucaacaucacccgguuccagacccugcuggcccugcaccggagcuaccugaccccaggcgacagcagcagcggguggacagcaggcgcggcugcuuacuacgugggcuaccugcagccccggaccuuccugcugaaguacaacgagaacggcaccaucaccgacgccguggacugcgcccuggacccucugagcgagaccaagugcacccugaagagcuucaccguggagaagggcaucuaccagaccagcaacuuccgggugcagcccaccgagagcaucgugcgguuccccaacaucaccaaccugugccccuucggcgagguguucaacgccacccgguucgccagcguguacgccuggaaccggaagcggaucagcaacugcguggccgacuacagcgugcuguacaacagcgccagcuucagcaccuucaagugcuacggcgugagccccaccaagcugaacgaccugugcuucaccaacguguacgccgacagcuucgugauccguggcgacgaggugcggcagaucgcacccggccagacaggcaagaucgccgacuacaacuacaagcugcccgacgacuucaccggcugcgugaucgccuggaacagcaacaaccucgacagcaaggugggcggcaacuacaacuaccgcuaccggcuguuccggaagagcaaccugaagcccuucgagcgggacaucagcaccgagaucuaccaagccggcuccaccccuugcaacggcguggagggcuucaacugcuacuucccucugcagagcuacggcuuccagcccaccaacggcgugggcuaccagcccuaccgggugguggugcugagcuucgagcugcugcacgccccagccaccguguguggccccaagaagagcaccaaccuggugaagaacaagugcgugaacuucaacuucaacggccuuaccggcaccggcgugcugaccgagagcaacaagaaauuccugcccuuucagcaguucggccgggacaucgccgacaccaccgacgcugugcgggauccccagacccuggagauccuggacaucaccccuugcagcuucggcggcgugagcgugaucaccccaggcaccaacaccagcaaccagguggccgugcuguaccagggcgugaacugcaccgaggugcccguggccauccacgccgaccagcugacacccaccuggcgggucuacagcaccggcagcaacguguuccagacccgggccgguugccugaucggcgccgagcacgugaacaacagcuacgagugcgacauccccaucggcgccggcaucugugccagcuaccagacccagaccaauucaccccggagggcaaggagcguggccagccagagcaucaucgccuacaccaugagccugggcgccgagaacagcguggccuacagcaacaacagcaucgccauccccaccaacuucaccaucagcgugaccaccgagauucugcccgugagcaugaccaagaccagcguggacugcaccauguacaucugcggcgacagcaccgagugcagcaaccugcugcugcaguacggcagcuucugcacccagcugaaccgggcccugaccggcaucgccguggagcaggacaagaacacccaggagguguucgcccaggugaagcagaucuacaagaccccucccaucaaggacuucggcggcuucaacuucagccagauccugcccgaccccagcaagcccagcaagcggagcuucaucgaggaccugcuguucaacaaggugacccuagccgacgccggcuucaucaagcaguacggcgacugccucggcgacauagccgcccgggaccugaucugcgcccagaaguucaacggccugaccgugcugccuccccugcugaccgacgagaugaucgcccaguacaccagcgcccuguuagccggaaccaucaccagcggcuggacuuucggcgcuggagccgcucugcagauccccuucgccaugcagauggccuaccgguucaacggcaucggcgugacccagaacgugcuguacgagaaccagaagcugaucgccaaccaguucaacagcgccaucggcaagauccaggacagccugagcagcaccgcuagcgcccugggcaagcugcaggacguggugaaccagaacgcccaggcccugaacacccuggugaagcagcugagcagcaacuucggcgccaucagcagcgugcugaacgacauccugagccggcuggacccucccgaggccgaggugcagaucgaccggcugaucacuggccggcugcagagccugcagaccuacgugacccagcagcugauccgggccgccgagauucgggccagcgccaaccuggccgccaccaagaugagcgagugcgugcugggccagagcaagcggguggacuucugcggcaagggcuaccaccugaugagcuuuccccagagcgcaccccacggagugguguuccugcacgugaccuacgugcccgcccaggagaagaacuucaccaccgccccagccaucugccacgacggcaaggcccacuuuccccgggagggcguguucgugagcaacggcacccacugguucgugacccagcggaacuucuacgagccccagaucaucaccaccgacaacaccuucgugagcggcaacugcgacguggugaucggcaucgugaacaacaccguguacgauccccugcagcccgagcuggacagcuucaaggaggagcuggacaaguacuucaagaaucacaccagccccgacguggaccugggcgacaucagcggcaucaacgccagcguggugaacauccagaaggagaucgaucggcugaacgagguggccaagaaccugaacgagagccugaucgaccugcaggagcugggcaaguacgagcaguacaucaaguggcccugguacaucuggcugggcuucaucgccggccugaucgccaucgugauggugaccaucaugcugugcugcaugaccagcugcugcagcugccugaagggcuguugcagcugcggcagcugcugcaaguucgacgaggacgacagcgagcccgugcugaagggcgugaagcugcacuacaccugaggacuaguuauaagacugacuagcccgaugggccucccaacgggcccuccuccccuccuugcaccgagauuaaucaaaggcucuuuucagagccaccaaaaaaaaaaaaaaaaaaaaaaaaaaaaaaaaaaaaaaaaaaaaaaaaaaaaaaaaaaaaaaaaaaaaaaaaaaaaaaaaaaaaaaaaaaaaaaaaaaaaa

SEQ ID NO: 24231 - RNA, 4035 nt, Artificial Sequence
  SARS-CoV-2/Wuhan/WIV05/2019__EPI_ISL_402128 spike protein mRNA gc (1-1273)(K986P_V987P)
aggagaaagcuuaccauguucguguuccuggugcugcugccccuggugagcagccagugcgugaaccugaccacccggacccagcugcccccugccuacaccaacagcuucacccggggcguguacuaccccgacaagguguuccggagcagcgugcugcacagcacccaggaccuguuccugcccuucuucagcaacgugaccugguuccacgccauccacgugagcggcaccaacggcaccaagcgguucgacaacccagugcugcccuucaacgacggcguguacuucgccagcaccgagaagucaaacaucauccggggcuggaucuucggcaccacccuggacagcaagacacagagccugcugaucgugaacaacgccaccaacguggugaucaaggugugcgaguuucaguucugcaacgaccccuuccugggcguguacuaccacaagaacaacaagagcuggauggagagcgaguuccgggucuacagcagcgcuaacaauugcaccuucgaguacgugagccagcccuuccugauggaccucgagggcaagcagggcaacuucaagaaccugcgggaguucguguucaagaacaucgauggcuacuucaagaucuacagcaagcacacccccaucaaccuggugcgggaccugccccagggauucagcgcccuggagccucugguggaccugcccaucggcaucaacaucaccagguuccagacccugcuggcccugcaccggagcuaccugacccccggcgacagcagcagcggcuggaccgccggcgccgccgcauacuacgugggcuaccugcagccacggaccuuccugcugaaguacaacgagaacggcaccaucaccgacgccguggacugcgcccuggacccccugagcgagaccaagugcacccuaaagagcuucaccguggagaagggcaucuaccagaccagcaacuuccgggugcagcccacugagagcaucgugcgguuccccaacauuaccaaccugugucccuucggcgagguguucaacgccacccgguucgccagcguguacgccuggaaccggaagcggaucagcaacugcguggccgacuacagcgugcuguacaacagcgccagcuucagcaccuucaagugcuacggcgugagcccuaccaagcugaacgaccugugcuucaccaacguguacgcugacagcuucgugauccggggcgacgaggugcggcagaucgcccccggccagaccggcaagaucgccgacuacaacuacaagcugcccgacgacuucaccggcugcgugaucgccuggaacagcaacaaccuggacagcaaggugggcggcaacuacaacuaccuguaccggcuguuccguaagagcaaccugaagccauucgagcgggacaucagcaccgagaucuaccaggccggcagcacccccugcaacgguguggagggcuuuaacugcuacuucccccugcagagcuacggcuuccagcccaccaacggcgugggcuaccagcccuaccgggugguggugcugagcuucgagcugcugcacgcccccgccaccgugugcggcccuaaaaagagcaccaaccuggugaagaacaagugcgugaacuucaauuucaacggccugaccggcaccggcgugcugaccgagagcaacaagaaguuccugcccuuccagcaguucggccgggauaucgccgacaccaccgacgcagugcgggacccccagacccuggagauccuggacaucaccccaugcagcuucggcggcgugagcgucaucacccccggcacaaacaccagcaaccagguggccgugcuguaccaggacgugaacugcaccgaggugcccguggccauccacgccgaccagcugacccccaccuggcggguguacagcaccggaagcaacguguuccagacccgggccggcugccugaucggcgccgagcacgugaacaacuccuacgagugcgacauccccaucggcgcuggcaucugcgccagcuaccagacccagaccaacagcccccggcgggcccggagcguggccagccagagcaucaucgccuacaccaugagcuuaggcgccgagaacagcguggccuacagcaacaacagcaucgcgaucccuaccaacuucaccaucagcgugaccaccgagauacugcccgugagcaugaccaagaccagcguggacuguaccauguacaucugcggcgacagcaccgagugcagcaaccugcugcugcaguacggcagcuucugcacccagcugaaccgggcccugaccggcaucgccguggagcaggacaagaacacccaagagguguucgcccaggugaagcagaucuacaagacucccccaaucaaggacuucggcggcuucaacuucagccagauccugcccgaccccagcaagcccagcaagcggagcuucaucgaggaccugcuguucaacaaggugacccuggccgacgccggcuucaucaagcaguacggcgauugccugggcgacaucgccgcucgggaccugaucugcgcccagaaguucaacgggcugaccgugcugcccccucugcugaccgacgagaugaucgcccaguacaccagcgcccugcuugccggcaccaucaccagcggcuggaccuucggcgccggcgcagcccugcagauccccuucgccaugcagauggccuaccgguucaacggcaucggcgugacccagaacgugcuguacgagaaccagaagcugaucgccaaccaguucaacagcgccaucggcaagauccaggacagccugagcagcaccgccagcgcccugggcaagcugcaggacguggugaaccagaacgcucaggcccugaacacccuggugaagcagcugagcagcaacuucggcgccaucagcucagugcugaaugacauccugagcaggcuggaucccccagaggccgaggugcagaucgaccggcugaucaccggccggcugcagagccugcagaccuacgugacccagcagcugauccgggccgccgagauccgggccagcgccaaccuggcagccaccaagaugagcgagugcgugcugggccagagcaagcggguggacuuuugcggcaagggcuaccaccugaugagcuucccccagagcgcuccccacggcgugguguuccuccacgugacauacguccccgcccaggagaagaacuucaccaccgcccccgccauuugccacgacggcaaggcccacuucccccgggagggcguguucgugagcaacggaacccacugguucgugacccagcggaacuucuacgagccucagaucaucaccaccgacaacaccuucgugagcggcaacugcgacguggugaucggcaucgugaacaacaccguguacgacccccugcagcccgagcuggacagcuucaaggaggagcuggacaaguacuucaagaaccacaccagcccagacguggaccugggcgacaucagcggcaucaacgccagcguggugaacauccagaaggagaucgaccggcugaacgagguggccaagaaccugaacgagagccugaucgaccugcaggagcugggcaaguacgagcaguacaucaaguggcccugguacaucuggcugggcuucaucgccggccugaucgccaucgugauggugaccaucaugcugugcugcaugaccagcugcuguagcugccugaagggcugcugcagcugcggcagcugcugcaaguucgacgaggacgacagcgagcccgugcugaagggcgugaagcugcacuacaccugaggacuaguuauaagacugacuagcccgaugggccucccaacgggcccuccuccccuccuugcaccgagauuaaucaaaggcucuuuucagagccaccaaaaaaaaaaaaaaaaaaaaaaaaaaaaaaaaaaaaaaaaaaaaaaaaaaaaaaaaaaaaaaaaaaaaaaaaaaaaaaaaaaaaaaaaaaaaaaaaaaaaa

SEQ ID NO: 24232 - RNA, 4035 nt, Artificial Sequence
  SARS-CoV-2/Wuhan/WIV05/2019__EPI_ISL_402128 spike protein mRNA gc (1-1273)(K986P_V987P_ D614G)
aggagaaagcuuaccauguucguguuccuggugcugcugccccuggugagcagccagugcgugaaccugaccacccggacccagcugcccccugccuacaccaacagcuucacccggggcguguacuaccccgacaagguguuccggagcagcgugcugcacagcacccaggaccuguuccugcccuucuucagcaacgugaccugguuccacgccauccacgugagcggcaccaacggcaccaagcgguucgacaacccagugcugcccuucaacgacggcguguacuucgccagcaccgagaagucaaacaucauccggggcuggaucuucggcaccacccuggacagcaagacacagagccugcugaucgugaacaacgccaccaacguggugaucaaggugugcgaguuucaguucugcaacgaccccuuccugggcguguacuaccacaagaacaacaagagcuggauggagagcgaguuccgggucuacagcagcgcuaacaauugcaccuucgaguacgugagccagcccuuccugauggaccucgagggcaagcagggcaacuucaagaaccugcgggaguucguguucaagaacaucgauggcuacuucaagaucuacagcaagcacacccccaucaaccuggugcgggaccugccccagggauucagcgcccuggagccucugguggaccugcccaucggcaucaacaucaccagguuccagacccugcuggcccugcaccggagcuaccugacccccggcgacagcagcagcggcuggaccgccggcgccgccgcauacuacgugggcuaccugcagccacggaccuuccugcugaaguacaacgagaacggcaccaucaccgacgccguggacugcgcccuggacccccugagcgagaccaagugcacccuaaagagcuucaccguggagaagggcaucuaccagaccagcaacuuccgggugcagcccacugagagcaucgugcgguuccccaacauuaccaaccugugucccuucggcgagguguucaacgccacccgguucgccagcguguacgccuggaaccggaagcggaucagcaacugcguggccgacuacagcgugcuguacaacagcgccagcuucagcaccuucaagugcuacggcgugagcccuaccaagcugaacgaccugugcuucaccaacguguacgcugacagcuucgugauccggggcgacgaggugcggcagaucgcccccggccagaccggcaagaucgccgacuacaacuacaagcugcccgacgacuucaccggcugcgugaucgccuggaacagcaacaaccuggacagcaaggugggcggcaacuacaacuaccuguaccggcuguuccguaagagcaaccugaagccauucgagcgggacaucagcaccgagaucuaccaggccggcagcacccccugcaacgguguggagggcuuuaacugcuacuucccccugcagagcuacggcuuccagcccaccaacggcgugggcuaccagcccuaccgggugguggugcugagcuucgagcugcugcacgcccccgccaccgugugcggcccuaaaaagagcaccaaccuggugaagaacaagugcgugaacuucaauuucaacggccugaccggcaccggcgugcugaccgagagcaacaagaaguuccugcccuuccagcaguucggccgggauaucgccgacaccaccgacgcagugcgggacccccagacccuggagauccuggacaucaccccaugcagcuucggcggcgugagcgucaucacccccggcacaaacaccagcaaccagguggccgugcuguaccagggagugaacugcaccgaggugcccguggccauccacgccgaccagcugacccccaccuggcggguguacagcaccggcagcaacguguuccagacccgggccggcugccugaucggcgccgagcacgugaacaacuccuacgagugcgacauccccaucggcgcuggcaucugcgccagcuaccagacccagaccaacagcccccggcgggcccggagcguggccagccagagcaucaucgccuacaccaugagcuuaggcgccgagaacagcguggccuacagcaacaacagcaucgcgaucccuaccaacuucaccaucagcgugaccaccgagauacugcccgugagcaugaccaagaccagcguggacuguaccauguacaucugcggcgacagcaccgagugcagcaaccugcugcugcaguacggcagcuucugcacccagcugaaccgggcccugaccggcaucgccguggagcaggacaagaacacccaagagguguucgcccaggugaagcagaucuacaagacucccccaaucaaggacuucggcggcuucaacuucagccagauccugcccgaccccagcaagcccagcaagcggagcuucaucgaggaccugcuguucaacaaggugacccuggccgacgccggcuucaucaagcaguacggcgacugccugggggauaucgccgcucgggaccugaucugcgcccagaaguucaacggccugaccgugcugcccccucugcugaccgacgagaugaucgcccaguacaccagcgcccugcuugccggcaccaucaccagcggcuggaccuucggcgccggcgcagcccugcagauccccuucgccaugcagauggccuaccgguucaacggcaucggcgugacccagaacgugcuguacgagaaccagaagcugaucgccaaccaguucaacagcgccaucggcaagauccaggacagccugagcagcaccgccagcgcccugggcaagcugcaggacguggugaaccagaacgcucaggcccugaacacccuggugaagcagcugagcagcaacuucggcgccaucagcucagugcugaaugacauccugagcaggcuggaucccccagaggccgaggugcagaucgaccggcugaucaccggccggcugcagagccugcagaccuacgugacccagcagcugauccgggccgccgagauccgggccagcgccaaccuggcagccaccaagaugagcgagugcgugcugggccagagcaagcggguggacuuuugcggcaagggcuaccaccugaugagcuucccccagagcgcuccccacggcgugguguuccuccacgugacauacguccccgcccaggagaagaacuucaccaccgcccccgccauuugccacgacggcaaggcccacuucccccgggagggaguguucgugagcaacggcacccacugguucgugacccagcggaacuucuacgagccucagaucaucaccaccgacaacaccuucgugagcggcaacugcgacguggugaucggcaucgugaacaacaccguguacgacccccugcagcccgagcuggacagcuucaaggaggagcuggacaaguacuucaagaaccacaccagcccagacguggaccugggcgacaucagcggcaucaacgccagcguggugaacauccagaaggagaucgaccggcugaacgagguggccaagaaccugaacgagagccugaucgaccugcaggagcugggcaaguacgagcaguacaucaaguggcccugguacaucuggcugggcuucaucgccggccugaucgccaucgugauggugaccaucaugcugugcugcaugaccagcugcuguagcugccugaagggcugcugcagcugcggcagcugcugcaaguucgacgaggacgacagcgagcccgugcugaagggcgugaagcugcacuacaccugaggacuaguuauaagacugacuagcccgaugggccucccaacgggcccuccuccccuccuugcaccgagauuaaucaaaggcucuuuucagagccaccaaaaaaaaaaaaaaaaaaaaaaaaaaaaaaaaaaaaaaaaaaaaaaaaaaaaaaaaaaaaaaaaaaaaaaaaaaaaaaaaaaaaaaaaaaaaaaaaaaaaa

SEQ ID NO: 24233 - RNA, 4035 nt, Artificial Sequence
  SARS-CoV-2/Wuhan/WIV05/2019__EPI_ISL_402128 spike protein mRNA gc (1-1273)(K986P_V987P_A222V_D614G)
aggagaaagcuuaccauguucguguuccuggugcugcugccccuggugagcagccagugcgugaaccugaccacccggacccagcugcccccugccuacaccaacagcuucacccggggcguguacuaccccgacaagguguuccggagcagcgugcugcacagcacccaggaccuguuccugcccuucuucagcaacgugaccugguuccacgccauccacgugagcggcaccaacggcaccaagcgguucgacaacccagugcugcccuucaacgacggcguguacuucgccagcaccgagaagucaaacaucauccggggcuggaucuucggcaccacccuggacagcaagacacagagccugcugaucgugaacaacgccaccaacguggugaucaaggugugcgaguuucaguucugcaacgaccccuuccugggcguguacuaccacaagaacaacaagagcuggauggagagcgaguuccgggucuacagcagcgcuaacaauugcaccuucgaguacgugagccagcccuuccugauggaccucgagggcaagcagggcaacuucaagaaccugcgggaguucguguucaagaacaucgauggcuacuucaagaucuacagcaagcacacccccaucaaccuggugcgggaccugccccagggauucagcgugcuggagccucugguggaccugcccaucggcaucaacaucaccagguuccagacccugcuggcccugcaccggagcuaccugacccccggcgacagcagcagcggcuggaccgccggcgccgccgccuacuacgugggcuaccugcagccacggaccuuccugcugaaguacaacgagaacggcaccaucaccgacgcaguggacugcgcccuggacccccugagcgagaccaagugcacccuaaagagcuucaccguggagaagggcaucuaccagaccagcaacuuccgggugcagcccacugagagcaucgugcgguuccccaacauuaccaaccugugucccuucggcgagguguucaacgccacccgguucgccagcguguacgccuggaaccggaagcggaucagcaacugcguggccgacuacagcgugcuguacaacagcgccagcuucagcaccuucaagugcuacggcgugagcccuaccaagcugaacgaccugugcuucaccaacguguacgccgacagcuucgugauccggggcgacgaggugcggcagaucgcucccggccagaccggcaagaucgccgacuacaacuacaagcugcccgacgacuucaccggcugcgugaucgccuggaacagcaacaaccuggacagcaaggugggcggcaacuacaacuaccuguaccggcuguuccguaagagcaaccugaagccauucgagcgggacaucagcaccgagaucuaccaggccggcagcacccccugcaacgguguggagggcuuuaacugcuacuucccccugcagagcuacggcuuccagcccaccaacggcgugggcuaccagcccuaccgggugguggugcugagcuucgagcugcugcacgcccccgccaccgugugcggcccuaaaaagagcaccaaccuggugaagaacaagugcgugaacuucaauuucaacggccugaccggcaccggcgugcugaccgagagcaacaagaaguuccugcccuuccagcaguucggccgggauaucgccgacaccaccgacgccgugcgggacccccagacccuggagauccuggacaucaccccaugcagcuucggcggcgucagcgugaucacccccggcacaaacaccagcaaccagguggcagugcuguaccagggagugaacugcaccgaggugcccguggccauccacgccgaccagcugacccccaccuggcggguguacagcaccggcagcaacguguuccagacccgggccggcugccugaucggcgccgagcacgugaacaacuccuacgagugcgacauccccaucggcgccggcaucugcgcuagcuaccagacccagaccaacagcccccggcgggcccggagcguggccagccagagcaucaucgccuacaccaugagcuuaggcgccgagaacagcguggccuacagcaacaacagcaucgccaucccuaccaacuucaccaucagcgugaccaccgagauacugcccgugagcaugaccaagaccagcguggacuguaccauguacaucugcggcgacagcaccgagugcagcaaccugcugcugcaguacggcagcuucugcacccagcugaaccgggcgcugaccggcaucgccguggagcaggacaagaacacccaagagguguucgcccaggugaagcagaucuacaagacucccccaaucaaggacuucggcggcuucaacuucagccagauccugcccgaccccagcaagcccagcaagcggagcuucaucgaggaccugcuguucaacaaggugacccuggccgacgccggcuucaucaagcaguacggcgacugccugggggauaucgccgcccgggaccugaucugcgcucagaaguucaacggccugaccgugcugcccccucugcugaccgacgagaugaucgcccaguacaccagcgcccugcuugccggcaccaucaccagcggcuggaccuucggcgccggcgccgcacugcagauccccuucgccaugcagauggccuaccgguucaacggcaucggcgugacccagaacgugcuguacgagaaccagaagcugaucgccaaccaguucaacagcgccaucggcaagauccaggacagccugagcagcaccgccagcgcccugggcaagcugcaggacguggugaaccagaacgcccaggcucugaacacccuggugaagcagcugagcagcaacuucggcgccaucagcucagugcugaaugacauccugagcaggcuggaucccccagaggccgaggugcagaucgaccggcugaucaccggccggcugcagagccugcagaccuacgugacccagcagcugauccgggccgccgagauccgggccagcgccaaccuggccgcaaccaagaugagcgagugcgugcugggccagagcaagcggguggacuuuugcggcaagggcuaccaccugaugagcuucccccagagcgcuccccacggcgugguguuccuccacgucacauacgugcccgcccaggagaagaacuucaccaccgcccccgccauuugccacgacggcaaggcccacuucccccgggagggaguguucgugagcaacggcacccacugguucgugacccagcggaacuucuacgagccucagaucaucaccaccgacaacaccuucgugagcggcaacugcgacguggugaucggcaucgugaacaacaccguguacgacccccugcagcccgagcuggacagcuucaaggaggagcuggacaaguacuucaagaaccacaccagcccagacguggaccugggcgacaucagcggcaucaacgccagcguggugaacauccagaaggagaucgaccggcugaacgagguggccaagaaccugaacgagagccugaucgaccugcaggagcugggcaaguacgagcaguacaucaaguggcccugguacaucuggcugggcuucaucgccggccugaucgccaucgugauggugaccaucaugcugugcugcaugaccagcugcuguagcugccugaagggcugcugcagcugcggcagcugcugcaaguucgacgaggacgacagcgagcccgugcugaagggcgugaagcugcacuacaccugaggacuaguuauaagacugacuagcccgaugggccucccaacgggcccuccuccccuccuugcaccgagauuaaucaaaggcucuuuucagagccaccaaaaaaaaaaaaaaaaaaaaaaaaaaaaaaaaaaaaaaaaaaaaaaaaaaaaaaaaaaaaaaaaaaaaaaaaaaaaaaaaaaaaaaaaaaaaaaaaaaaaa

SEQ ID NO: 24234 - RNA, 4035 nt, Artificial Sequence
  SARS-CoV-2/Wuhan/WIV05/2019__EPI_ISL_402128 spike protein mRNA gc (1-1273)(K986P_V987P_N439K_D614G)
aggagaaagcuuaccauguucguguuccuggugcugcugccccuggugagcagccagugcgugaaccugaccacccggacccagcugcccccugccuacaccaacagcuucacccggggcguguacuaccccgacaagguguuccggagcagcgugcugcacagcacccaggaccuguuccugcccuucuucagcaacgugaccugguuccacgccauccacgugagcggcaccaacggcaccaagcgguucgacaacccagugcugcccuucaacgacggcguguacuucgccagcaccgagaagucaaacaucauccggggcuggaucuucggcaccacccuggacagcaagacacagagccugcugaucgugaacaacgccaccaacguggugaucaaggugugcgaguuucaguucugcaacgaccccuuccugggcguguacuaccacaagaacaacaagagcuggauggagagcgaguuccgggucuacagcagcgcuaacaauugcaccuucgaguacgugagccagcccuuccugauggaccucgagggcaagcagggcaacuucaagaaccugcgggaguucguguucaagaacaucgauggcuacuucaagaucuacagcaagcacacccccaucaaccuggugcgggaccugccccagggauucagcgcccuggagccucugguggaccugcccaucggcaucaacaucaccagguuccagacccugcuggcccugcaccggagcuaccugacccccggcgacagcagcagcggcuggaccgccggcgccgccgcauacuacgugggcuaccugcagccacggaccuuccugcugaaguacaacgagaacggcaccaucaccgacgccguggacugcgcccuggacccccugagcgagaccaagugcacccuaaagagcuucaccguggagaagggcaucuaccagaccagcaacuuccgggugcagcccacugagagcaucgugcgguuccccaacauuaccaaccugugucccuucggcgagguguucaacgccacccgguucgccagcguguacgccuggaaccggaagcggaucagcaacugcguggccgacuacagcgugcuguacaacagcgccagcuucagcaccuucaagugcuacggcgugagcccuaccaagcugaacgaccugugcuucaccaacguguacgcugacagcuucgugauccggggcgacgaggugcggcagaucgcccccggccagaccggcaagaucgccgacuacaacuacaagcugcccgacgacuucaccggcugcgugaucgccuggaacagcaagaaccuggacagcaaggugggcggcaacuacaacuaccuguaccggcuguuccguaagagcaaccugaagccauucgagcgggacaucagcaccgagaucuaccaggccggcagcacccccugcaacgguguggagggcuuuaacugcuacuucccccugcagagcuacggcuuccagcccaccaacggcgugggcuaccagcccuaccgggugguggugcugagcuucgagcugcugcacgcccccgccaccgugugcggcccuaaaaagagcaccaaccuggugaagaacaagugcgugaacuucaacuucaauggccugaccggcaccggcgugcugaccgagagcaacaagaaguuccugcccuuccagcaguucggccgggauaucgccgacaccaccgacgcagugcgggacccccagacccuggagauccuggacaucaccccaugcagcuucggcggcgugagcgucaucacccccggcacaaacaccagcaaccagguggccgugcuguaccagggagugaacugcaccgaggugcccguggccauccacgccgaccagcugacccccaccuggcggguguacagcaccggcagcaacguguuccagacccgggccggcugccugaucggcgccgagcacgugaacaacuccuacgagugcgacauccccaucggcgcuggcaucugcgccagcuaccagacccagaccaacagcccccggcgggcccggagcguggccagccagagcaucaucgccuacaccaugagcuuaggcgccgagaacagcguggccuacagcaacaacagcaucgcgaucccuaccaacuucaccaucagcgugaccaccgagauacugcccgugagcaugaccaagaccagcguggacuguaccauguacaucugcggcgacagcaccgagugcagcaaccugcugcugcaguacggcagcuucugcacccagcugaaccgggcccugaccggcaucgccguggagcaggacaagaacacccaagagguguucgcccaggugaagcagaucuacaagacucccccaaucaaggacuucggcggcuucaacuucagccagauccugcccgaccccagcaagcccagcaagcggagcuucaucgaggaccugcuguucaacaaggugacccuggccgacgccggcuucaucaagcaguacggcgacugccugggggauaucgccgcucgggaccugaucugcgcccagaaguucaacggccugaccgugcugcccccucugcugaccgacgagaugaucgcccaguacaccagcgcccugcuugccggcaccaucaccagcggcuggaccuucggcgccggcgcagcccugcagauccccuucgccaugcagauggccuaccgguucaacggcaucggcgugacccagaacgugcuguacgagaaccagaagcugaucgccaaccaguucaacagcgccaucggcaagauccaggacagccugagcagcaccgccagcgcccugggcaagcugcaggacguggugaaccagaacgcucaggcccugaacacccuggugaagcagcugagcagcaacuucggcgccaucagcucagugcugaacgacauccugagcaggcuggaucccccagaggccgaggugcagaucgaccggcugaucaccggccggcugcagagccugcagaccuacgugacccagcagcugauccgggccgccgagauccgggccagcgccaaucuggcagccaccaagaugagcgagugcgugcugggccagagcaagcggguggacuuuugcggcaagggcuaccaccugaugagcuucccccagagcgcuccccacggcgugguguuccuccacgugacauacguccccgcccaggagaagaacuucaccaccgcccccgccauuugccacgacggcaaggcccacuucccccgggagggaguguucgugagcaacggcacccacugguucgugacccagcggaacuucuacgagccucagaucaucaccaccgacaacaccuucgugagcggcaacugcgacguggugaucggcaucgugaacaacaccguguacgacccccugcagcccgagcuggacagcuucaaggaggagcuggacaaguacuucaagaaccacaccagcccagacguggaccugggcgacaucagcggcaucaacgccagcguggugaacauccagaaggagaucgaccggcugaacgagguggccaagaaccugaacgagagccugaucgaccugcaggagcugggcaaguacgagcaguacaucaaguggcccugguacaucuggcugggcuucaucgccggccugaucgccaucgugauggugaccaucaugcugugcugcaugaccagcugcuguagcugccugaagggcugcugcagcugcggcagcugcugcaaguucgacgaggacgacagcgagcccgugcugaagggcgugaagcugcacuacaccugaggacuaguuauaagacugacuagcccgaugggccucccaacgggcccuccuccccuccuugcaccgagauuaaucaaaggcucuuuucagagccaccaaaaaaaaaaaaaaaaaaaaaaaaaaaaaaaaaaaaaaaaaaaaaaaaaaaaaaaaaaaaaaaaaaaaaaaaaaaaaaaaaaaaaaaaaaaaaaaaaaaaa

SEQ ID NO: 24235 - RNA, 4035 nt, Artificial Sequence
  SARS-CoV-2/Wuhan/WIV05/2019__EPI_ISL_402128 spike protein mRNA gc (1-1273)(K986P_V987P_S477N_D614G)
aggagaaagcuuaccauguucguguuccuggugcugcugccccuggugagcagccagugcgugaaccugaccacccggacccagcugcccccugccuacaccaacagcuucacccggggcguguacuaccccgacaagguguuccggagcagcgugcugcacagcacccaggaccuguuccugcccuucuucagcaacgugaccugguuccacgccauccacgugagcggcaccaacggcaccaagcgguucgacaacccagugcugcccuucaacgacggcguguacuucgccagcaccgagaagucaaacaucauccggggcuggaucuucggcaccacccuggacagcaagacacagagccugcugaucgugaacaacgccaccaacguggugaucaaggugugcgaguuucaguucugcaacgaccccuuccugggcguguacuaccacaagaacaacaagagcuggauggagagcgaguuccgggucuacagcagcgcuaacaauugcaccuucgaguacgugagccagcccuuccugauggaccucgagggcaagcagggcaacuucaagaaccugcgggaguucguguucaagaacaucgauggcuacuucaagaucuacagcaagcacacccccaucaaccuggugcgggaccugccccagggauucagcgcccuggagccucugguggaccugcccaucggcaucaacaucaccagguuccagacccugcuggcccugcaccggagcuaccugacccccggcgacagcagcagcggcuggaccgccggcgccgccgcauacuacgugggcuaccugcagccacggaccuuccugcugaaguacaacgagaacggcaccaucaccgacgccguggacugcgcccuggacccccugagcgagaccaagugcacccuaaagagcuucaccguggagaagggcaucuaccagaccagcaacuuccgggugcagcccacugagagcaucgugcgguuccccaacauuaccaaccugugucccuucggcgagguguucaacgccacccgguucgccagcguguacgccuggaaccggaagcggaucagcaacugcguggccgacuacagcgugcuguacaacagcgccagcuucagcaccuucaagugcuacggcgugagcccuaccaagcugaacgaccugugcuucaccaacguguacgcugacagcuucgugauccggggcgacgaggugcggcagaucgcccccggccagaccggcaagaucgccgacuacaacuacaagcugcccgacgacuucaccggcugcgugaucgccuggaacagcaacaaccuggacagcaaggugggcggcaacuacaacuaccuguaccggcuguuccguaagagcaaccugaagccauucgagcgggacaucagcaccgagaucuaccaggccggcaacacccccugcaacgguguggagggcuuuaacugcuacuucccccugcagagcuacggcuuccagcccaccaacggcgugggcuaccagcccuaccgggugguggugcugagcuucgagcugcugcacgcccccgccaccgugugcggcccuaaaaagagcaccaaccuggugaagaacaagugcgugaauuucaacuucaacggccugaccggcaccggcgugcugaccgagagcaacaagaaguuccugcccuuccagcaguucggccgggauaucgccgacaccaccgacgcagugcgggacccccagacccuggagauccuggacaucaccccaugcagcuucggcggcgugagcgucaucacccccggcacaaacaccagcaaccagguggccgugcuguaccagggagugaacugcaccgaggugcccguggccauccacgccgaccagcugacccccaccuggcggguguacagcaccggcagcaacguguuccagacccgggccggcugccugaucggcgccgagcacgugaacaacagcuacgagugcgacauccccaucggcgcuggcaucugcgccuccuaccagacccagaccaacagcccccggcgggcccggagcguggccagccagagcaucaucgccuacaccaugagcuuaggcgccgagaacagcguggccuacagcaacaacagcaucgcgaucccuaccaacuucaccaucagcgugaccaccgagauacugcccgugagcaugaccaagaccagcguggacuguaccauguacaucugcggcgacagcaccgagugcagcaaccugcugcugcaguacggcagcuucugcacccagcugaaccgggcccugaccggcaucgccguggagcaggacaagaacacccaagagguguucgcccaggugaagcagaucuacaagacucccccaaucaaggacuucggcggcuucaacuucagccagauccugcccgaccccagcaagcccagcaagcggagcuucaucgaggaccugcuguucaacaaggugacccuggccgacgccggcuucaucaagcaguacggcgacugccugggggauaucgccgcucgggaccugaucugcgcccagaaguucaacggccugaccgugcugcccccucugcugaccgacgagaugaucgcccaguacaccagcgcccugcuugccggcaccaucaccagcggcuggaccuucggcgccggcgcagcccugcagauccccuucgccaugcagauggccuaccgguucaacggcaucggcgugacccagaacgugcuguacgagaaccagaagcugaucgccaaccaguucaacagcgccaucggcaagauccaggacagccugagcagcaccgccagcgcccugggcaagcugcaggacguggugaaccagaacgcucaggcccugaacacccuggugaagcagcugagcagcaauuucggcgccaucagcagcgugcugaacgacauccugucaaggcuggaucccccagaggccgaggugcagaucgaccggcugaucaccggccggcugcagagccugcagaccuacgugacccagcagcugauccgggccgccgagauccgggccagcgccaaccuggcagccaccaagaugagcgagugcgugcugggccagagcaagcggguggacuuuugcggcaagggcuaccaccugaugagcuucccccagagcgcuccccacggcgugguguuccuccacgugacauacguccccgcccaggagaagaacuucaccaccgcccccgccauuugccacgacggcaaggcccacuucccccgggagggaguguucgugagcaacggcacccacugguucgugacccagcggaacuucuacgagccucagaucaucaccaccgacaacaccuucgugagcggcaacugcgacguggugaucggcaucgugaacaacaccguguacgacccccugcagcccgagcuggacagcuucaaggaggagcuggacaaguacuucaagaaccacaccagcccagacguggaccugggcgacaucagcggcaucaacgccagcguggugaacauccagaaggagaucgaccggcugaacgagguggccaagaaccugaacgagagccugaucgaccugcaggagcugggcaaguacgagcaguacaucaaguggcccugguacaucuggcugggcuucaucgccggccugaucgccaucgugauggugaccaucaugcugugcugcaugaccagcugcuguagcugccugaagggcugcugcagcugcggcagcugcugcaaguucgacgaggacgacagcgagcccgugcugaagggcgugaagcugcacuacaccugaggacuaguuauaagacugacuagcccgaugggccucccaacgggcccuccuccccuccuugcaccgagauuaaucaaaggcucuuuucagagccaccaaaaaaaaaaaaaaaaaaaaaaaaaaaaaaaaaaaaaaaaaaaaaaaaaaaaaaaaaaaaaaaaaaaaaaaaaaaaaaaaaaaaaaaaaaaaaaaaaaaaa

SEQ ID NO: 24236 - RNA, 4035 nt, Artificial Sequence
  SARS-CoV-2/Wuhan/WIV05/2019__EPI_ISL_402128 spike protein mRNA gc (1-1273)(K986P_V987P_N501Y_D614G)
aggagaaagcuuaccauguucguguuccuggugcugcugccccuggugagcagccagugcgugaaccugaccacccggacccagcugcccccugccuacaccaacagcuucacccggggcguguacuaccccgacaagguguuccggagcagcgugcugcacagcacccaggaccuguuccugcccuucuucagcaacgugaccugguuccacgccauccacgugagcggcaccaacggcaccaagcgguucgacaacccagugcugcccuucaacgacggcguguacuucgccagcaccgagaagucaaacaucauccggggcuggaucuucggcaccacccuggacagcaagacacagagccugcugaucgugaacaacgccaccaacguggugaucaaggugugcgaguuucaguucugcaacgaccccuuccugggcguguacuaccacaagaacaacaagagcuggauggagagcgaguuccgggucuacagcagcgcuaacaauugcaccuucgaguacgugagccagcccuuccugauggaccucgagggcaagcagggcaacuucaagaaccugcgggaguucguguucaagaacaucgauggcuacuucaagaucuacagcaagcacacccccaucaaccuggugcgggaccugccccagggauucagcgcccuggagccucugguggaccugcccaucggcaucaacaucaccagguuccagacccugcuggcccugcaccggagcuaccugacccccggcgacagcagcagcggcuggaccgccggcgccgccgcauacuacgugggcuaccugcagccacggaccuuccugcugaaguacaacgagaacggcaccaucaccgacgccguggacugcgcccuggacccccugagcgagaccaagugcacccuaaagagcuucaccguggagaagggcaucuaccagaccagcaacuuccgggugcagcccacugagagcaucgugcgguuccccaacauuaccaaccugugucccuucggcgagguguucaacgccacccgguucgccagcguguacgccuggaaccggaagcggaucagcaacugcguggccgacuacagcgugcuguacaacagcgccagcuucagcaccuucaagugcuacggcgugagcccuaccaagcugaacgaccugugcuucaccaacguguacgcugacagcuucgugauccggggcgacgaggugcggcagaucgcccccggccagaccggcaagaucgccgacuacaacuacaagcugcccgacgacuucaccggcugcgugaucgccuggaacagcaacaaccuggacagcaaggugggcggcaacuacaacuaccuguaccggcuguuccguaagagcaaccugaagccauucgagcgggacaucagcaccgagaucuaccaggccggcagcacccccugcaacgguguggagggcuuuaacugcuacuucccccugcagagcuacggcuuccagcccaccuacggcgugggcuaccagcccuaccgggugguggugcugagcuucgagcugcugcacgcccccgccaccgugugcggcccuaaaaagagcaccaaccuggugaagaacaagugcgugaacuucaacuucaauggccugaccggcaccggcgugcugaccgagagcaacaagaaguuccugcccuuccagcaguucggccgggauaucgccgacaccaccgacgcagugcgggacccccagacccuggagauccuggacaucaccccaugcagcuucggcggcgugagcgucaucacccccggcacaaacaccagcaaccagguggccgugcuguaccagggagugaacugcaccgaggugcccguggccauccacgccgaccagcugacccccaccuggcggguguacagcaccggcagcaacguguuccagacccgggccggcugccugaucggcgccgagcacgugaacaacuccuacgagugcgacauccccaucggcgcuggcaucugcgccagcuaccagacccagaccaacagcccccggcgggcccggagcguggccagccagagcaucaucgccuacaccaugagcuuaggcgccgagaacagcguggccuacagcaacaacagcaucgcgaucccuaccaacuucaccaucagcgugaccaccgagauacugcccgugagcaugaccaagaccagcguggacuguaccauguacaucugcggcgacagcaccgagugcagcaaccugcugcugcaguacggcagcuucugcacccagcugaaccgggcccugaccggcaucgccguggagcaggacaagaacacccaagagguguucgcccaggugaagcagaucuacaagacucccccaaucaaggacuucggcggcuucaacuucagccagauccugcccgaccccagcaagcccagcaagcggagcuucaucgaggaccugcuguucaacaaggugacccuggccgacgccggcuucaucaagcaguacggcgacugccugggggauaucgccgcucgggaccugaucugcgcccagaaguucaacggccugaccgugcugcccccucugcugaccgacgagaugaucgcccaguacaccagcgcccugcuugccggcaccaucaccagcggcuggaccuucggcgccggcgcagcccugcagauccccuucgccaugcagauggccuaccgguucaacggcaucggcgugacccagaacgugcuguacgagaaccagaagcugaucgccaaccaguucaacagcgccaucggcaagauccaggacagccugagcagcaccgccagcgcccugggcaagcugcaggacguggugaaccagaacgcucaggcccugaacacccuggugaagcagcugagcagcaacuucggcgccaucagcucagugcugaacgacauccugagcaggcuggaucccccagaggccgaggugcagaucgaccggcugaucaccggccggcugcagagccugcagaccuacgugacccagcagcugauccgggccgccgagauccgggccagcgccaaucuggcagccaccaagaugagcgagugcgugcugggccagagcaagcggguggacuuuugcggcaagggcuaccaccugaugagcuucccccagagcgcuccccacggcgugguguuccuccacgugacauacguccccgcccaggagaagaacuucaccaccgcccccgccauuugccacgacggcaaggcccacuucccccgggagggaguguucgugagcaacggcacccacugguucgugacccagcggaacuucuacgagccucagaucaucaccaccgacaacaccuucgugagcggcaacugcgacguggugaucggcaucgugaacaacaccguguacgacccccugcagcccgagcuggacagcuucaaggaggagcuggacaaguacuucaagaaccacaccagcccagacguggaccugggcgacaucagcggcaucaacgccagcguggugaacauccagaaggagaucgaccggcugaacgagguggccaagaaccugaacgagagccugaucgaccugcaggagcugggcaaguacgagcaguacaucaaguggcccugguacaucuggcugggcuucaucgccggccugaucgccaucgugauggugaccaucaugcugugcugcaugaccagcugcuguagcugccugaagggcugcugcagcugcggcagcugcugcaaguucgacgaggacgacagcgagcccgugcugaagggcgugaagcugcacuacaccugaggacuaguuauaagacugacuagcccgaugggccucccaacgggcccuccuccccuccuugcaccgagauuaaucaaaggcucuuuucagagccaccaaaaaaaaaaaaaaaaaaaaaaaaaaaaaaaaaaaaaaaaaaaaaaaaaaaaaaaaaaaaaaaaaaaaaaaaaaaaaaaaaaaaaaaaaaaaaaaaaaaaa

SEQ ID NO: 24237 - RNA, 4029 nt, Artificial Sequence
  SARS-CoV-2/Wuhan/WIV05/2019__EPI_ISL_402128 spike protein mRNA gc (1-1273)(K986P_V987P_H69del_V70del_D614G)
aggagaaagcuuaccauguucguguuccuggugcugcugccccuggugagcagccagugcgugaaccugaccacccggacccagcugcccccugccuacaccaacagcuucacccggggcguguacuaccccgacaagguguuccggagcagcgugcugcacagcacccaggaccuguuccugcccuucuucagcaacgugaccugguuccacgccaucagcggcaccaacggcaccaagcgguucgacaacccagugcugcccuucaacgacggcguguacuucgccagcaccgagaagucaaacaucauccggggcuggaucuucggcaccacccuggacagcaagacacagagccugcugaucgugaacaacgccaccaacguggugaucaaggugugcgaguuucaguucugcaacgaccccuuccugggcguguacuaccacaagaacaacaagagcuggauggagagcgaguuccggguguacagcagcgcuaacaauugcaccuucgaguacgucagccagcccuuccugauggaccucgagggcaagcagggcaacuucaagaaccugcgggaguucguguucaagaacaucgauggcuacuucaagaucuacagcaagcacacccccaucaaccuggugcgggaccugccccagggauucagcgcccuggagccucugguggaccugcccaucggcaucaacaucaccagguuccagacccugcuggcccugcaccggagcuaccugacccccggcgacagcagcagcggcuggaccgccggcgccgccgcauacuacgugggcuaccugcagccacggaccuuccugcugaaguacaacgagaacggcaccaucaccgacgccguggacugcgcccuggacccccugagcgagaccaagugcacccuaaagagcuucaccguggagaagggcaucuaccagaccagcaacuuccgggugcagcccacugagagcaucgugcgguuccccaacauuaccaaccugugucccuucggcgagguguucaacgccacccgguucgccagcguguacgccuggaaccggaagcggaucagcaacugcguggccgacuacagcgugcuguacaacagcgccagcuucagcaccuucaagugcuacggcgugagcccuaccaagcugaacgaccugugcuucaccaacguguacgcugacagcuucgugauccggggcgacgaggugcggcagaucgcccccggccagaccggcaagaucgccgacuacaacuacaagcugcccgacgacuucaccggcugcgugaucgccuggaacagcaacaaccuggacagcaaggugggcggcaacuacaacuaccuguaccggcuguuccguaagagcaaccugaagccauucgagcgggacaucagcaccgagaucuaccaggccggcagcacccccugcaacgguguggagggcuuuaacugcuacuucccccugcagagcuacggcuuccagcccaccaacggcgugggcuaccagcccuaccgggugguggugcugagcuucgagcugcugcacgcccccgccaccgugugcggcccuaaaaagagcaccaaccuggugaagaacaagugcgugaacuucaauuucaacggccugaccggcaccggcgugcugaccgagagcaacaagaaguuccugcccuuccagcaguucggccgggauaucgccgacaccaccgacgcagugcgggacccccagacccuggagauccuggacaucaccccaugcagcuucggcggcgugagcgugaucacccccggcacaaacaccagcaaccaggucgccgugcuguaccagggagugaacugcaccgaggugcccguggccauccacgccgaccagcugacccccaccuggcggguguacagcaccggcagcaacguguuccagacccgggccggcugccugaucggcgccgagcacgugaacaacuccuacgagugcgacauccccaucggcgcuggcaucugcgccagcuaccagacccagaccaacagcccccggcgggcccggagcguggccagccagagcaucaucgccuacaccaugagcuuaggcgccgagaacagcguggccuacagcaacaacagcaucgcgaucccuaccaacuucaccaucagcgugaccaccgagauacugcccgugagcaugaccaagaccagcguggacuguaccauguacaucugcggcgacagcaccgagugcagcaaccugcugcugcaguacggcagcuucugcacccagcugaaccgggcccugaccggcaucgccguggagcaggacaagaacacccaagagguguucgcccaggugaagcagaucuacaagacucccccaaucaaggacuucggcggcuucaacuucagccagauccugcccgaccccagcaagcccagcaagcggagcuucaucgaggaccugcuguucaacaaggugacccuggccgacgccggcuucaucaagcaguacggcgacugccugggggauaucgccgcucgggaccugaucugcgcccagaaguucaacggccugaccgugcugcccccucugcugaccgacgagaugaucgcccaguacaccagcgcccugcuugccggcaccaucaccagcggcuggaccuucggcgccggcgcagcccugcagauccccuucgccaugcagauggccuaccgguucaacggcaucggcgugacccagaacgugcuguacgagaaccagaagcugaucgccaaccaguucaacagcgccaucggcaagauccaggacagccugagcagcaccgccagcgcccugggcaagcugcaggacguggugaaccagaacgcucaggcccugaacacccuggugaagcagcugagcagcaacuucggcgccaucagcucagugcugaaugacauccugagcaggcuggaucccccagaggccgaggugcagaucgaccggcugaucaccggccggcugcagagccugcagaccuacgugacccagcagcugauccgggccgccgagauccgggccagcgccaaccuggcagccaccaagaugagcgagugcgugcugggccagagcaagcggguggacuuuugcggcaagggcuaccaccugaugagcuucccccagagcgcuccccacggcgugguguuccuccacgugacauacgugcccgcccaggagaagaacuucaccaccgcccccgccauuugccacgacggcaaggcccacuucccccgggagggagucuucgugagcaacggcacccacugguucgugacccagcggaacuucuacgagccucagaucaucaccaccgacaacaccuucgugagcggcaacugcgacguggugaucggcaucgugaacaacaccguguacgacccccugcagcccgagcuggacagcuucaaggaggagcuggacaaguacuucaagaaccacaccagcccagacguggaccugggcgacaucagcggcaucaacgccagcguggugaacauccagaaggagaucgaccggcugaacgagguggccaagaaccugaacgagagccugaucgaccugcaggagcugggcaaguacgagcaguacaucaaguggcccugguacaucuggcugggcuucaucgccggccugaucgccaucgugauggugaccaucaugcugugcugcaugaccagcugcuguagcugccugaagggcugcugcagcugcggcagcugcugcaaguucgacgaggacgacagcgagcccgugcugaagggcgugaagcugcacuacaccugaggacuaguuauaagacugacuagcccgaugggccucccaacgggcccuccuccccuccuugcaccgagauuaaucaaaggcucuuuucagagccaccaaaaaaaaaaaaaaaaaaaaaaaaaaaaaaaaaaaaaaaaaaaaaaaaaaaaaaaaaaaaaaaaaaaaaaaaaaaaaaaaaaaaaaaaaaaaaaaaaaaaa

SEQ ID NO: 24238 - RNA, 4035 nt, Artificial Sequence
  SARS-CoV-2/Wuhan/WIV05/2019__EPI_ISL_402128 spike protein mRNA gc (1-1273)(K986P_V987P_Y453F_D614G)
aggagaaagcuuaccauguucguguuccuggugcugcugccccuggugagcagccagugcgugaaccugaccacccggacccagcugcccccugccuacaccaacagcuucacccggggcguguacuaccccgacaagguguuccggagcagcgugcugcacagcacccaggaccuguuccugcccuucuucagcaacgugaccugguuccacgccauccacgugagcggcaccaacggcaccaagcgguucgacaacccagugcugcccuucaacgacggcguguacuucgccagcaccgagaagucaaacaucauccggggcuggaucuucggcaccacccuggacagcaagacacagagccugcugaucgugaacaacgccaccaacguggugaucaaggugugcgaguuucaguucugcaacgaccccuuccugggcguguacuaccacaagaacaacaagagcuggauggagagcgaguuccgggucuacagcagcgcuaacaauugcaccuucgaguacgugagccagcccuuccugauggaccucgagggcaagcagggcaacuucaagaaccugcgggaguucguguucaagaacaucgauggcuacuucaagaucuacagcaagcacacccccaucaaccuggugcgggaccugccccagggauucagcgcccuggagccucugguggaccugcccaucggcaucaacaucaccagguuccagacccugcuggcccugcaccggagcuaccugacccccggcgacagcagcagcggcuggaccgccggcgccgccgcauacuacgugggcuaccugcagccacggaccuuccugcugaaguacaacgagaacggcaccaucaccgacgccguggacugcgcccuggacccccugagcgagaccaagugcacccuaaagagcuucaccguggagaagggcaucuaccagaccagcaacuuccgggugcagcccacugagagcaucgugcgguuccccaacauuaccaaccugugucccuucggcgagguguucaacgccacccgguucgccagcguguacgccuggaaccggaagcggaucagcaacugcguggccgacuacagcgugcuguacaacagcgccagcuucagcaccuucaagugcuacggcgugagcccuaccaagcugaacgaccugugcuucaccaacguguacgcugacagcuucgugauccggggcgacgaggugcggcagaucgcccccggccagaccggcaagaucgccgacuacaacuacaagcugcccgacgacuucaccggcugcgugaucgccuggaacagcaacaaccuggacagcaaggugggcggcaacuacaacuaccuguuccggcuguuccguaagagcaaccugaagccauuugagcgggacaucagcaccgagaucuaccaggccggcagcacccccugcaacgguguggagggcuucaacugcuacuucccccugcagagcuacggcuuccagcccaccaacggcgugggcuaccagcccuaccgggugguggugcugagcuucgagcugcugcacgcccccgccaccgugugcggcccuaaaaagagcaccaaccuggugaagaacaagugcgugaacuucaauuucaacggccugaccggcaccggcgugcugaccgagagcaacaagaaguuccugcccuuccagcaguucggccgggauaucgccgacaccaccgacgcagugcgggacccccagacccuggagauccuggacaucaccccaugcagcuucggcggcgugagcgucaucacccccggcacaaacaccagcaaccagguggccgugcuguaccagggagugaacugcaccgaggugcccguggccauccacgccgaccagcugacccccaccuggcggguguacagcaccggcagcaacguguuccagacccgggccggcugccugaucggcgccgagcacgugaacaacuccuacgagugcgacauccccaucggcgcuggcaucugcgccagcuaccagacccagaccaacagcccccggcgggcccggagcguggccagccagagcaucaucgccuacaccaugagcuuaggcgccgagaacagcguggccuacagcaacaacagcaucgcgaucccuaccaacuucaccaucagcgugaccaccgagauacugcccgugagcaugaccaagaccagcguggacuguaccauguacaucugcggcgacagcaccgagugcagcaaccugcugcugcaguacggcagcuucugcacccagcugaaccgggcccugaccggcaucgccguggagcaggacaagaacacccaagagguguucgcccaggugaagcagaucuacaagacucccccaaucaaggacuucggcggcuucaacuucagccagauccugcccgaccccagcaagcccagcaagcggagcuucaucgaggaccugcuguucaacaaggugacccuggccgacgccggcuucaucaagcaguacggcgacugccugggggauaucgccgcucgggaccugaucugcgcccagaaguucaacggccugaccgugcugcccccucugcugaccgacgagaugaucgcccaguacaccagcgcccugcuugccggcaccaucaccagcggcuggaccuucggcgccggcgcagcccugcagauccccuucgccaugcagauggccuaccgguucaacggcaucggcgugacccagaacgugcuguacgagaaccagaagcugaucgccaaccaguucaacagcgccaucggcaagauccaggacagccugagcagcaccgccagcgcccugggcaagcugcaggacguggugaaccagaacgcucaggcccugaacacccuggugaagcagcugagcagcaacuuuggcgccaucagcucagugcugaaugacauccugagcaggcuggaucccccagaggccgaggugcagaucgaccggcugaucaccggccggcugcagagccugcagaccuacgugacccagcagcugauccgggccgccgagauccgggccagcgccaaccuggcagccaccaagaugagcgagugcgugcugggccagagcaagcggguggacuucugcggcaagggcuaccaccugaugagcuucccccagagcgcuccccacggcgugguguuccuccacgugacauacguccccgcccaggagaagaacuucaccaccgcccccgccauuugccacgacggcaaggcccacuucccccgggagggaguguucgugagcaacggcacccacugguucgugacccagcggaacuucuacgagccucagaucaucaccaccgacaacaccuucgugagcggcaacugcgacguggugaucggcaucgugaacaacaccguguacgacccccugcagcccgagcuggacagcuucaaggaggagcuggacaaguacuucaagaaccacaccagcccagacguggaccugggcgacaucagcggcaucaacgccagcguggugaacauccagaaggagaucgaccggcugaacgagguggccaagaaccugaacgagagccugaucgaccugcaggagcugggcaaguacgagcaguacaucaaguggcccugguacaucuggcugggcuucaucgccggccugaucgccaucgugauggugaccaucaugcugugcugcaugaccagcugcuguagcugccugaagggcugcugcagcugcggcagcugcugcaaguucgacgaggacgacagcgagcccgugcugaagggcgugaagcugcacuacaccugaggacuaguuauaagacugacuagcccgaugggccucccaacgggcccuccuccccuccuugcaccgagauuaaucaaaggcucuuuucagagccaccaaaaaaaaaaaaaaaaaaaaaaaaaaaaaaaaaaaaaaaaaaaaaaaaaaaaaaaaaaaaaaaaaaaaaaaaaaaaaaaaaaaaaaaaaaaaaaaaaaaaa

SEQ ID NO: 24239 - RNA, 4035 nt, Artificial Sequence
  SARS-CoV-2/Wuhan/WIV05/2019__EPI_ISL_402128 spike protein mRNA gc (1-1273)(K986P_V987P_D614G_I692V)
aggagaaagcuuaccauguucguguuccuggugcugcugccccuggugagcagccagugcgugaaccugaccacccggacccagcugcccccugccuacaccaacagcuucacccggggcguguacuaccccgacaagguguuccggagcagcgugcugcacagcacccaggaccuguuccugcccuucuucagcaacgugaccugguuccacgccauccacgugagcggcaccaacggcaccaagcgguucgacaacccagugcugcccuucaacgacggcguguacuucgccagcaccgagaagucaaacaucauccggggcuggaucuucggcaccacccuggacagcaagacacagagccugcugaucgugaacaacgccaccaacguggugaucaaggugugcgaguuucaguucugcaacgaccccuuccugggcguguacuaccacaagaacaacaagagcuggauggagagcgaguuccgggucuacagcagcgcuaacaauugcaccuucgaguacgugagccagcccuuccugauggaccucgagggcaagcagggcaacuucaagaaccugcgggaguucguguucaagaacaucgauggcuacuucaagaucuacagcaagcacacccccaucaaccuggugcgggaccugccccagggauucagcgcccuggagccucugguggaccugcccaucggcaucaacaucaccagguuccagacccugcuggcccugcaccggagcuaccugacccccggcgacagcagcagcggcuggaccgccggcgccgccgcauacuacgugggcuaccugcagccacggaccuuccugcugaaguacaacgagaacggcaccaucaccgacgccguggacugcgcccuggacccccugagcgagaccaagugcacccuaaagagcuucaccguggagaagggcaucuaccagaccagcaacuuccgggugcagcccacugagagcaucgugcgguuccccaacauuaccaaccugugucccuucggcgagguguucaacgccacccgguucgccagcguguacgccuggaaccggaagcggaucagcaacugcguggccgacuacagcgugcuguacaacagcgccagcuucagcaccuucaagugcuacggcgugagcccuaccaagcugaacgaccugugcuucaccaacguguacgcugacagcuucgugauccggggcgacgaggugcggcagaucgcccccggccagaccggcaagaucgccgacuacaacuacaagcugcccgacgacuucaccggcugcgugaucgccuggaacagcaacaaccuggacagcaaggugggcggcaacuacaacuaccuguaccggcuguuccguaagagcaaccugaagccauucgagcgggacaucagcaccgagaucuaccaggccggcagcacccccugcaacgguguggagggcuuuaacugcuacuucccccugcagagcuacggcuuccagcccaccaacggcgugggcuaccagcccuaccgggugguggugcugagcuucgagcugcugcacgcccccgccaccgugugcggcccuaaaaagagcaccaaccuggugaagaacaagugcgugaacuucaauuucaacggccugaccggcaccggcgugcugaccgagagcaacaagaaguuccugcccuuccagcaguucggccgggauaucgccgacaccaccgacgcagugcgggacccccagacccuggagauccuggacaucaccccaugcagcuucggcggcgugagcgucaucacccccggcacaaacaccagcaaccagguggccgugcuguaccagggagugaacugcaccgaggugcccguggccauccacgccgaccagcugacccccaccuggcggguguacagcaccggcagcaacguguuccagacccgggccggcugccugaucggcgccgagcacgugaacaacuccuacgagugcgacauccccaucggcgcuggcaucugcgccagcuaccagacccagaccaacagcccccggcgggcccggagcguggccagccagagcgugaucgccuacaccaugagcuuaggcgccgagaacagcguggccuacagcaacaacagcaucgcgaucccuaccaacuucaccaucagcgugaccaccgagauccugcccgugagcaugaccaagaccagcguggacuguaccauguacauaugcggcgacagcaccgagugcagcaaccugcugcugcaguacggcagcuucugcacccagcugaaccgggcccugaccggcaucgccguggagcaggacaagaacacccaagagguguucgcccaggugaagcagaucuacaagacucccccaaucaaggacuucggcggcuucaacuucagccagauccugcccgaccccagcaagcccagcaagcggagcuucaucgaggaccugcuguucaacaaggugacccuggccgacgccggcuucaucaagcaguacggcgacugccugggggauaucgccgcucgggaccugaucugcgcccagaaguucaacggccugaccgugcugcccccucugcugaccgacgagaugaucgcccaguacaccagcgcccugcuugccggcaccaucaccagcggcuggaccuucggcgccggcgcagcccugcagauccccuucgccaugcagauggccuaccgguucaacggcaucggcgugacccagaacgugcuguacgagaaccagaagcugaucgccaaccaguucaacagcgccaucggcaagauccaggacagccugagcagcaccgccagcgcccugggcaagcugcaggacguggugaaccagaacgcucaggcccugaacacccuggugaagcagcugagcagcaacuucggcgccaucagcucagugcugaaugacauccugagcaggcuggaucccccagaggccgaggugcagaucgaccggcugaucaccggccggcugcagagccugcagaccuacgugacccagcagcugauccgggccgccgagauccgggccagcgccaaccuggcagccaccaagaugagcgagugcgugcugggccagagcaagcggguggacuuuugcggcaagggcuaccaccugaugagcuucccccagagcgcuccccacggcgugguguuccuccacgucacauacgugcccgcccaggagaagaacuucaccaccgcccccgccaucugccacgacggcaaggcccacuucccccgggagggaguguucgugagcaacggcacccacugguucgugacccagcggaacuucuacgagccucagauuaucaccaccgacaacaccuucgugagcggcaacugcgacguggugaucggcaucgugaacaacaccguguacgacccccugcagcccgagcuggacagcuucaaggaggagcuggacaaguacuucaagaaccacaccagcccagacguggaccugggcgacaucagcggcaucaacgccagcguggugaacauccagaaggagaucgaccggcugaacgagguggccaagaaccugaacgagagccugaucgaccugcaggagcugggcaaguacgagcaguacaucaaguggcccugguacaucuggcugggcuucaucgccggccugaucgccaucgugauggugaccaucaugcugugcugcaugaccagcugcuguagcugccugaagggcugcugcagcugcggcagcugcugcaaguucgacgaggacgacagcgagcccgugcugaagggcgugaagcugcacuacaccugaggacuaguuauaagacugacuagcccgaugggccucccaacgggcccuccuccccuccuugcaccgagauuaaucaaaggcucuuuucagagccaccaaaaaaaaaaaaaaaaaaaaaaaaaaaaaaaaaaaaaaaaaaaaaaaaaaaaaaaaaaaaaaaaaaaaaaaaaaaaaaaaaaaaaaaaaaaaaaaaaaaaa

SEQ ID NO: 24240 - RNA, 4035 nt, Artificial Sequence
  SARS-CoV-2/Wuhan/WIV05/2019__EPI_ISL_402128 spike protein mRNA gc (1-1273)(K986P_V987P_D614G_M1229I)
aggagaaagcuuaccauguucguguuccuggugcugcugccccuggugagcagccagugcgugaaccugaccacccggacccagcugcccccugccuacaccaacagcuucacccggggcguguacuaccccgacaagguguuccggagcagcgugcugcacagcacccaggaccuguuccugcccuucuucagcaacgugaccugguuccacgccauccacgugagcggcaccaacggcaccaagcgguucgacaacccagugcugcccuucaacgacggcguguacuucgccagcaccgagaagucaaacaucauccggggcuggaucuucggcaccacccuggacagcaagacacagagccugcugaucgugaacaacgccaccaacguggugaucaaggugugcgaguuucaguucugcaacgaccccuuccugggcguguacuaccacaagaacaacaagagcuggauggagagcgaguuccgggucuacagcagcgcuaacaauugcaccuucgaguacgugagccagcccuuccugauggaccucgagggcaagcagggcaacuucaagaaccugcgggaguucguguucaagaacaucgauggcuacuucaagaucuacagcaagcacacccccaucaaccuggugcgggaccugccccagggauucagcgcccuggagccucugguggaccugcccaucggcaucaacaucaccagguuccagacccugcuggcccugcaccggagcuaccugacccccggcgacagcagcagcggcuggaccgccggcgccgccgcauacuacgugggcuaccugcagccacggaccuuccugcugaaguacaacgagaacggcaccaucaccgacgccguggacugcgcccuggacccccugagcgagaccaagugcacccuaaagagcuucaccguggagaagggcaucuaccagaccagcaacuuccgggugcagcccacugagagcaucgugcgguuccccaacauuaccaaccugugucccuucggcgagguguucaacgccacccgguucgccagcguguacgccuggaaccggaagcggaucagcaacugcguggccgacuacagcgugcuguacaacagcgccagcuucagcaccuucaagugcuacggcgugagcccuaccaagcugaacgaccugugcuucaccaacguguacgcugacagcuucgugauccggggcgacgaggugcggcagaucgcccccggccagaccggcaagaucgccgacuacaacuacaagcugcccgacgacuucaccggcugcgugaucgccuggaacagcaacaaccuggacagcaaggugggcggcaacuacaacuaccuguaccggcuguuccguaagagcaaccugaagccauucgagcgggacaucagcaccgagaucuaccaggccggcagcacccccugcaacgguguggagggcuuuaacugcuacuucccccugcagagcuacggcuuccagcccaccaacggcgugggcuaccagcccuaccgggugguggugcugagcuucgagcugcugcacgcccccgccaccgugugcggcccuaaaaagagcaccaaccuggugaagaacaagugcgugaacuucaauuucaacggccugaccggcaccggcgugcugaccgagagcaacaagaaguuccugcccuuccagcaguucggccgggauaucgccgacaccaccgacgcagugcgggacccccagacccuggagauccuggacaucaccccaugcagcuucggcggcgugagcgucaucacccccggcacaaacaccagcaaccagguggccgugcuguaccagggagugaacugcaccgaggugcccguggccauccacgccgaccagcugacccccaccuggcggguguacagcaccggcagcaacguguuccagacccgggccggcugccugaucggcgccgagcacgugaacaacuccuacgagugcgacauccccaucggcgcuggcaucugcgccagcuaccagacccagaccaacagcccccggcgggcccggagcguggccagccagagcaucaucgccuacaccaugagcuuaggcgccgagaacagcguggccuacagcaacaacagcaucgcgaucccuaccaacuucaccaucagcgugaccaccgagauacugcccgugagcaugaccaagaccagcguggacuguaccauguacaucugcggcgacagcaccgagugcagcaaccugcugcugcaguacggcagcuucugcacccagcugaaccgggcccugaccggcaucgccguggagcaggacaagaacacccaagagguguucgcccaggugaagcagaucuacaagacucccccaaucaaggacuucggcggcuucaacuucagccagauccugcccgaccccagcaagcccagcaagcggagcuucaucgaggaccugcuguucaacaaggugacccuggccgacgccggcuucaucaagcaguacggcgacugccugggggauaucgccgcucgggaccugaucugcgcccagaaguucaacggccugaccgugcugcccccucugcugaccgacgagaugaucgcccaguacaccagcgcccugcuugccggcaccaucaccagcggcuggaccuucggcgccggcgcagcccugcagauccccuucgccaugcagauggccuaccgguucaacggcaucggcgugacccagaacgugcuguacgagaaccagaagcugaucgccaaccaguucaacagcgccaucggcaagauccaggacagccugagcagcaccgccagcgcccugggcaagcugcaggacguggugaaccagaacgcucaggcccugaacacccuggugaagcagcugagcagcaacuucggcgccaucagcucagugcugaaugacauccugagcaggcuggaucccccagaggccgaggugcagaucgaccggcugaucaccggccggcugcagagccugcagaccuacgugacccagcagcugauccgggccgccgagauccgggccagcgccaaccuggcagccaccaagaugagcgagugcgugcugggccagagcaagcggguggacuuuugcggcaagggcuaccaccugaugagcuucccccagagcgcuccccacggcgugguguuccuccacgugacauacguccccgcccaggagaagaacuucaccaccgcccccgccauuugccacgacggcaaggcccacuucccccgggagggaguguucgugagcaacggcacccacugguucgugacccagcggaacuucuacgagccucagaucaucaccaccgacaacaccuucgugagcggcaacugcgacguggugaucggcaucgugaacaacaccguguacgacccccugcagcccgagcuggacagcuucaaggaggagcuggacaaguacuucaagaaccacaccagcccagacguggaccugggcgacaucagcggcaucaacgccagcguggugaacauccagaaggagaucgaccggcugaacgagguggccaagaaccugaacgagagccugaucgaccugcaggagcugggcaaguacgagcaguacaucaaguggcccugguacaucuggcugggcuucaucgccggccugaucgccaucgugaucgugaccaucaugcugugcugcaugaccagcugcuguagcugccugaagggcugcugcagcugcggcagcugcugcaaguucgacgaggacgacagcgagcccgugcugaagggcgugaagcugcacuacaccugaggacuaguuauaagacugacuagcccgaugggccucccaacgggcccuccuccccuccuugcaccgagauuaaucaaaggcucuuuucagagccaccaaaaaaaaaaaaaaaaaaaaaaaaaaaaaaaaaaaaaaaaaaaaaaaaaaaaaaaaaaaaaaaaaaaaaaaaaaaaaaaaaaaaaaaaaaaaaaaaaaaaa

SEQ ID NO: 24241 - RNA, 4029 nt, Artificial Sequence
  SARS-CoV-2/Wuhan/WIV05/2019__EPI_ISL_402128 spike protein mRNA gc (1-1273)(K986P_V987P_H69del_V70del_A222V_Y453F_S477N_D614G_I692V)
aggagaaagcuuaccauguucguguuccuggugcugcugccccuggugagcagccagugcgugaaccugaccacccggacccagcugcccccugccuacaccaacagcuucacccggggcguguacuaccccgacaagguguuccggagcagcgugcugcacagcacccaggaccuguuccugcccuucuucagcaacgugaccugguuccacgccaucagcggcaccaacggcaccaagcgguucgacaacccagugcugcccuucaacgacggcguguacuucgccagcaccgagaagucaaacaucauccggggcuggaucuucggcaccacccuggacagcaagacacagagccugcugaucgugaacaacgccaccaacguggugaucaaggugugcgaguuucaguucugcaacgaccccuuccugggcguguacuaccacaagaacaacaagagcuggauggagagcgaguuccggguguacagcagcgcuaacaauugcaccuucgaguacgucagccagcccuuccugauggaccucgagggcaagcagggcaacuucaagaaccugcgggaguucguguucaagaacaucgauggcuacuucaagaucuacagcaagcacacccccaucaaccuggugcgggaccugccccagggauucagcgugcuggagccucugguggaccugcccaucggcaucaacaucaccagguuccagacccugcuggcccugcaccggagcuaccugacccccggcgacagcagcagcggcuggaccgccggcgccgccgccuacuacgugggcuaccugcagccacggaccuuccugcugaaguacaacgagaacggcaccaucaccgacgcaguggacugcgcccuggacccccugagcgagaccaagugcacccuaaagagcuucaccguggagaagggcaucuaccagaccagcaacuuccgggugcagcccacugagagcaucgugcgguuccccaacauuaccaaccugugucccuucggcgagguguucaacgccacccgguucgccagcguguacgccuggaaccggaagcggaucagcaacugcguggccgacuacagcgugcuguacaacagcgccagcuucagcaccuucaagugcuacggcgugagcccuaccaagcugaacgaccugugcuucaccaacguguacgccgacagcuucgugauccggggcgacgaggugcggcagaucgcucccggccagaccggcaagaucgccgacuacaacuacaagcugcccgacgacuucaccggcugcgugaucgccuggaacagcaacaaccuggacagcaaggugggcggcaacuacaacuaccuguuccggcuguuccguaagagcaaccugaagccauuugagcgggacaucagcaccgagaucuaccaggccggcaacacccccugcaacgguguggagggcuucaacugcuacuucccccugcagagcuacggcuuccagcccaccaacggcgugggcuaccagcccuaccgggugguggugcugagcuucgagcugcugcacgcccccgccaccgugugcggcccuaaaaagagcaccaaccuggugaagaacaagugcgugaauuucaacuucaacggccugaccggcaccggcgugcugaccgagagcaacaagaaguuccugcccuuccagcaguucggccgggauaucgccgacaccaccgacgccgugcgggacccccagacccuggagauccuggacaucaccccaugcagcuucggcggcgugagcgucaucacccccggcacaaacaccagcaaccagguggcagugcuguaccagggagugaacugcaccgaggugcccguggccauccacgccgaccagcugacccccaccuggcggguguacagcaccggcagcaacguguuccagacccgggccggcugccugaucggcgccgagcacgugaacaacagcuacgagugcgacauccccaucggcgccggcaucugcgcuuccuaccagacccagaccaacagcccccggcgggcccggagcguggccagccagagcgugaucgccuacaccaugagcuuaggcgccgagaacagcguggccuacagcaacaacagcaucgccaucccuaccaacuucaccaucagcgugaccaccgagauccugcccgugagcaugaccaagaccagcguggacuguaccauguacauaugcggcgacagcaccgagugcagcaaccugcugcugcaguacggcagcuucugcacccagcugaaccgggcgcugaccggcaucgccguggagcaggacaagaacacccaagagguguucgcccaggugaagcagaucuacaagacucccccaaucaaggacuucggcggcuucaacuucagccagauccugcccgaccccagcaagcccagcaagcggagcuucaucgaggaccugcuguucaacaaggugacccuggccgacgccggcuucaucaagcaguacggcgacugccugggggauaucgccgcccgggaccugaucugcgcucagaaguucaacggccugaccgugcugcccccucugcugaccgacgagaugaucgcccaguacaccagcgcccugcuugccggcaccaucaccagcggcuggaccuucggcgccggcgccgcacugcagauccccuucgccaugcagauggccuaccgguucaacggcaucggcgugacccagaacgugcuguacgagaaccagaagcugaucgccaaccaguucaacagcgccaucggcaagauccaggacagccugagcagcaccgccagcgcccugggcaagcugcaggacguggugaaccagaacgcccaggcucugaacacccuggugaagcagcugagcagcaauuuuggcgccaucagcagcgugcugaacgacauccugucaaggcuggaucccccagaggccgaggugcagaucgaccggcugaucaccggccggcugcagagccugcagaccuacgugacccagcagcugauccgggccgccgagauccgggccagcgccaaccuggccgcaaccaagaugagcgagugcgugcugggccagagcaagcggguggacuucugcggcaagggcuaccaccugaugagcuucccccagagcgcuccccacggcgugguguuccuccacgucacauacgugcccgcccaggagaagaacuucaccaccgcccccgccaucugccacgacggcaaggcccacuucccccgggagggaguguucgugagcaacggcacccacugguucgugacccagcggaacuucuacgagccucagauuaucaccaccgacaacaccuucgugagcggcaacugcgacguggugaucggcaucgugaacaacaccguguacgacccccugcagcccgagcuggacagcuucaaggaggagcuggacaaguacuucaagaaccacaccagcccagacguggaccugggcgacaucagcggcaucaacgccagcguggugaacauccagaaggagaucgaccggcugaacgagguggccaagaaccugaacgagagccugaucgaccugcaggagcugggcaaguacgagcaguacaucaaguggcccugguacaucuggcugggcuucaucgccggccugaucgccaucgugauggugaccaucaugcugugcugcaugaccagcugcuguagcugccugaagggcugcugcagcugcggcagcugcugcaaguucgacgaggacgacagcgagcccgugcugaagggcgugaagcugcacuacaccugaggacuaguuauaagacugacuagcccgaugggccucccaacgggcccuccuccccuccuugcaccgagauuaaucaaaggcucuuuucagagccaccaaaaaaaaaaaaaaaaaaaaaaaaaaaaaaaaaaaaaaaaaaaaaaaaaaaaaaaaaaaaaaaaaaaaaaaaaaaaaaaaaaaaaaaaaaaaaaaaaaaaa

SEQ ID NO: 24242 - RNA, 4029 nt, Artificial Sequence
  SARS-CoV-2/Wuhan/WIV05/2019__EPI_ISL_402128 spike protein mRNA gc (1-1273)(K986P_V987P_H69del_V70del_Y453F_D614G_I692V_M1229I)
aggagaaagcuuaccauguucguguuccuggugcugcugccccuggugagcagccagugcgugaaccugaccacccggacccagcugcccccugccuacaccaacagcuucacccggggcguguacuaccccgacaagguguuccggagcagcgugcugcacagcacccaggaccuguuccugcccuucuucagcaacgugaccugguuccacgccaucagcggcaccaacggcaccaagcgguucgacaacccagugcugcccuucaacgacggcguguacuucgccagcaccgagaagucaaacaucauccggggcuggaucuucggcaccacccuggacagcaagacacagagccugcugaucgugaacaacgccaccaacguggugaucaaggugugcgaguuucaguucugcaacgaccccuuccugggcguguacuaccacaagaacaacaagagcuggauggagagcgaguuccggguguacagcagcgcuaacaauugcaccuucgaguacgucagccagcccuuccugauggaccucgagggcaagcagggcaacuucaagaaccugcgggaguucguguucaagaacaucgauggcuacuucaagaucuacagcaagcacacccccaucaaccuggugcgggaccugccccagggauucagcgcccuggagccucugguggaccugcccaucggcaucaacaucaccagguuccagacccugcuggcccugcaccggagcuaccugacccccggcgacagcagcagcggcuggaccgccggcgccgccgcauacuacgugggcuaccugcagccacggaccuuccugcugaaguacaacgagaacggcaccaucaccgacgccguggacugcgcccuggacccccugagcgagaccaagugcacccuaaagagcuucaccguggagaagggcaucuaccagaccagcaacuuccgggugcagcccacugagagcaucgugcgguuccccaacauuaccaaccugugucccuucggcgagguguucaacgccacccgguucgccagcguguacgccuggaaccggaagcggaucagcaacugcguggccgacuacagcgugcuguacaacagcgccagcuucagcaccuucaagugcuacggcgugagcccuaccaagcugaacgaccugugcuucaccaacguguacgcugacagcuucgugauccggggcgacgaggugcggcagaucgcccccggccagaccggcaagaucgccgacuacaacuacaagcugcccgacgacuucaccggcugcgugaucgccuggaacagcaacaaccuggacagcaaggugggcggcaacuacaacuaccuguuccggcuguuccguaagagcaaccugaagccauuugagcgggacaucagcaccgagaucuaccaggccggcagcacccccugcaacgguguggagggcuucaacugcuacuucccccugcagagcuacggcuuccagcccaccaacggcgugggcuaccagcccuaccgggugguggugcugagcuucgagcugcugcacgcccccgccaccgugugcggcccuaaaaagagcaccaaccuggugaagaacaagugcgugaacuucaauuucaacggccugaccggcaccggcgugcugaccgagagcaacaagaaguuccugcccuuccagcaguucggccgggauaucgccgacaccaccgacgcagugcgggacccccagacccuggagauccuggacaucaccccaugcagcuucggcggcgugagcgugaucacccccggcacaaacaccagcaaccaggucgccgugcuguaccagggagugaacugcaccgaggugcccguggccauccacgccgaccagcugacccccaccuggcggguguacagcaccggcagcaacguguuccagacccgggccggcugccugaucggcgccgagcacgugaacaacuccuacgagugcgacauccccaucggcgcuggcaucugcgccagcuaccagacccagaccaacagcccccggcgggcccggagcguggccagccagagcgugaucgccuacaccaugagcuuaggcgccgagaacagcguggccuacagcaacaacagcaucgcgaucccuaccaacuucaccaucagcgugaccaccgagauccugcccgugagcaugaccaagaccagcguggacuguaccauguacauaugcggcgacagcaccgagugcagcaaccugcugcugcaguacggcagcuucugcacccagcugaaccgggcccugaccggcaucgccguggagcaggacaagaacacccaagagguguucgcccaggugaagcagaucuacaagacucccccaaucaaggacuucggcggcuucaacuucagccagauccugcccgaccccagcaagcccagcaagcggagcuucaucgaggaccugcuguucaacaaggugacccuggccgacgccggcuucaucaagcaguacggcgacugccugggggauaucgccgcucgggaccugaucugcgcccagaaguucaacggccugaccgugcugcccccucugcugaccgacgagaugaucgcccaguacaccagcgcccugcuugccggcaccaucaccagcggcuggaccuucggcgccggcgcagcccugcagauccccuucgccaugcagauggccuaccgguucaacggcaucggcgugacccagaacgugcuguacgagaaccagaagcugaucgccaaccaguucaacagcgccaucggcaagauccaggacagccugagcagcaccgccagcgcccugggcaagcugcaggacguggugaaccagaacgcucaggcccugaacacccuggugaagcagcugagcagcaacuuuggcgccaucagcucagugcugaaugacauccugagcaggcuggaucccccagaggccgaggugcagaucgaccggcugaucaccggccggcugcagagccugcagaccuacgugacccagcagcugauccgggccgccgagauccgggccagcgccaaccuggcagccaccaagaugagcgagugcgugcugggccagagcaagcggguggacuucugcggcaagggcuaccaccugaugagcuucccccagagcgcuccccacggcgugguguuccuccacgugacauacguccccgcccaggagaagaacuucaccaccgcccccgccaucugccacgacggcaaggcccacuucccccgggagggaguguucgugagcaacggcacccacugguucgugacccagcggaacuucuacgagccucagauuaucaccaccgacaacaccuucgugagcggcaacugcgacguggugaucggcaucgugaacaacaccguguacgacccccugcagcccgagcuggacagcuucaaggaggagcuggacaaguacuucaagaaccacaccagcccagacguggaccugggcgacaucagcggcaucaacgccagcguggugaacauccagaaggagaucgaccggcugaacgagguggccaagaaccugaacgagagccugaucgaccugcaggagcugggcaaguacgagcaguacaucaaguggcccugguacaucuggcugggcuucaucgccggccugaucgccaucgugaucgugaccaucaugcugugcugcaugaccagcugcuguagcugccugaagggcugcugcagcugcggcagcugcugcaaguucgacgaggacgacagcgagcccgugcugaagggcgugaagcugcacuacaccugaggacuaguuauaagacugacuagcccgaugggccucccaacgggcccuccuccccuccuugcaccgagauuaaucaaaggcucuuuucagagccaccaaaaaaaaaaaaaaaaaaaaaaaaaaaaaaaaaaaaaaaaaaaaaaaaaaaaaaaaaaaaaaaaaaaaaaaaaaaaaaaaaaaaaaaaaaaaaaaaaaaaa

SEQ ID NO: 24243 - RNA, 4026 nt, Artificial Sequence
  SARS-CoV-2/Wuhan/WIV05/2019__EPI_ISL_402128 spike protein mRNA gc (1-1273)(K986P_V987P_K986P_V987P_H69del_V70del_Y144del_N501Y_A570 D_D614G_P681H_T716I_S982A_D1118H)
aggagaaagcuuaccauguucguguuccuggugcugcugccccuggugagcagccagugcgugaaccugaccacccggacccagcugcccccugccuacaccaacagcuucacccggggcguguacuaccccgacaagguguuccggagcagcgugcugcacagcacccaggaccuguuccugcccuucuucagcaacgugaccugguuccacgccaucagcggcaccaacggcaccaagcgguucgacaacccagugcugcccuucaacgacggcguguacuucgccagcaccgagaagucaaacaucauccggggcuggaucuucggcaccacccuggacagcaagacacagagccugcugaucgugaacaacgccaccaacguggugaucaaggugugcgaguuucaguucugcaacgaccccuuccugggcguguaccacaagaacaacaagagcuggauggagagcgaguuccggguguacagcagcgcuaacaauugcaccuucgaguacgucagccagcccuuccugauggaccucgagggcaagcagggcaacuucaagaaccugcgggaguucguguucaagaacaucgauggcuacuucaagaucuacagcaagcacacccccaucaaccuggugcgggaccugccccagggauucagcgcccuggagccucugguggaccugcccaucggcaucaacaucaccagguuccagacccugcuggcccugcaccggagcuaccugacccccggcgacagcagcagcggcuggaccgccggcgccgccgcauacuacgugggcuaccugcagccacggaccuuccugcugaaguacaacgagaacggcaccaucaccgacgccguggacugcgcccuggacccccugagcgagaccaagugcacccuaaagagcuucaccguggagaagggcaucuaccagaccagcaacuuccgggugcagcccacugagagcaucgugcgguuccccaacauuaccaaccugugucccuucggcgagguguucaacgccacccgguucgccagcguguacgccuggaaccggaagcggaucagcaacugcguggccgacuacagcgugcuguacaacagcgccagcuucagcaccuucaagugcuacggcgugagcccuaccaagcugaacgaccugugcuucaccaacguguacgcugacagcuucgugauccggggcgacgaggugcggcagaucgcccccggccagaccggcaagaucgccgacuacaacuacaagcugcccgacgacuucaccggcugcgugaucgccuggaacagcaacaaccuggacagcaaggugggcggcaacuacaacuaccuguaccggcuguuccguaagagcaaccugaagccauucgagcgggacaucagcaccgagaucuaccaggccggcagcacccccugcaacgguguggagggcuuuaacugcuacuucccccugcagagcuacggcuuccagcccaccuacggcgugggcuaccagcccuaccgggugguggugcugagcuucgagcugcugcacgcccccgccaccgugugcggcccuaaaaagagcaccaaccuggugaagaacaagugcgugaacuucaacuucaauggccugaccggcaccggcgugcugaccgagagcaacaagaaguuccugcccuuccagcaguucggccgggauaucgacgacaccaccgacgccgugcgggacccccagacccuggagauccuggacaucaccccaugcagcuucggcggcgugagcgugaucacccccggcacaaacaccagcaaccaggucgcagugcuguaccagggagugaacugcaccgaggugcccguggccauccacgccgaccagcugacccccaccuggcggguguacagcaccggcagcaacguguuccagacccgggccggcugccugaucggcgccgagcacgugaacaacuccuacgagugcgacauccccaucggcgccggcaucugcgcuagcuaccagacccagaccaacagccaccggcgggcccggagcguggccagccagagcaucaucgccuacaccaugagcuuaggcgccgagaacagcguggccuacagcaacaacagcaucgccauccccaucaacuucaccauaagcgugaccaccgagauccugccugugagcaugaccaagaccagcguggacuguaccauguacaucugcggcgacagcaccgagugcagcaaccugcugcugcaguacggcagcuucugcacccagcugaaccgggcgcugaccggcaucgccguggagcaggacaagaacacccaagagguguucgcccaggugaagcagaucuacaagaccccacccaucaaggacuucggcggcuucaacuucagccagauccugcccgaccccagcaagcccagcaagcggagcuucaucgaggaccugcuguucaacaaggugacucuggccgacgccggcuucaucaagcaguacggcgauugccugggggacaucgccgcccgggaccugaucugcgcucagaaguucaacggccugaccgugcugccuccccugcugaccgacgagaugaucgcccaguacaccagcgcccugcuugccggcaccaucaccagcggcuggaccuucggcgccggcgccgcacugcagauccccuucgccaugcagauggccuaccgguucaacggcaucggcgugacccagaacgugcuguacgagaaccagaagcugaucgccaaccaguucaacagcgccaucggcaagauccaggacagccugagcagcaccgccagcgcccugggcaagcugcaggacguggugaaccagaacgcccaggcucugaacacccuggugaagcagcugagcagcaacuucggcgccaucagcucagugcugaacgacauccuggccaggcuggacccacccgaggccgaggugcagaucgaccggcugaucaccggccggcugcagagccugcagaccuacgugacccagcagcugauccgggccgccgagauucgggccagcgccaaucuggcagccaccaagaugagcgagugcgugcugggccagagcaagcggguggacuuuugcggcaagggcuaccaccugaugagcuucccccagagcgcuccccacggcgugguguuccuccacgugaccuacgugcccgcccaggagaagaacuucacaaccgcccccgccaucugccacgacggcaaggcccacuucccccgggagggagucuucgugagcaacggcacccacugguucgugacccagcggaacuucuacgagccccagaucaucaccacccacaacaccuucgugagcggcaacugcgacguggugaucggcaucgugaacaacaccguguacgacccucugcagcccgagcuggacagcuucaaggaggagcuggacaaguacuucaagaaccacaccagccccgacguggaucugggcgacaucagcggcaucaacgccagcguggugaacauccagaaggagaucgaccggcugaacgagguggccaagaaccugaacgagagccugaucgaccugcaggagcugggcaaguacgagcaguacaucaaguggccaugguacaucuggcugggcuucaucgccggccugaucgccaucgugauggugaccaucaugcugugcugcaugaccagcugcuguagcugccugaagggcugcugcagcugcggcagcugcugcaaguucgacgaggacgacagcgagcccgugcugaagggcgugaagcugcacuacaccugaggacuaguuauaagacugacuagcccgaugggccucccaacgggcccuccuccccuccuugcaccgagauuaaucaaaggcucuuuucagagccaccaaaaaaaaaaaaaaaaaaaaaaaaaaaaaaaaaaaaaaaaaaaaaaaaaaaaaaaaaaaaaaaaaaaaaaaaaaaaaaaaaaaaaaaaaaaaaaaaaaaaa

SEQ ID NO: 24244 - RNA, 4035 nt, Artificial Sequence
  SARS-CoV-2/Wuhan/WIV05/2019__EPI_ISL_402128 spike protein mRNA gc (1-1273)(K986P_V987P_K986P_V987P_K417N_E484K_N501Y_D614G)
aggagaaagcuuaccauguucguguuccuggugcugcugccccuggugagcagccagugcgugaaccugaccacccggacccagcugcccccugccuacaccaacagcuucacccggggcguguacuaccccgacaagguguuccggagcagcgugcugcacagcacccaggaccuguuccugcccuucuucagcaacgugaccugguuccacgccauccacgugagcggcaccaacggcaccaagcgguucgacaacccagugcugcccuucaacgacggcguguacuucgccagcaccgagaagucaaacaucauccggggcuggaucuucggcaccacccuggacagcaagacacagagccugcugaucgugaacaacgccaccaacguggugaucaaggugugcgaguuucaguucugcaacgaccccuuccugggcguguacuaccacaagaacaacaagagcuggauggagagcgaguuccgggucuacagcagcgcuaacaauugcaccuucgaguacgugagccagcccuuccugauggaccucgagggcaagcagggcaacuucaagaaccugcgggaguucguguucaagaacaucgauggcuacuucaagaucuacagcaagcacacccccaucaaccuggugcgggaccugccccagggauucagcgcccuggagccucugguggaccugcccaucggcaucaacaucaccagguuccagacccugcuggcccugcaccggagcuaccugacccccggcgacagcagcagcggcuggaccgccggcgccgccgcauacuacgugggcuaccugcagccacggaccuuccugcugaaguacaacgagaacggcaccaucaccgacgccguggacugcgcccuggacccccugagcgagaccaagugcacccuaaagagcuucaccguggagaagggcaucuaccagaccagcaacuuccgggugcagcccacugagagcaucgugcgguuccccaacauuaccaaccugugucccuucggcgagguguucaacgccacccgguucgccagcguguacgccuggaaccggaagcggaucagcaacugcguggccgacuacagcgugcuguacaacagcgccagcuucagcaccuucaagugcuacggcgugagcccuaccaagcugaacgaccugugcuucaccaacguguacgcugacagcuucgugauccggggcgacgaggugcggcagaucgcccccggccagaccggcaacaucgccgacuacaacuacaagcugcccgacgacuucaccggcugcgugaucgccuggaacagcaacaaccuggacagcaaggugggcggcaacuacaacuaccuguaccggcuguuccguaagagcaaccugaagccauucgagcgggacaucagcaccgagaucuaccaggccggcagcacccccugcaacggugugaagggcuuuaacugcuacuucccccugcagagcuacggcuuccagcccaccuacggcgugggcuaccagcccuaccgggugguggugcugagcuucgagcugcugcacgcccccgccaccgugugcggcccuaaaaagagcaccaaccuggugaagaacaagugcgugaacuucaauuucaacggccugaccggcaccggcgugcugaccgagagcaacaagaaguuccugcccuuccagcaguucggccgggauaucgccgacaccaccgacgcagugcgggacccccagacccuggagauccuggacaucaccccaugcagcuucggcggcgugagcgucaucacccccggcacaaacaccagcaaccagguggccgugcuguaccagggagugaacugcaccgaggugcccguggccauccacgccgaccagcugacccccaccuggcggguguacagcaccggcagcaacguguuccagacccgggccggcugccugaucggcgccgagcacgugaacaacuccuacgagugcgacauccccaucggcgcuggcaucugcgccagcuaccagacccagaccaacagcccccggcgggcccggagcguggccagccagagcaucaucgccuacaccaugagcuuaggcgccgagaacagcguggccuacagcaacaacagcaucgcgaucccuaccaacuucaccaucagcgugaccaccgagauacugcccgugagcaugaccaagaccagcguggacuguaccauguacaucugcggcgacagcaccgagugcagcaaccugcugcugcaguacggcagcuucugcacccagcugaaccgggcccugaccggcaucgccguggagcaggacaagaacacccaagagguguucgcccaggugaagcagaucuacaagacucccccaaucaaggacuucggcggcuucaacuucagccagauccugcccgaccccagcaagcccagcaagcggagcuucaucgaggaccugcuguucaacaaggugacccuggccgacgccggcuucaucaagcaguacggcgacugccugggggauaucgccgcucgggaccugaucugcgcccagaaguucaacggccugaccgugcugcccccucugcugaccgacgagaugaucgcccaguacaccagcgcccugcuugccggcaccaucaccagcggcuggaccuucggcgccggcgcagcccugcagauccccuucgccaugcagauggccuaccgguucaacggcaucggcgugacccagaacgugcuguacgagaaccagaagcugaucgccaaccaguucaacagcgccaucggcaagauccaggacagccugagcagcaccgccagcgcccugggcaagcugcaggacguggugaaccagaacgcucaggcccugaacacccuggugaagcagcugagcagcaacuucggcgccaucagcucagugcugaaugacauccugagcaggcuggaucccccagaggccgaggugcagaucgaccggcugaucaccggccggcugcagagccugcagaccuacgugacccagcagcugauccgggccgccgagauccgggccagcgccaaccuggcagccaccaagaugagcgagugcgugcugggccagagcaagcggguggacuuuugcggcaagggcuaccaccugaugagcuucccccagagcgcuccccacggcgugguguuccuccacgugacauacguccccgcccaggagaagaacuucaccaccgcccccgccauuugccacgacggcaaggcccacuucccccgggagggaguguucgugagcaacggcacccacugguucgugacccagcggaacuucuacgagccucagaucaucaccaccgacaacaccuucgugagcggcaacugcgacguggugaucggcaucgugaacaacaccguguacgacccccugcagcccgagcuggacagcuucaaggaggagcuggacaaguacuucaagaaccacaccagcccagacguggaccugggcgacaucagcggcaucaacgccagcguggugaacauccagaaggagaucgaccggcugaacgagguggccaagaaccugaacgagagccugaucgaccugcaggagcugggcaaguacgagcaguacaucaaguggcccugguacaucuggcugggcuucaucgccggccugaucgccaucgugauggugaccaucaugcugugcugcaugaccagcugcuguagcugccugaagggcugcugcagcugcggcagcugcugcaaguucgacgaggacgacagcgagcccgugcugaagggcgugaagcugcacuacaccugaggacuaguuauaagacugacuagcccgaugggccucccaacgggcccuccuccccuccuugcaccgagauuaaucaaaggcucuuuucagagccaccaaaaaaaaaaaaaaaaaaaaaaaaaaaaaaaaaaaaaaaaaaaaaaaaaaaaaaaaaaaaaaaaaaaaaaaaaaaaaaaaaaaaaaaaaaaaaaaaaaaaa

SEQ ID NO: 24245 - RNA, 4026 nt, Artificial Sequence
  SARS-CoV-2/Wuhan/WIV05/2019__EPI_ISL_402128 spike protein mRNA gc (1-1273)(K986P_V987P_K986P_V987P_L18F_D80A_D215G_L242del_A243del_ L244del_R246I_K417N_E484K_N501Y_D614G_A701V)
aggagaaagcuuaccauguucguguuccuggugcugcugccccuggugagcagccagugcgugaacuucaccacccggacccagcugcccccugccuacaccaacagcuucacccggggcguguacuaccccgacaagguguuccggagcagcgugcugcacagcacccaggaccuguuccugcccuucuucagcaacgugaccugguuccacgccauccacgugagcggcaccaacggcaccaagcgguucgccaacccagugcugcccuucaacgacggcguguacuucgccagcaccgagaagucaaacaucauccggggcuggaucuuuggcaccacccuggacagcaagacacagagccugcugaucgugaacaacgcuaccaacguggugaucaaggugugcgaguuccaguucugcaacgaccccuuccugggcguguacuaccacaagaacaacaagagcuggauggagagcgaguuccgggucuacagcagcgccaacaauugcaccuucgaguacgugagccagcccuuccugauggaccuggagggcaagcagggcaacuucaagaaccuccgggaguucguguucaagaacaucgacggcuacuucaagaucuacagcaagcacacccccaucaaccuggugcggggacugccccagggcuucagcgcccuggagccucugguggaucugcccaucggcaucaacaucaccagguuccagacccugcacaucagcuaccugacccccggcgacagcagcagcggcuggaccgccggcgccgccgcauacuacgugggcuaccugcagccacggaccuuccugcugaaguacaacgagaacggcaccaucaccgacgccguggacugcgcccuggacccccugagcgagaccaagugcacccuuaagagcuucaccguggagaagggcaucuaccagaccagcaacuuccgggugcagcccacugagagcauugugcgguuccccaacaucaccaaccugugucccuucggcgagguguucaacgccacccgguucgccagcguguacgccuggaaccggaagcggaucagcaacugcguggccgacuacagcgugcuguacaacagcgccagcuucagcaccuucaagugcuacggcgugagcccuaccaagcugaacgaccugugcuucaccaacguguacgcugacagcuucgugauccggggcgacgaggugcggcagaucgcccccggccagaccggcaacaucgccgacuacaacuacaagcugcccgacgacuucaccggcugcgugaucgccuggaacagcaacaaccuggacagcaaggugggcggcaacuacaacuaccuguaccggcuauuccguaagagcaaccugaagccauuugagcgggacaucagcaccgagaucuaccaggccgguagcacccccugcaacggcgugaagggcuucaacugcuacuucccccugcagagcuacggcuuccagcccaccuacggcgugggcuaccagcccuaccgggugguggugcugagcuucgagcugcugcacgcccccgccaccgugugcggcccuaaaaagagcaccaaccuggugaagaacaagugcgugaacuucaauuucaacggccugaccggcaccggcgugcugaccgagagcaacaagaaguuccugcccuuccagcaguucggccgggacaucgccgacaccaccgaugcagugcgggacccccagacccuggagauccuggacaucaccccaugcagcuucggcggcgugagcgucaucacccccggaacaaacaccagcaaccagguggccgugcuguaccagggcgugaacugcaccgaggugcccguggccauccacgccgaccagcugacccccaccuggcggguguacagcaccggcagcaacguguuccagacccgggccggcugccugaucggcgccgagcacgugaacaacuccuacgagugcgacauccccaucggcgcuggcaucugcgccagcuaccagacccagaccaacagcccccggcgggcccggagcguggccagccagagcaucaucgccuacaccaugagccugggcguggagaacagcguggccuacagcaacaacagcaucgccaucccuaccaacuucaccauaagcgugaccaccgagauccugcccgugagcaugaccaagaccagcguggacuguaccauguacaucugcggcgacagcaccgagugcagcaaccuguuacugcaguacggcagcuucugcacccagcugaaccgggcgcugaccggcaucgccguggagcaggacaagaacacccaagagguguucgcccaggugaagcagaucuacaagacucccccaaucaaggacuucggcggcuucaacuucagccagauccugcccgaccccagcaagcccagcaagcggagcuucaucgaggaccugcuguucaacaaggugacccuggccgacgccggcuucaucaagcaguacggggacugccugggcgacaucgccgcccgggaccugaucugcgcucagaaguucaacggccugaccgugcugcccccucugcugaccgaugagaugaucgcccaguacaccagcgcccugcuggccggcaccaucaccagcggcuggaccuucggcgccggcgccgcacugcagauccccuucgccaugcagauggccuaccgguucaacggcaucggcgugacccagaacgugcuguacgagaaccagaagcugaucgccaaccaguucaacagcgccaucggcaagauccaggacagccugagcagcaccgccagcgcccugggcaagcugcaggacguggugaaccagaacgcccaggcucugaacacccuggugaagcagcugagcagcaacuuuggcgccaucagcucagugcugaaugacauccugagccggcuggaucccccagaggccgaggugcagaucgacaggcugaucaccggccggcugcagagccugcagaccuacgugacccagcagcugauccgggccgccgagauucgggccagcgccaaccuggccgcaaccaagaugagcgagugcgugcugggccagagcaagcggguggacuucugcggcaagggcuaccaccugaugagcuucccccagagcgcuccccacggcgugguguuccugcacgucacauacgugcccgcccaggagaagaacuucaccaccgcccccgccaucugccacgacggaaaggcccacuucccccgggagggcguguucgugagcaacggcacccacugguucgugacccagcggaacuucuacgagccucagaucaucaccaccgacaacaccuucgugagcggcaacugcgacguggugaucggcaucgugaacaacaccguguacgacccccugcagcccgagcuggacagcuucaaggaggagcucgacaaguacuucaagaaccacaccagcccagacguggaccugggcgacaucagcggcaucaacgccagcguggugaacauccagaaggagaucgaccggcugaacgagguggccaagaaccugaacgagagccugaucgaccugcaggagcugggcaaguacgagcaguacaucaaguggcccugguacaucuggcugggcuucaucgccggccugaucgccaucgugauggugaccaucaugcugugcugcaugaccagcugcuguagcugccugaagggcugcugcagcugcggcagcugcugcaaguucgacgaggacgacagcgagcccgugcugaagggcgugaagcugcacuacaccugaggacuaguuauaagacugacuagcccgaugggccucccaacgggcccuccuccccuccuugcaccgagauuaaucaaaggcucuuuucagagccaccaaaaaaaaaaaaaaaaaaaaaaaaaaaaaaaaaaaaaaaaaaaaaaaaaaaaaaaaaaaaaaaaaaaaaaaaaaaaaaaaaaaaaaaaaaaaaaaaaaaaa

SEQ ID NO: 24246 - RNA, 4035 nt, Artificial Sequence
  SARS-CoV-2/Wuhan/WIV05/2019__EPI_ISL_402128 spike protein mRNA gc (1-1273)(K986P_V987P_K986P_V987P_E484K_D614G)
aggagaaagcuuaccauguucguguuccuggugcugcugccccuggugagcagccagugcgugaaccugaccacccggacccagcugcccccugccuacaccaacagcuucacccggggcguguacuaccccgacaagguguuccggagcagcgugcugcacagcacccaggaccuguuccugcccuucuucagcaacgugaccugguuccacgccauccacgugagcggcaccaacggcaccaagcgguucgacaacccagugcugcccuucaacgacggcguguacuucgccagcaccgagaagucaaacaucauccggggcuggaucuucggcaccacccuggacagcaagacacagagccugcugaucgugaacaacgccaccaacguggugaucaaggugugcgaguuucaguucugcaacgaccccuuccugggcguguacuaccacaagaacaacaagagcuggauggagagcgaguuccgggucuacagcagcgcuaacaauugcaccuucgaguacgugagccagcccuuccugauggaccucgagggcaagcagggcaacuucaagaaccugcgggaguucguguucaagaacaucgauggcuacuucaagaucuacagcaagcacacccccaucaaccuggugcgggaccugccccagggauucagcgcccuggagccucugguggaccugcccaucggcaucaacaucaccagguuccagacccugcuggcccugcaccggagcuaccugacccccggcgacagcagcagcggcuggaccgccggcgccgccgcauacuacgugggcuaccugcagccacggaccuuccugcugaaguacaacgagaacggcaccaucaccgacgccguggacugcgcccuggacccccugagcgagaccaagugcacccuaaagagcuucaccguggagaagggcaucuaccagaccagcaacuuccgggugcagcccacugagagcaucgugcgguuccccaacauuaccaaccugugucccuucggcgagguguucaacgccacccgguucgccagcguguacgccuggaaccggaagcggaucagcaacugcguggccgacuacagcgugcuguacaacagcgccagcuucagcaccuucaagugcuacggcgugagcccuaccaagcugaacgaccugugcuucaccaacguguacgcugacagcuucgugauccggggcgacgaggugcggcagaucgcccccggccagaccggcaagaucgccgacuacaacuacaagcugcccgacgacuucaccggcugcgugaucgccuggaacagcaacaaccuggacagcaaggugggcggcaacuacaacuaccuguaccggcuguuccguaagagcaaccugaagccauucgagcgggacaucagcaccgagaucuaccaggccggcagcacccccugcaacggugugaagggcuuuaacugcuacuucccccugcagagcuacggcuuccagcccaccaacggcgugggcuaccagcccuaccgggugguggugcugagcuucgagcugcugcacgcccccgccaccgugugcggcccuaaaaagagcaccaaccuggugaagaacaagugcgugaacuucaauuucaacggccugaccggcaccggcgugcugaccgagagcaacaagaaguuccugcccuuccagcaguucggccgggauaucgccgacaccaccgacgcagugcgggacccccagacccuggagauccuggacaucaccccaugcagcuucggcggcgugagcgucaucacccccggcacaaacaccagcaaccagguggccgugcuguaccagggagugaacugcaccgaggugcccguggccauccacgccgaccagcugacccccaccuggcggguguacagcaccggcagcaacguguuccagacccgggccggcugccugaucggcgccgagcacgugaacaacuccuacgagugcgacauccccaucggcgcuggcaucugcgccagcuaccagacccagaccaacagcccccggcgggcccggagcguggccagccagagcaucaucgccuacaccaugagcuuaggcgccgagaacagcguggccuacagcaacaacagcaucgcgaucccuaccaacuucaccaucagcgugaccaccgagauacugcccgugagcaugaccaagaccagcguggacuguaccauguacaucugcggcgacagcaccgagugcagcaaccugcugcugcaguacggcagcuucugcacccagcugaaccgggcccugaccggcaucgccguggagcaggacaagaacacccaagagguguucgcccaggugaagcagaucuacaagacucccccaaucaaggacuucggcggcuucaacuucagccagauccugcccgaccccagcaagcccagcaagcggagcuucaucgaggaccugcuguucaacaaggugacccuggccgacgccggcuucaucaagcaguacggcgacugccugggggauaucgccgcucgggaccugaucugcgcccagaaguucaacggccugaccgugcugcccccucugcugaccgacgagaugaucgcccaguacaccagcgcccugcuugccggcaccaucaccagcggcuggaccuucggcgccggcgcagcccugcagauccccuucgccaugcagauggccuaccgguucaacggcaucggcgugacccagaacgugcuguacgagaaccagaagcugaucgccaaccaguucaacagcgccaucggcaagauccaggacagccugagcagcaccgccagcgcccugggcaagcugcaggacguggugaaccagaacgcucaggcccugaacacccuggugaagcagcugagcagcaacuucggcgccaucagcucagugcugaaugacauccugagcaggcuggaucccccagaggccgaggugcagaucgaccggcugaucaccggccggcugcagagccugcagaccuacgugacccagcagcugauccgggccgccgagauccgggccagcgccaaccuggcagccaccaagaugagcgagugcgugcugggccagagcaagcggguggacuuuugcggcaagggcuaccaccugaugagcuucccccagagcgcuccccacggcgugguguuccuccacgugacauacguccccgcccaggagaagaacuucaccaccgcccccgccauuugccacgacggcaaggcccacuucccccgggagggaguguucgugagcaacggcacccacugguucgugacccagcggaacuucuacgagccucagaucaucaccaccgacaacaccuucgugagcggcaacugcgacguggugaucggcaucgugaacaacaccguguacgacccccugcagcccgagcuggacagcuucaaggaggagcuggacaaguacuucaagaaccacaccagcccagacguggaccugggcgacaucagcggcaucaacgccagcguggugaacauccagaaggagaucgaccggcugaacgagguggccaagaaccugaacgagagccugaucgaccugcaggagcugggcaaguacgagcaguacaucaaguggcccugguacaucuggcugggcuucaucgccggccugaucgccaucgugauggugaccaucaugcugugcugcaugaccagcugcuguagcugccugaagggcugcugcagcugcggcagcugcugcaaguucgacgaggacgacagcgagcccgugcugaagggcgugaagcugcacuacaccugaggacuaguuauaagacugacuagcccgaugggccucccaacgggcccuccuccccuccuugcaccgagauuaaucaaaggcucuuuucagagccaccaaaaaaaaaaaaaaaaaaaaaaaaaaaaaaaaaaaaaaaaaaaaaaaaaaaaaaaaaaaaaaaaaaaaaaaaaaaaaaaaaaaaaaaaaaaaaaaaaaaaa

SEQ ID NO: 24247 - RNA, 4035 nt, Artificial Sequence
  SARS-CoV-2/Wuhan/WIV05/2019__EPI_ISL_402128 spike protein mRNA gc (1-1273)(K986P_V987P_K986P_V987P_L18F_T20N_P26S_D138Y_R190S_K417T _E484K_N501Y_D614G_H655Y_T1027I)
aggagaaagcuuaccauguucguguuccuggugcugcugccccuggugagcagccagugcgugaacuucaccaaccggacccagcugcccagcgccuacaccaacagcuucacccggggcguguacuacccugacaagguguuccggagcagcgugcugcacagcacccaggaccuguuccugcccuucuucagcaacgugaccugguuccacgccauccacgugagcggcaccaacggcaccaagcgguucgacaaccccgugcugccauucaacgacggcguguacuucgccagcaccgagaagucaaacaucauccggggcuggaucuuuggcaccacccuggacagcaagacccagagccugcugaucgugaacaacgccacaaacguggugaucaaggugugcgaguuccaguucugcaacuaccccuuccugggcguguacuaccacaagaacaacaagagcuggauggagagcgaguuccgggucuacagcagcgcuaauaacugcaccuucgaguacgugagccagcccuuccugauggaccuggagggcaagcagggcaacuucaagaaccucagcgaguucguguucaagaacaucgacggcuacuucaagaucuacagcaagcacacccccaucaaccuggugcgggaucugccccagggauucagcgcccuggagccccugguggaccugccuaucggcaucaacaucacccgguuccagacccugcuggcccugcacaggagcuaccugacccccggcgacagcagcagcggcuggaccgccggcgccgccgcauacuacgugggcuaccugcagccccggaccuuccugcugaaguacaacgagaacggcaccaucaccgacgccguggacugcgcccuggacccacugagcgagaccaagugcacccuaaagagcuucaccguggagaagggcaucuaccagaccagcaacuuccgggugcagcccaccgagagcaucgugcgguuccccaacauuacuaaccugugucccuucggcgagguguucaacgccacccgguucgccagcguguacgccuggaaccggaagcggaucagcaacugcguggccgacuacagcgugcuguacaacagcgccagcuucagcaccuucaagugcuacggcgugagccccaccaagcugaacgaccugugcuucaccaacguguacgcugacagcuucgugauccggggcgacgaggugcggcagaucgccccuggccagaccggcaccaucgccgacuacaacuacaagcugcccgacgacuucaccggcugcgugaucgccuggaacagcaacaaccuggacagcaaggugggcggcaacuacaacuaccuguaccggcuguuccguaagagcaaccugaagcccuuugagcgggacaucagcaccgagaucuaccaggccggcagcaccccaugcaacggugugaagggcuucaacugcuacuucccccugcagagcuacggcuuccagcccaccuacggcgugggcuaccagcccuaccgggugguggugcugagcuucgagcugcugcacgcccccgccaccgugugcggccccaaaaagagcaccaaccuggugaagaacaagugcgugaacuucaauuucaacggccugaccggcaccggcgugcugaccgagagcaacaagaaguuccugccuuuccagcaguucggccgggacaucgccgauaccaccgacgcagugcgggacccccagacccuggagauccuggacaucacccccugcagcuucggcggcgugagcgucaucaccccaggcacaaacaccagcaaccagguggccgugcuguaccagggagugaacugcaccgaggugcccguggccauccacgccgaccagcugacccccaccuggcggguguacuccaccggcagcaacguguuccagacccgggccggcugccugaucggcgccgaguacgugaacaacagcuacgagugcgacauccccaucggcgcuggcaucugcgccagcuaccagacccagaccaacagcccccggcgggcccggagcguggccagccagagcaucaucgccuacaccaugagccugggcgccgagaacagcguggccuacagcaacaacagcaucgcgauccccaccaacuucaccaucagcgugaccaccgagauauuaccugugagcaugaccaagaccagcguggacuguaccauguacaucugcggcgacagcaccgagugcagcaaccugcugcugcaguacggcagcuucugcacccagcugaaccgggcccugaccggcaucgccguggagcaggacaagaacacccaagagguguucgcccaggugaagcagaucuacaagacuccacccaucaaggacuucggcggcuucaacuucagccagauccugcccgaccccagcaagcccagcaagcggagcuucaucgaggaccugcuguucaacaaggugacccuggccgacgccggcuucaucaagcaguacggcgacugccugggggacaucgccgcucgggaucugaucugcgcccagaaguucaacggccugaccgugcugccuccccugcugaccgacgagaugaucgcccaguacaccagcgcccugcuggccggcaccaucaccagcggcuggaccuucggcgccggcgcagcccuucagauccccuucgccaugcagauggccuaccgguucaacggcaucggcgugacccagaacgugcuguacgagaaccagaagcugaucgccaaccaguucaacagcgccaucggcaagauccaggacagccugagcagcaccgccagcgcccugggcaagcugcaggacguggugaaccagaacgcucaggcccugaacacccuggugaagcagcugagcucaaacuuuggcgccaucagcagcgugcugaaugacauccugagccggcuggacccacccgaggccgaggugcagaucgacaggcugaucaccggccggcugcagagccugcagaccuacgugacccagcagcugauccgggccgccgagauccgggccagcgccaaccuggcagccauuaagaugagcgagugcgugcugggccagagcaagcggguggacuucugcggcaagggcuaccaccugaugagcuucccccagagcgcuccccacggcgugguguuccugcacgugaccuacguccccgcccaggagaagaacuucacaaccgcccccgccaucugccacgacggcaaggcccacuucccccgggagggaguguucgugagcaacggcacccacugguucgugacccagcggaacuucuacgagccccagaucaucaccaccgacaacaccuucgugagcggcaacugcgacguggugaucggcaucgugaacaacaccguguacgacccucuccagcccgagcuggacagcuucaaggaggagcuggacaaguacuucaagaaccacaccagccccgacguggaccugggcgauaucagcggcaucaacgccagcguggugaacauccagaaggagaucgaccggcugaacgagguggccaagaaccugaacgagagccugaucgaccugcaggagcugggcaaguacgagcaguacaucaaguggccaugguacaucuggcugggcuucaucgccggccugaucgccaucgugauggugaccaucaugcugugcugcaugaccagcugcuguagcugccugaagggcugcugcagcugcggcagcugcugcaaguucgacgaggacgacagcgagcccgugcugaagggcgugaagcugcacuacaccugaggacuaguuauaagacugacuagcccgaugggccucccaacgggcccuccuccccuccuugcaccgagauuaaucaaaggcucuuuucagagccaccaaaaaaaaaaaaaaaaaaaaaaaaaaaaaaaaaaaaaaaaaaaaaaaaaaaaaaaaaaaaaaaaaaaaaaaaaaaaaaaaaaaaaaaaaaaaaaaaaaaaa

SEQ ID NO: 24248 - RNA, 4035 nt, Artificial Sequence
  SARS-CoV-2/Wuhan/WIV05/2019__EPI_ISL_402128 spike protein mRNA gc (1-1273)(K986P_V987P_K986P_V987P_S13I_W152C_L452R_D614G)
aggagaaagcuuaccauguucguguuccuggugcugcugccccuggugagcauccagugcgugaaccugaccacccggacccagcugcccccugccuacaccaacagcuucacccggggcguguacuaccccgacaagguguuccggagcagcgugcugcacagcacccaggaccuguuccugcccuucuucagcaacgugaccugguuccacgccauccacgugagcggcaccaacggcaccaagcgguucgacaacccagugcugcccuucaacgacggcguguacuucgccagcaccgagaagucaaacaucauccggggcuggaucuucggcaccacccuggacagcaagacacagagccugcugaucgugaacaacgccaccaacguggugaucaaggugugcgaguuucaguucugcaacgaccccuuccugggcguguacuaccacaagaacaacaagagcugcauggagagcgaguuccgggucuacagcagcgcuaacaauugcaccuucgaguacgugagccagcccuuccugauggaccucgagggcaagcagggcaacuucaagaaccugcgggaguucguguucaagaacaucgauggcuacuucaagaucuacagcaagcacacccccaucaaccuggugcgggaccugccccagggauucagcgcccuggagccucugguggaccugcccaucggcaucaacaucaccagguuccagacccugcuggcccugcaccggagcuaccugacccccggcgacagcagcagcggcuggaccgccggcgccgccgcauacuacgugggcuaccugcagccacggaccuuccugcugaaguacaacgagaacggcaccaucaccgacgccguggacugcgcccuggacccccugagcgagaccaaguguacccuaaagagcuucaccguggagaagggcaucuaccagaccagcaacuuccgggugcagcccacugagagcauugugcgguuccccaacaucaccaaccugugccccuucggcgagguguucaacgccacccgguucgccagcguguacgccuggaaccggaagcggaucagcaacugcguggccgacuacagcgugcuguacaacagcgccagcuucagcaccuucaagugcuacggcgugagcccuaccaagcugaacgaccugugcuucaccaacguguacgcugacagcuucgugauccggggcgacgaggugcggcagaucgcccccggccagaccggcaagaucgccgacuacaacuacaagcugcccgacgacuucaccggcugcgugaucgccuggaacagcaacaaccuggacagcaaggugggcggcaacuacaacuaccgguaccggcuguuccguaagagcaaccugaagccauucgagcgggacaucagcaccgagaucuaccaggccggcagcacccccugcaacgguguggagggcuuuaacugcuacuucccccugcagagcuacggcuuccagcccaccaacggcgugggcuaccagcccuaccgggugguggugcugagcuucgagcugcugcacgcccccgccaccgugugcggcccuaaaaagagcaccaaccuggugaagaacaagugcgugaacuucaauuucaacggccugaccggcaccggcgugcugaccgagagcaacaagaaguuccugcccuuccagcaguucggccgggauaucgccgacaccaccgacgcagugcgggacccccagacccuggagauccuggacaucaccccaugcagcuucggcggcgugagcgucaucacccccggcacaaacaccagcaaccagguggccgugcuguaccagggagugaacugcaccgaggugcccguggccauccacgccgaccagcugacccccaccuggcggguguacagcaccggcagcaacguguuccagacccgggccggcugccugaucggcgccgagcacgugaacaacagcuacgagugcgacauccccaucggcgcuggcaucugugccuccuaccagacccagaccaacagcccccggcgggcccggagcguggccagccagagcaucaucgccuacaccaugagccugggcgccgagaacagcguggccuacagcaacaacagcaucgcgaucccuaccaacuucaccauaagcgugaccaccgagaucuuacccgugagcaugaccaagaccagcguggacugcaccauguacaucugcggcgacagcaccgagugcagcaaccugcugcugcaguacggcagcuucugcacccagcugaaccgggcccugaccggcaucgccguggagcaggacaagaacacccaagagguguucgcccaggugaagcagaucuacaagacucccccaaucaaggacuucggcggcuucaacuucagccagauccugcccgaccccagcaagcccagcaagcggagcuucaucgaggaccugcuguucaacaaggugacccuggccgacgccggcuucaucaagcaguacggcgacugccugggggauaucgccgcucgggaccugaucugcgcccagaaguucaacggccugaccgugcugcccccucugcugaccgacgagaugaucgcccaguacaccagcgcccugcuggccggcaccaucaccagcggcuggaccuucggcgccggcgcagcccuucagauccccuucgccaugcagauggccuacagguucaacggcaucggcgugacccagaacgugcuguacgagaaccagaagcugaucgccaaccaguucaacagcgccaucggcaagauccaggacagccugagcagcaccgccagcgcccugggcaagcugcaggacguggugaaccagaacgcucaggcccugaacacccuggugaagcagcugagcagcaacuucggcgccaucagcagcgugcugaaugacauccugucacggcuggaucccccagaggccgaggugcagaucgaccggcugaucaccggccggcugcagagccugcagaccuacgugacccagcagcugauccgggccgccgagauucgggccagcgccaaccuggcagccaccaagaugagcgagugcgugcugggccagagcaagcggguggacuuuugcggcaagggcuaccaccugaugagcuucccccagagcgcuccccacggcgugguguuccugcacgugacauacguccccgcccaggagaagaacuucaccaccgcccccgccaucugccacgacggcaaggcccacuucccccgggagggaguguucgugagcaacggcacccacugguucgugacccagcggaacuucuacgagccucagaucaucaccaccgacaacaccuucgugagcggcaacugcgacguggugaucggcaucgugaacaacaccguguacgacccccuccagcccgagcuggacagcuucaaggaggagcuggacaaguacuucaagaaccacaccagcccagacguggaccugggcgacaucagcggcaucaacgccagcguggugaacauccagaaggagaucgaccggcugaacgagguggccaagaaccugaacgagagccugaucgaccugcaggagcugggcaaguacgagcaguacaucaaguggcccugguacaucuggcugggcuucaucgccggccugaucgccaucgugauggugaccaucaugcugugcugcaugaccagcuguugcagcugccugaagggcugcugcagcugcggcagcugcugcaaguucgacgaggacgacagcgagcccgugcugaagggcgugaagcugcacuacaccugaggacuaguuauaagacugacuagcccgaugggccucccaacgggcccuccuccccuccuugcaccgagauuaaucaaaggcucuuuucagagccaccaaaaaaaaaaaaaaaaaaaaaaaaaaaaaaaaaaaaaaaaaaaaaaaaaaaaaaaaaaaaaaaaaaaaaaaaaaaaaaaaaaaaaaaaaaaaaaaaaaaaa

SEQ ID NO: 24249 - RNA, 4035 nt, Artificial Sequence
  SARS-CoV-2/Wuhan/WIV05/2019__EPI_ISL_402128 spike protein mRNA gc mod (1-1273)(K986P_V987P)
aggagaaagcuuaccauguucguguuucuggugcugcugccccugguguccagccagugugugaaccugaccaccagaacacagcugccuccagccuacaccaacagcuucaccagaggcguguacuaccccgacaagguguucagauccagcgugcugcacucuacccaggaccuguuccugccuuucuucagcaacgugaccugguuccacgccauccacguguccggcaccaauggcaccaagagauucgacaaccccgugcugcccuucaacgacgggguguacuuugccagcaccgagaaguccaacaucaucagaggcuggaucuucggcaccacacuggacagcaagacccagagccugcugaucgugaacaacgccaccaacguggucaucaaagugugcgaguuccaguucugcaacgaccccuuccugggcgucuacuaccacaagaacaacaagagcuggauggaaagcgaguuccggguguacagcagcgccaacaacugcaccuucgaguacgugucccagccuuuccugauggaccuggaaggcaagcagggcaacuucaagaaccugcgcgaguucguguucaagaacaucgacggcuacuucaaaaucuacagcaagcacaccccuaucaaccucgugcgggaucugccucagggcuucucugcucuggaaccccugguggaucugcccaucggcaucaacaucacccgguuucagacacugcuggcccugcacagaagcuaccugacaccuggcgauagcagcagcggauggacagcuggugccgccgcuuacuaugugggcuaccugcagccuagaaccuuccugcugaaguacaacgagaacggcaccaucaccgacgccguggauugugcucuggauccucugagcgagacaaagugcacccugaaguccuucaccguggaaaagggcaucuaccagaccagcaacuuccgggugcagcccaccgaauccaucgugcgguuccccaauaucaccaaucugugccccuucggcgagguguucaaugccaccagauucgccucuguguacgccuggaaccggaagcggaucagcaauugcguggccgacuacuccgugcuguacaacuccgccagcuucagcaccuucaagugcuacggcguguccccuaccaagcugaacgaccugugcuucacaaacguguacgccgacagcuucgugauccggggagaugaagugcggcagauugccccuggacagacaggcaagaucgccgacuacaacuacaagcugcccgacgacuucaccggcugugugauugccuggaacagcaacaaccuggacuccaaagucggcggcaacuacaauuaccuguaccggcuguuccggaaguccaaucugaagcccuucgagcgggacaucagcaccgaaaucuaucaggccggcagcaccccuugcaacggcguggaaggcuucaacugcuacuucccacugcaguccuacggcuuucagcccacaaauggcgugggcuaucagcccuacagagugguggugcugagcuucgaacugcugcaugcuccugccacagugugcggcccuaagaaaagcaccaaucucgugaagaacaaaugcgugaacuucaacuucaacggccugaccggcaccggcgugcugacagagagcaacaagaaguuccugccauuccagcaguuuggccgggauaucgccgauaccacagacgccguuagagauccccagacacuggaaauccuggacaucaccccaugcagcuucggcggagugucugugaucaccccuggcaccaacaccagcaaucagguggcagugcuguaccaggacgugaacuguaccgaagugcccguggccauucacgccgaucagcugacaccuacauggcggguguacuccaccggcagcaauguguuucagaccagagccggcugucugaucggagccgagcacgugaacaauagcuacgagugcgacauccccaucggcgcuggcaucugugccagcuaccagacacagacaaacagccccagacgggcuagaagcguggccagccagagcaucauugccuacacaaugucucugggcgccgagaacagcguggccuacuccaacaacucuaucgcuauccccaccaacuucaccaucagcgugaccaccgagauccugccuguguccaugaccaagaccagcguggacugcaccauguacaucugcggcgauuccaccgagugcuccaaccugcugcugcaguacggcagcuucugcacccagcugaauagagcccugacagggaucgccguggaacaggacaagaacacccaagagguguucgcccaagugaagcaaaucuacaagaccccuccuaucaaggacuucggcggcuucaauuucagccagauucugcccgauccuagcaagcccagcaagcggagcuucaucgaggaccugcuguucaacaaagugacacuggccgacgccggcuucaucaagcaguauggcgauugucugggcgacauugccgccagggaucugauuugcgcccagaaguuuaacggacugacagugcugccuccucugcugaccgaugagaugaucgcccaguacacaucugcccugcuggccggcacaaucacaagcggcuggacauuuggagcuggcgccgcucugcagauccccuuugcuaugcagauggccuaccgguucaacggcaucggagugacccagaaugugcuguacgagaaccagaagcugaucgccaaccaguucaacagcgccaucggcaagauccaggacagccugagcagcacagcaagcgcccugggaaagcugcaggacguggucaaccagaaugcccaggcacugaacacccuggucaagcagcuguccuccaacuucggcgccaucagcucugugcugaacgauauccugagcagacuggacccuccugaggccgaggugcagaucgacagacugaucacaggcagacugcagagccuccagacauacgugacccagcagcugaucagagccgccgagauuagagccucugccaaucuggccgccaccaagaugucugagugugugcugggccagagcaagagaguggacuuuugcggcaagggcuaccaccugaugagcuucccucagucugccccucacggcgugguguuucugcacgugacauaugugcccgcucaagagaagaauuucaccaccgcuccagccaucugccacgacggcaaagcccacuuuccuagagaaggcguguucguguccaacggcacccauugguucgugacacagcggaacuucuacgagccccagaucaucaccaccgacaacaccuucgugucuggcaacugcgacguugugaucggcauugugaacaauaccguguacgacccucugcagcccgagcuggacagcuucaaagaggaacuggacaaguacuuuaagaaccacacaagccccgacguggaccugggcgauaucagcggaaucaaugccagcgucgugaacauccagaaagagaucgaccggcugaacgagguggccaagaaucugaacgagagccugaucgaccugcaagaacuggggaaguacgagcaguacaucaaguggcccugguacaucuggcugggcuuuaucgccggacugauugccaucgugauggucacaaucaugcuguguugcaugaccagcugcuguagcugccugaagggcuguuguagcuguggcagcugcugcaaguucgacgaggacgauucugagcccgugcugaagggcgugaaacugcacuacaccugaggacuaguuauaagacugacuagcccgaugggccucccaacgggcccuccuccccuccuugcaccgagauuaaucaaaggcucuuuucagagccaccaaaaaaaaaaaaaaaaaaaaaaaaaaaaaaaaaaaaaaaaaaaaaaaaaaaaaaaaaaaaaaaaaaaaaaaaaaaaaaaaaaaaaaaaaaaaaaaaaaaaa

SEQ ID NO: 24250 - RNA, 4035 nt, Artificial Sequence
  SARS-CoV-2/Wuhan/WIV05/2019__EPI_ISL_402128 spike protein mRNA gc mod (1-1273)(K986P_V987P_ D614G)
aggagaaagcuuaccauguucguguuucuggugcugcugccccugguguccagccagugugugaaccugaccaccagaacacagcugccuccagccuacaccaacagcuucaccagaggcguguacuaccccgacaagguguucagauccagcgugcugcacucuacccaggaccuguuccugccuuucuucagcaacgugaccugguuccacgccauccacguguccggcaccaauggcaccaagagauucgacaaccccgugcugcccuucaacgacgggguguacuuugccagcaccgagaaguccaacaucaucagaggcuggaucuucggcaccacacuggacagcaagacccagagccugcugaucgugaacaacgccaccaacguggucaucaaagugugcgaguuccaguucugcaacgaccccuuccugggcgucuacuaccacaagaacaacaagagcuggauggaaagcgaguuccggguguacagcagcgccaacaacugcaccuucgaguacgugucccagccuuuccugauggaccuggaaggcaagcagggcaacuucaagaaccugcgcgaguucguguucaagaacaucgacggcuacuucaaaaucuacagcaagcacaccccuaucaaccucgugcgggaucugccucagggcuucucugcucuggaaccccugguggaucugcccaucggcaucaacaucacccgguuucagacacugcuggcccugcacagaagcuaccugacaccuggcgauagcagcagcggauggacagcuggugccgccgcuuacuaugugggcuaccugcagccuagaaccuuccugcugaaguacaacgagaacggcaccaucaccgacgccguggauugugcucuggauccucugagcgagacaaagugcacccugaaguccuucaccguggaaaagggcaucuaccagaccagcaacuuccgggugcagcccaccgaauccaucgugcgguuccccaauaucaccaaucugugccccuucggcgagguguucaaugccaccagauucgccucuguguacgccuggaaccggaagcggaucagcaauugcguggccgacuacuccgugcuguacaacuccgccagcuucagcaccuucaagugcuacggcguguccccuaccaagcugaacgaccugugcuucacaaacguguacgccgacagcuucgugauccggggagaugaagugcggcagauugccccuggacagacaggcaagaucgccgacuacaacuacaagcugcccgacgacuucaccggcugugugauugccuggaacagcaacaaccuggacuccaaagucggcggcaacuacaauuaccuguaccggcuguuccggaaguccaaucugaagcccuucgagcgggacaucagcaccgaaaucuaucaggccggcagcaccccuugcaacggcguggaaggcuucaacugcuacuucccacugcaguccuacggcuuucagcccacaaauggcgugggcuaucagcccuacagagugguggugcugagcuucgaacugcugcaugcuccugccacagugugcggcccuaagaaaagcaccaaucucgugaagaacaaaugcgugaacuucaacuucaacggccugaccggcaccggcgugcugacagagagcaacaagaaguuccugccauuccagcaguuuggccgggauaucgccgauaccacagacgccguuagagauccccagacacuggaaauccuggacaucaccccaugcagcuucggcggagugucugugaucaccccuggcaccaacaccagcaaucagguggcagugcuguaccagggcgugaacuguaccgaagugcccguggccauucacgccgaucagcugacaccuacauggcggguguacuccaccggcagcaauguguuucagaccagagccggcugucugaucggagccgagcacgugaacaauagcuacgagugcgacauccccaucggcgcuggcaucugugccagcuaccagacacagacaaacagccccagacgggcuagaagcguggccagccagagcaucauugccuacacaaugucucugggcgccgagaacagcguggccuacuccaacaacucuaucgcuauccccaccaacuucaccaucagcgugaccaccgagauccugccuguguccaugaccaagaccagcguggacugcaccauguacaucugcggcgauuccaccgagugcuccaaccugcugcugcaguacggcagcuucugcacccagcugaauagagcccugacagggaucgccguggaacaggacaagaacacccaagagguguucgcccaagugaagcaaaucuacaagaccccuccuaucaaggacuucggcggcuucaauuucagccagauucugcccgauccuagcaagcccagcaagcggagcuucaucgaggaccugcuguucaacaaagugacacuggccgacgccggcuucaucaagcaguauggcgauugucugggcgacauugccgccagggaucugauuugcgcccagaaguuuaacggacugacagugcugccuccucugcugaccgaugagaugaucgcccaguacacaucugcccugcuggccggcacaaucacaagcggcuggacauuuggagcuggcgccgcucugcagauccccuuugcuaugcagauggccuaccgguucaacggcaucggagugacccagaaugugcuguacgagaaccagaagcugaucgccaaccaguucaacagcgccaucggcaagauccaggacagccugagcagcacagcaagcgcccugggaaagcugcaggacguggucaaccagaaugcccaggcacugaacacccuggucaagcagcuguccuccaacuucggcgccaucagcucugugcugaacgauauccugagcagacuggacccuccugaggccgaggugcagaucgacagacugaucacaggcagacugcagagccuccagacauacgugacccagcagcugaucagagccgccgagauuagagccucugccaaucuggccgccaccaagaugucugagugugugcugggccagagcaagagaguggacuuuugcggcaagggcuaccaccugaugagcuucccucagucugccccucacggcgugguguuucugcacgugacauaugugcccgcucaagagaagaauuucaccaccgcuccagccaucugccacgacggcaaagcccacuuuccuagagaaggcguguucguguccaacggcacccauugguucgugacacagcggaacuucuacgagccccagaucaucaccaccgacaacaccuucgugucuggcaacugcgacguugugaucggcauugugaacaauaccguguacgacccucugcagcccgagcuggacagcuucaaagaggaacuggacaaguacuuuaagaaccacacaagccccgacguggaccugggcgauaucagcggaaucaaugccagcgucgugaacauccagaaagagaucgaccggcugaacgagguggccaagaaucugaacgagagccugaucgaccugcaagaacuggggaaguacgagcaguacaucaaguggcccugguacaucuggcugggcuuuaucgccggacugauugccaucgugauggucacaaucaugcuguguugcaugaccagcugcuguagcugccugaagggcuguuguagcuguggcagcugcugcaaguucgacgaggacgauucugagcccgugcugaagggcgugaaacugcacuacaccugaggacuaguuauaagacugacuagcccgaugggccucccaacgggcccuccuccccuccuugcaccgagauuaaucaaaggcucuuuucagagccaccaaaaaaaaaaaaaaaaaaaaaaaaaaaaaaaaaaaaaaaaaaaaaaaaaaaaaaaaaaaaaaaaaaaaaaaaaaaaaaaaaaaaaaaaaaaaaaaaaaaaa

SEQ ID NO: 24251 - RNA, 4035 nt, Artificial Sequence
  SARS-CoV-2/Wuhan/WIV05/2019__EPI_ISL_402128 spike protein mRNA gc mod (1-1273)(K986P_V987P_A222V_D614G)
aggagaaagcuuaccauguucguguuucuggugcugcugccccugguguccagccagugugugaaccugaccaccagaacacagcugccuccagccuacaccaacagcuucaccagaggcguguacuaccccgacaagguguucagauccagcgugcugcacucuacccaggaccuguuccugccuuucuucagcaacgugaccugguuccacgccauccacguguccggcaccaauggcaccaagagauucgacaaccccgugcugcccuucaacgacgggguguacuuugccagcaccgagaaguccaacaucaucagaggcuggaucuucggcaccacacuggacagcaagacccagagccugcugaucgugaacaacgccaccaacguggucaucaaagugugcgaguuccaguucugcaacgaccccuuccugggcgucuacuaccacaagaacaacaagagcuggauggaaagcgaguuccggguguacagcagcgccaacaacugcaccuucgaguacgugucccagccuuuccugauggaccuggaaggcaagcagggcaacuucaagaaccugcgcgaguucguguucaagaacaucgacggcuacuucaaaaucuacagcaagcacaccccuaucaaccucgugcgggaucugccucagggcuucucugugcuggaaccccugguggaucugcccaucggcaucaacaucacccgguuucagacacugcuggcccugcacagaagcuaccugacaccuggcgauagcagcagcggauggacagcuggugccgccgcuuacuaugugggcuaccugcagccuagaaccuuccugcugaaguacaacgagaacggcaccaucaccgacgccguggauugugcucuggauccucugagcgagacaaagugcacccugaaguccuucaccguggaaaagggcaucuaccagaccagcaacuuccgggugcagcccaccgaauccaucgugcgguuccccaauaucaccaaucugugccccuucggcgagguguucaaugccaccagauucgccucuguguacgccuggaaccggaagcggaucagcaauugcguggccgacuacuccgugcuguacaacuccgccagcuucagcaccuucaagugcuacggcguguccccuaccaagcugaacgaccugugcuucacaaacguguacgccgacagcuucgugauccggggagaugaagugcggcagauugccccuggacagacaggcaagaucgccgacuacaacuacaagcugcccgacgacuucaccggcugugugauugccuggaacagcaacaaccuggacuccaaagucggcggcaacuacaauuaccuguaccggcuguuccggaaguccaaucugaagcccuucgagcgggacaucagcaccgaaaucuaucaggccggcagcaccccuugcaacggcguggaaggcuucaacugcuacuucccacugcaguccuacggcuuucagcccacaaauggcgugggcuaucagcccuacagagugguggugcugagcuucgaacugcugcaugcuccugccacagugugcggcccuaagaaaagcaccaaucucgugaagaacaaaugcgugaacuucaacuucaacggccugaccggcaccggcgugcugacagagagcaacaagaaguuccugccauuccagcaguuuggccgggauaucgccgauaccacagacgccguuagagauccccagacacuggaaauccuggacaucaccccaugcagcuucggcggagugucugugaucaccccuggcaccaacaccagcaaucagguggcagugcuguaccagggcgugaacuguaccgaagugcccguggccauucacgccgaucagcugacaccuacauggcggguguacuccaccggcagcaauguguuucagaccagagccggcugucugaucggagccgagcacgugaacaauagcuacgagugcgacauccccaucggcgcuggcaucugugccagcuaccagacacagacaaacagccccagacgggcuagaagcguggccagccagagcaucauugccuacacaaugucucugggcgccgagaacagcguggccuacuccaacaacucuaucgcuauccccaccaacuucaccaucagcgugaccaccgagauccugccuguguccaugaccaagaccagcguggacugcaccauguacaucugcggcgauuccaccgagugcuccaaccugcugcugcaguacggcagcuucugcacccagcugaauagagcccugacagggaucgccguggaacaggacaagaacacccaagagguguucgcccaagugaagcaaaucuacaagaccccuccuaucaaggacuucggcggcuucaauuucagccagauucugcccgauccuagcaagcccagcaagcggagcuucaucgaggaccugcuguucaacaaagugacacuggccgacgccggcuucaucaagcaguauggcgauugucugggcgacauugccgccagggaucugauuugcgcccagaaguuuaacggacugacagugcugccuccucugcugaccgaugagaugaucgcccaguacacaucugcccugcuggccggcacaaucacaagcggcuggacauuuggagcuggcgccgcucugcagauccccuuugcuaugcagauggccuaccgguucaacggcaucggagugacccagaaugugcuguacgagaaccagaagcugaucgccaaccaguucaacagcgccaucggcaagauccaggacagccugagcagcacagcaagcgcccugggaaagcugcaggacguggucaaccagaaugcccaggcacugaacacccuggucaagcagcuguccuccaacuucggcgccaucagcucugugcugaacgauauccugagcagacuggacccuccugaggccgaggugcagaucgacagacugaucacaggcagacugcagagccuccagacauacgugacccagcagcugaucagagccgccgagauuagagccucugccaaucuggccgccaccaagaugucugagugugugcugggccagagcaagagaguggacuuuugcggcaagggcuaccaccugaugagcuucccucagucugccccucacggcgugguguuucugcacgugacauaugugcccgcucaagagaagaauuucaccaccgcuccagccaucugccacgacggcaaagcccacuuuccuagagaaggcguguucguguccaacggcacccauugguucgugacacagcggaacuucuacgagccccagaucaucaccaccgacaacaccuucgugucuggcaacugcgacguugugaucggcauugugaacaauaccguguacgacccucugcagcccgagcuggacagcuucaaagaggaacuggacaaguacuuuaagaaccacacaagccccgacguggaccugggcgauaucagcggaaucaaugccagcgucgugaacauccagaaagagaucgaccggcugaacgagguggccaagaaucugaacgagagccugaucgaccugcaagaacuggggaaguacgagcaguacaucaaguggcccugguacaucuggcugggcuuuaucgccggacugauugccaucgugauggucacaaucaugcuguguugcaugaccagcugcuguagcugccugaagggcuguuguagcuguggcagcugcugcaaguucgacgaggacgauucugagcccgugcugaagggcgugaaacugcacuacaccugaggacuaguuauaagacugacuagcccgaugggccucccaacgggcccuccuccccuccuugcaccgagauuaaucaaaggcucuuuucagagccaccaaaaaaaaaaaaaaaaaaaaaaaaaaaaaaaaaaaaaaaaaaaaaaaaaaaaaaaaaaaaaaaaaaaaaaaaaaaaaaaaaaaaaaaaaaaaaaaaaaaaa

SEQ ID NO: 24252 - RNA, 4035 nt, Artificial Sequence
  SARS-CoV-2/Wuhan/WIV05/2019__EPI_ISL_402128 spike protein mRNA gc mod (1-1273)(K986P_V987P_N439K_D614G)
aggagaaagcuuaccauguucguguuucuggugcugcugccccugguguccagccagugugugaaccugaccaccagaacacagcugccuccagccuacaccaacagcuucaccagaggcguguacuaccccgacaagguguucagauccagcgugcugcacucuacccaggaccuguuccugccuuucuucagcaacgugaccugguuccacgccauccacguguccggcaccaauggcaccaagagauucgacaaccccgugcugcccuucaacgacgggguguacuuugccagcaccgagaaguccaacaucaucagaggcuggaucuucggcaccacacuggacagcaagacccagagccugcugaucgugaacaacgccaccaacguggucaucaaagugugcgaguuccaguucugcaacgaccccuuccugggcgucuacuaccacaagaacaacaagagcuggauggaaagcgaguuccggguguacagcagcgccaacaacugcaccuucgaguacgugucccagccuuuccugauggaccuggaaggcaagcagggcaacuucaagaaccugcgcgaguucguguucaagaacaucgacggcuacuucaaaaucuacagcaagcacaccccuaucaaccucgugcgggaucugccucagggcuucucugcucuggaaccccugguggaucugcccaucggcaucaacaucacccgguuucagacacugcuggcccugcacagaagcuaccugacaccuggcgauagcagcagcggauggacagcuggugccgccgcuuacuaugugggcuaccugcagccuagaaccuuccugcugaaguacaacgagaacggcaccaucaccgacgccguggauugugcucuggauccucugagcgagacaaagugcacccugaaguccuucaccguggaaaagggcaucuaccagaccagcaacuuccgggugcagcccaccgaauccaucgugcgguuccccaauaucaccaaucugugccccuucggcgagguguucaaugccaccagauucgccucuguguacgccuggaaccggaagcggaucagcaauugcguggccgacuacuccgugcuguacaacuccgccagcuucagcaccuucaagugcuacggcguguccccuaccaagcugaacgaccugugcuucacaaacguguacgccgacagcuucgugauccggggagaugaagugcggcagauugccccuggacagacaggcaagaucgccgacuacaacuacaagcugcccgacgacuucaccggcugugugauugccuggaacagcaagaaccuggacuccaaagucggcggcaacuacaauuaccuguaccggcuguuccggaaguccaaucugaagcccuucgagcgggacaucagcaccgaaaucuaucaggccggcagcaccccuugcaacggcguggaaggcuucaacugcuacuucccacugcaguccuacggcuuucagcccacaaauggcgugggcuaucagcccuacagagugguggugcugagcuucgaacugcugcaugcuccugccacagugugcggcccuaagaaaagcaccaaucucgugaagaacaaaugcgugaacuucaacuucaacggccugaccggcaccggcgugcugacagagagcaacaagaaguuccugccauuccagcaguuuggccgggauaucgccgauaccacagacgccguuagagauccccagacacuggaaauccuggacaucaccccaugcagcuucggcggagugucugugaucaccccuggcaccaacaccagcaaucagguggcagugcuguaccagggcgugaacuguaccgaagugcccguggccauucacgccgaucagcugacaccuacauggcggguguacuccaccggcagcaauguguuucagaccagagccggcugucugaucggagccgagcacgugaacaauagcuacgagugcgacauccccaucggcgcuggcaucugugccagcuaccagacacagacaaacagccccagacgggcuagaagcguggccagccagagcaucauugccuacacaaugucucugggcgccgagaacagcguggccuacuccaacaacucuaucgcuauccccaccaacuucaccaucagcgugaccaccgagauccugccuguguccaugaccaagaccagcguggacugcaccauguacaucugcggcgauuccaccgagugcuccaaccugcugcugcaguacggcagcuucugcacccagcugaauagagcccugacagggaucgccguggaacaggacaagaacacccaagagguguucgcccaagugaagcaaaucuacaagaccccuccuaucaaggacuucggcggcuucaauuucagccagauucugcccgauccuagcaagcccagcaagcggagcuucaucgaggaccugcuguucaacaaagugacacuggccgacgccggcuucaucaagcaguauggcgauugucugggcgacauugccgccagggaucugauuugcgcccagaaguuuaacggacugacagugcugccuccucugcugaccgaugagaugaucgcccaguacacaucugcccugcuggccggcacaaucacaagcggcuggacauuuggagcuggcgccgcucugcagauccccuuugcuaugcagauggccuaccgguucaacggcaucggagugacccagaaugugcuguacgagaaccagaagcugaucgccaaccaguucaacagcgccaucggcaagauccaggacagccugagcagcacagcaagcgcccugggaaagcugcaggacguggucaaccagaaugcccaggcacugaacacccuggucaagcagcuguccuccaacuucggcgccaucagcucugugcugaacgauauccugagcagacuggacccuccugaggccgaggugcagaucgacagacugaucacaggcagacugcagagccuccagacauacgugacccagcagcugaucagagccgccgagauuagagccucugccaaucuggccgccaccaagaugucugagugugugcugggccagagcaagagaguggacuuuugcggcaagggcuaccaccugaugagcuucccucagucugccccucacggcgugguguuucugcacgugacauaugugcccgcucaagagaagaauuucaccaccgcuccagccaucugccacgacggcaaagcccacuuuccuagagaaggcguguucguguccaacggcacccauugguucgugacacagcggaacuucuacgagccccagaucaucaccaccgacaacaccuucgugucuggcaacugcgacguugugaucggcauugugaacaauaccguguacgacccucugcagcccgagcuggacagcuucaaagaggaacuggacaaguacuuuaagaaccacacaagccccgacguggaccugggcgauaucagcggaaucaaugccagcgucgugaacauccagaaagagaucgaccggcugaacgagguggccaagaaucugaacgagagccugaucgaccugcaagaacuggggaaguacgagcaguacaucaaguggcccugguacaucuggcugggcuuuaucgccggacugauugccaucgugauggucacaaucaugcuguguugcaugaccagcugcuguagcugccugaagggcuguuguagcuguggcagcugcugcaaguucgacgaggacgauucugagcccgugcugaagggcgugaaacugcacuacaccugaggacuaguuauaagacugacuagcccgaugggccucccaacgggcccuccuccccuccuugcaccgagauuaaucaaaggcucuuuucagagccaccaaaaaaaaaaaaaaaaaaaaaaaaaaaaaaaaaaaaaaaaaaaaaaaaaaaaaaaaaaaaaaaaaaaaaaaaaaaaaaaaaaaaaaaaaaaaaaaaaaaaa

SEQ ID NO: 24253 - RNA, 4035 nt, Artificial Sequence
  SARS-CoV-2/Wuhan/WIV05/2019__EPI_ISL_402128 spike protein mRNA gc mod (1-1273)(K986P_V987P_S477N_D614G)
aggagaaagcuuaccauguucguguuucuggugcugcugccccugguguccagccagugugugaaccugaccaccagaacacagcugccuccagccuacaccaacagcuucaccagaggcguguacuaccccgacaagguguucagauccagcgugcugcacucuacccaggaccuguuccugccuuucuucagcaacgugaccugguuccacgccauccacguguccggcaccaauggcaccaagagauucgacaaccccgugcugcccuucaacgacgggguguacuuugccagcaccgagaaguccaacaucaucagaggcuggaucuucggcaccacacuggacagcaagacccagagccugcugaucgugaacaacgccaccaacguggucaucaaagugugcgaguuccaguucugcaacgaccccuuccugggcgucuacuaccacaagaacaacaagagcuggauggaaagcgaguuccggguguacagcagcgccaacaacugcaccuucgaguacgugucccagccuuuccugauggaccuggaaggcaagcagggcaacuucaagaaccugcgcgaguucguguucaagaacaucgacggcuacuucaaaaucuacagcaagcacaccccuaucaaccucgugcgggaucugccucagggcuucucugcucuggaaccccugguggaucugcccaucggcaucaacaucacccgguuucagacacugcuggcccugcacagaagcuaccugacaccuggcgauagcagcagcggauggacagcuggugccgccgcuuacuaugugggcuaccugcagccuagaaccuuccugcugaaguacaacgagaacggcaccaucaccgacgccguggauugugcucuggauccucugagcgagacaaagugcacccugaaguccuucaccguggaaaagggcaucuaccagaccagcaacuuccgggugcagcccaccgaauccaucgugcgguuccccaauaucaccaaucugugccccuucggcgagguguucaaugccaccagauucgccucuguguacgccuggaaccggaagcggaucagcaauugcguggccgacuacuccgugcuguacaacuccgccagcuucagcaccuucaagugcuacggcguguccccuaccaagcugaacgaccugugcuucacaaacguguacgccgacagcuucgugauccggggagaugaagugcggcagauugccccuggacagacaggcaagaucgccgacuacaacuacaagcugcccgacgacuucaccggcugugugauugccuggaacagcaacaaccuggacuccaaagucggcggcaacuacaauuaccuguaccggcuguuccggaaguccaaucugaagcccuucgagcgggacaucagcaccgaaaucuaucaggccggcaacaccccuugcaacggcguggaaggcuucaacugcuacuucccacugcaguccuacggcuuucagcccacaaauggcgugggcuaucagcccuacagagugguggugcugagcuucgaacugcugcaugcuccugccacagugugcggcccuaagaaaagcaccaaucucgugaagaacaaaugcgugaacuucaacuucaacggccugaccggcaccggcgugcugacagagagcaacaagaaguuccugccauuccagcaguuuggccgggauaucgccgauaccacagacgccguuagagauccccagacacuggaaauccuggacaucaccccaugcagcuucggcggagugucugugaucaccccuggcaccaacaccagcaaucagguggcagugcuguaccagggcgugaacuguaccgaagugcccguggccauucacgccgaucagcugacaccuacauggcggguguacuccaccggcagcaauguguuucagaccagagccggcugucugaucggagccgagcacgugaacaauagcuacgagugcgacauccccaucggcgcuggcaucugugccagcuaccagacacagacaaacagccccagacgggcuagaagcguggccagccagagcaucauugccuacacaaugucucugggcgccgagaacagcguggccuacuccaacaacucuaucgcuauccccaccaacuucaccaucagcgugaccaccgagauccugccuguguccaugaccaagaccagcguggacugcaccauguacaucugcggcgauuccaccgagugcuccaaccugcugcugcaguacggcagcuucugcacccagcugaauagagcccugacagggaucgccguggaacaggacaagaacacccaagagguguucgcccaagugaagcaaaucuacaagaccccuccuaucaaggacuucggcggcuucaauuucagccagauucugcccgauccuagcaagcccagcaagcggagcuucaucgaggaccugcuguucaacaaagugacacuggccgacgccggcuucaucaagcaguauggcgauugucugggcgacauugccgccagggaucugauuugcgcccagaaguuuaacggacugacagugcugccuccucugcugaccgaugagaugaucgcccaguacacaucugcccugcuggccggcacaaucacaagcggcuggacauuuggagcuggcgccgcucugcagauccccuuugcuaugcagauggccuaccgguucaacggcaucggagugacccagaaugugcuguacgagaaccagaagcugaucgccaaccaguucaacagcgccaucggcaagauccaggacagccugagcagcacagcaagcgcccugggaaagcugcaggacguggucaaccagaaugcccaggcacugaacacccuggucaagcagcuguccuccaacuucggcgccaucagcucugugcugaacgauauccugagcagacuggacccuccugaggccgaggugcagaucgacagacugaucacaggcagacugcagagccuccagacauacgugacccagcagcugaucagagccgccgagauuagagccucugccaaucuggccgccaccaagaugucugagugugugcugggccagagcaagagaguggacuuuugcggcaagggcuaccaccugaugagcuucccucagucugccccucacggcgugguguuucugcacgugacauaugugcccgcucaagagaagaauuucaccaccgcuccagccaucugccacgacggcaaagcccacuuuccuagagaaggcguguucguguccaacggcacccauugguucgugacacagcggaacuucuacgagccccagaucaucaccaccgacaacaccuucgugucuggcaacugcgacguugugaucggcauugugaacaauaccguguacgacccucugcagcccgagcuggacagcuucaaagaggaacuggacaaguacuuuaagaaccacacaagccccgacguggaccugggcgauaucagcggaaucaaugccagcgucgugaacauccagaaagagaucgaccggcugaacgagguggccaagaaucugaacgagagccugaucgaccugcaagaacuggggaaguacgagcaguacaucaaguggcccugguacaucuggcugggcuuuaucgccggacugauugccaucgugauggucacaaucaugcuguguugcaugaccagcugcuguagcugccugaagggcuguuguagcuguggcagcugcugcaaguucgacgaggacgauucugagcccgugcugaagggcgugaaacugcacuacaccugaggacuaguuauaagacugacuagcccgaugggccucccaacgggcccuccuccccuccuugcaccgagauuaaucaaaggcucuuuucagagccaccaaaaaaaaaaaaaaaaaaaaaaaaaaaaaaaaaaaaaaaaaaaaaaaaaaaaaaaaaaaaaaaaaaaaaaaaaaaaaaaaaaaaaaaaaaaaaaaaaaaaa

SEQ ID NO: 24254 - RNA, 4035 nt, Artificial Sequence
  SARS-CoV-2/Wuhan/WIV05/2019__EPI_ISL_402128 spike protein mRNA gc mod (1-1273)(K986P_V987P_N501Y_D614G)
aggagaaagcuuaccauguucguguuucuggugcugcugccccugguguccagccagugugugaaccugaccaccagaacacagcugccuccagccuacaccaacagcuucaccagaggcguguacuaccccgacaagguguucagauccagcgugcugcacucuacccaggaccuguuccugccuuucuucagcaacgugaccugguuccacgccauccacguguccggcaccaauggcaccaagagauucgacaaccccgugcugcccuucaacgacgggguguacuuugccagcaccgagaaguccaacaucaucagaggcuggaucuucggcaccacacuggacagcaagacccagagccugcugaucgugaacaacgccaccaacguggucaucaaagugugcgaguuccaguucugcaacgaccccuuccugggcgucuacuaccacaagaacaacaagagcuggauggaaagcgaguuccggguguacagcagcgccaacaacugcaccuucgaguacgugucccagccuuuccugauggaccuggaaggcaagcagggcaacuucaagaaccugcgcgaguucguguucaagaacaucgacggcuacuucaaaaucuacagcaagcacaccccuaucaaccucgugcgggaucugccucagggcuucucugcucuggaaccccugguggaucugcccaucggcaucaacaucacccgguuucagacacugcuggcccugcacagaagcuaccugacaccuggcgauagcagcagcggauggacagcuggugccgccgcuuacuaugugggcuaccugcagccuagaaccuuccugcugaaguacaacgagaacggcaccaucaccgacgccguggauugugcucuggauccucugagcgagacaaagugcacccugaaguccuucaccguggaaaagggcaucuaccagaccagcaacuuccgggugcagcccaccgaauccaucgugcgguuccccaauaucaccaaucugugccccuucggcgagguguucaaugccaccagauucgccucuguguacgccuggaaccggaagcggaucagcaauugcguggccgacuacuccgugcuguacaacuccgccagcuucagcaccuucaagugcuacggcguguccccuaccaagcugaacgaccugugcuucacaaacguguacgccgacagcuucgugauccggggagaugaagugcggcagauugccccuggacagacaggcaagaucgccgacuacaacuacaagcugcccgacgacuucaccggcugugugauugccuggaacagcaacaaccuggacuccaaagucggcggcaacuacaauuaccuguaccggcuguuccggaaguccaaucugaagcccuucgagcgggacaucagcaccgaaaucuaucaggccggcagcaccccuugcaacggcguggaaggcuucaacugcuacuucccacugcaguccuacggcuuucagcccacauacggcgugggcuaucagcccuacagagugguggugcugagcuucgaacugcugcaugcuccugccacagugugcggcccuaagaaaagcaccaaucucgugaagaacaaaugcgugaacuucaacuucaacggccugaccggcaccggcgugcugacagagagcaacaagaaguuccugccauuccagcaguuuggccgggauaucgccgauaccacagacgccguuagagauccccagacacuggaaauccuggacaucaccccaugcagcuucggcggagugucugugaucaccccuggcaccaacaccagcaaucagguggcagugcuguaccagggcgugaacuguaccgaagugcccguggccauucacgccgaucagcugacaccuacauggcggguguacuccaccggcagcaauguguuucagaccagagccggcugucugaucggagccgagcacgugaacaauagcuacgagugcgacauccccaucggcgcuggcaucugugccagcuaccagacacagacaaacagccccagacgggcuagaagcguggccagccagagcaucauugccuacacaaugucucugggcgccgagaacagcguggccuacuccaacaacucuaucgcuauccccaccaacuucaccaucagcgugaccaccgagauccugccuguguccaugaccaagaccagcguggacugcaccauguacaucugcggcgauuccaccgagugcuccaaccugcugcugcaguacggcagcuucugcacccagcugaauagagcccugacagggaucgccguggaacaggacaagaacacccaagagguguucgcccaagugaagcaaaucuacaagaccccuccuaucaaggacuucggcggcuucaauuucagccagauucugcccgauccuagcaagcccagcaagcggagcuucaucgaggaccugcuguucaacaaagugacacuggccgacgccggcuucaucaagcaguauggcgauugucugggcgacauugccgccagggaucugauuugcgcccagaaguuuaacggacugacagugcugccuccucugcugaccgaugagaugaucgcccaguacacaucugcccugcuggccggcacaaucacaagcggcuggacauuuggagcuggcgccgcucugcagauccccuuugcuaugcagauggccuaccgguucaacggcaucggagugacccagaaugugcuguacgagaaccagaagcugaucgccaaccaguucaacagcgccaucggcaagauccaggacagccugagcagcacagcaagcgcccugggaaagcugcaggacguggucaaccagaaugcccaggcacugaacacccuggucaagcagcuguccuccaacuucggcgccaucagcucugugcugaacgauauccugagcagacuggacccuccugaggccgaggugcagaucgacagacugaucacaggcagacugcagagccuccagacauacgugacccagcagcugaucagagccgccgagauuagagccucugccaaucuggccgccaccaagaugucugagugugugcugggccagagcaagagaguggacuuuugcggcaagggcuaccaccugaugagcuucccucagucugccccucacggcgugguguuucugcacgugacauaugugcccgcucaagagaagaauuucaccaccgcuccagccaucugccacgacggcaaagcccacuuuccuagagaaggcguguucguguccaacggcacccauugguucgugacacagcggaacuucuacgagccccagaucaucaccaccgacaacaccuucgugucuggcaacugcgacguugugaucggcauugugaacaauaccguguacgacccucugcagcccgagcuggacagcuucaaagaggaacuggacaaguacuuuaagaaccacacaagccccgacguggaccugggcgauaucagcggaaucaaugccagcgucgugaacauccagaaagagaucgaccggcugaacgagguggccaagaaucugaacgagagccugaucgaccugcaagaacuggggaaguacgagcaguacaucaaguggcccugguacaucuggcugggcuuuaucgccggacugauugccaucgugauggucacaaucaugcuguguugcaugaccagcugcuguagcugccugaagggcuguuguagcuguggcagcugcugcaaguucgacgaggacgauucugagcccgugcugaagggcgugaaacugcacuacaccugaggacuaguuauaagacugacuagcccgaugggccucccaacgggcccuccuccccuccuugcaccgagauuaaucaaaggcucuuuucagagccaccaaaaaaaaaaaaaaaaaaaaaaaaaaaaaaaaaaaaaaaaaaaaaaaaaaaaaaaaaaaaaaaaaaaaaaaaaaaaaaaaaaaaaaaaaaaaaaaaaaaaa

SEQ ID NO: 24255 - RNA, 4029 nt, Artificial Sequence
  SARS-CoV-2/Wuhan/WIV05/2019__EPI_ISL_402128 spike protein mRNA gc mod (1-1273)(K986P_V987P_H69del_V70del_D614G)
aggagaaagcuuaccauguucguguuucuggugcugcugccccugguguccagccagugugugaaccugaccaccagaacacagcugccuccagccuacaccaacagcuucaccagaggcguguacuaccccgacaagguguucagauccagcgugcugcacucuacccaggaccuguuccugccuuucuucagcaacgugaccugguuccacgccaucuccggcaccaauggcaccaagagauucgacaaccccgugcugcccuucaacgacgggguguacuuugccagcaccgagaaguccaacaucaucagaggcuggaucuucggcaccacacuggacagcaagacccagagccugcugaucgugaacaacgccaccaacguggucaucaaagugugcgaguuccaguucugcaacgaccccuuccugggcgucuacuaccacaagaacaacaagagcuggauggaaagcgaguuccggguguacagcagcgccaacaacugcaccuucgaguacgugucccagccuuuccugauggaccuggaaggcaagcagggcaacuucaagaaccugcgcgaguucguguucaagaacaucgacggcuacuucaaaaucuacagcaagcacaccccuaucaaccucgugcgggaucugccucagggcuucucugcucuggaaccccugguggaucugcccaucggcaucaacaucacccgguuucagacacugcuggcccugcacagaagcuaccugacaccuggcgauagcagcagcggauggacagcuggugccgccgcuuacuaugugggcuaccugcagccuagaaccuuccugcugaaguacaacgagaacggcaccaucaccgacgccguggauugugcucuggauccucugagcgagacaaagugcacccugaaguccuucaccguggaaaagggcaucuaccagaccagcaacuuccgggugcagcccaccgaauccaucgugcgguuccccaauaucaccaaucugugccccuucggcgagguguucaaugccaccagauucgccucuguguacgccuggaaccggaagcggaucagcaauugcguggccgacuacuccgugcuguacaacuccgccagcuucagcaccuucaagugcuacggcguguccccuaccaagcugaacgaccugugcuucacaaacguguacgccgacagcuucgugauccggggagaugaagugcggcagauugccccuggacagacaggcaagaucgccgacuacaacuacaagcugcccgacgacuucaccggcugugugauugccuggaacagcaacaaccuggacuccaaagucggcggcaacuacaauuaccuguaccggcuguuccggaaguccaaucugaagcccuucgagcgggacaucagcaccgaaaucuaucaggccggcagcaccccuugcaacggcguggaaggcuucaacugcuacuucccacugcaguccuacggcuuucagcccacaaauggcgugggcuaucagcccuacagagugguggugcugagcuucgaacugcugcaugcuccugccacagugugcggcccuaagaaaagcaccaaucucgugaagaacaaaugcgugaacuucaacuucaacggccugaccggcaccggcgugcugacagagagcaacaagaaguuccugccauuccagcaguuuggccgggauaucgccgauaccacagacgccguuagagauccccagacacuggaaauccuggacaucaccccaugcagcuucggcggagugucugugaucaccccuggcaccaacaccagcaaucagguggcagugcuguaccagggcgugaacuguaccgaagugcccguggccauucacgccgaucagcugacaccuacauggcggguguacuccaccggcagcaauguguuucagaccagagccggcugucugaucggagccgagcacgugaacaauagcuacgagugcgacauccccaucggcgcuggcaucugugccagcuaccagacacagacaaacagccccagacgggcuagaagcguggccagccagagcaucauugccuacacaaugucucugggcgccgagaacagcguggccuacuccaacaacucuaucgcuauccccaccaacuucaccaucagcgugaccaccgagauccugccuguguccaugaccaagaccagcguggacugcaccauguacaucugcggcgauuccaccgagugcuccaaccugcugcugcaguacggcagcuucugcacccagcugaauagagcccugacagggaucgccguggaacaggacaagaacacccaagagguguucgcccaagugaagcaaaucuacaagaccccuccuaucaaggacuucggcggcuucaauuucagccagauucugcccgauccuagcaagcccagcaagcggagcuucaucgaggaccugcuguucaacaaagugacacuggccgacgccggcuucaucaagcaguauggcgauugucugggcgacauugccgccagggaucugauuugcgcccagaaguuuaacggacugacagugcugccuccucugcugaccgaugagaugaucgcccaguacacaucugcccugcuggccggcacaaucacaagcggcuggacauuuggagcuggcgccgcucugcagauccccuuugcuaugcagauggccuaccgguucaacggcaucggagugacccagaaugugcuguacgagaaccagaagcugaucgccaaccaguucaacagcgccaucggcaagauccaggacagccugagcagcacagcaagcgcccugggaaagcugcaggacguggucaaccagaaugcccaggcacugaacacccuggucaagcagcuguccuccaacuucggcgccaucagcucugugcugaacgauauccugagcagacuggacccuccugaggccgaggugcagaucgacagacugaucacaggcagacugcagagccuccagacauacgugacccagcagcugaucagagccgccgagauuagagccucugccaaucuggccgccaccaagaugucugagugugugcugggccagagcaagagaguggacuuuugcggcaagggcuaccaccugaugagcuucccucagucugccccucacggcgugguguuucugcacgugacauaugugcccgcucaagagaagaauuucaccaccgcuccagccaucugccacgacggcaaagcccacuuuccuagagaaggcguguucguguccaacggcacccauugguucgugacacagcggaacuucuacgagccccagaucaucaccaccgacaacaccuucgugucuggcaacugcgacguugugaucggcauugugaacaauaccguguacgacccucugcagcccgagcuggacagcuucaaagaggaacuggacaaguacuuuaagaaccacacaagccccgacguggaccugggcgauaucagcggaaucaaugccagcgucgugaacauccagaaagagaucgaccggcugaacgagguggccaagaaucugaacgagagccugaucgaccugcaagaacuggggaaguacgagcaguacaucaaguggcccugguacaucuggcugggcuuuaucgccggacugauugccaucgugauggucacaaucaugcuguguugcaugaccagcugcuguagcugccugaagggcuguuguagcuguggcagcugcugcaaguucgacgaggacgauucugagcccgugcugaagggcgugaaacugcacuacaccugaggacuaguuauaagacugacuagcccgaugggccucccaacgggcccuccuccccuccuugcaccgagauuaaucaaaggcucuuuucagagccaccaaaaaaaaaaaaaaaaaaaaaaaaaaaaaaaaaaaaaaaaaaaaaaaaaaaaaaaaaaaaaaaaaaaaaaaaaaaaaaaaaaaaaaaaaaaaaaaaaaaaa

SEQ ID NO: 24256 - RNA, 4035 nt, Artificial Sequence
  SARS-CoV-2/Wuhan/WIV05/2019__EPI_ISL_402128 spike protein mRNA gc mod (1-1273)(K986P_V987P_Y453F_D614G)
aggagaaagcuuaccauguucguguuucuggugcugcugccccugguguccagccagugugugaaccugaccaccagaacacagcugccuccagccuacaccaacagcuucaccagaggcguguacuaccccgacaagguguucagauccagcgugcugcacucuacccaggaccuguuccugccuuucuucagcaacgugaccugguuccacgccauccacguguccggcaccaauggcaccaagagauucgacaaccccgugcugcccuucaacgacgggguguacuuugccagcaccgagaaguccaacaucaucagaggcuggaucuucggcaccacacuggacagcaagacccagagccugcugaucgugaacaacgccaccaacguggucaucaaagugugcgaguuccaguucugcaacgaccccuuccugggcgucuacuaccacaagaacaacaagagcuggauggaaagcgaguuccggguguacagcagcgccaacaacugcaccuucgaguacgugucccagccuuuccugauggaccuggaaggcaagcagggcaacuucaagaaccugcgcgaguucguguucaagaacaucgacggcuacuucaaaaucuacagcaagcacaccccuaucaaccucgugcgggaucugccucagggcuucucugcucuggaaccccugguggaucugcccaucggcaucaacaucacccgguuucagacacugcuggcccugcacagaagcuaccugacaccuggcgauagcagcagcggauggacagcuggugccgccgcuuacuaugugggcuaccugcagccuagaaccuuccugcugaaguacaacgagaacggcaccaucaccgacgccguggauugugcucuggauccucugagcgagacaaagugcacccugaaguccuucaccguggaaaagggcaucuaccagaccagcaacuuccgggugcagcccaccgaauccaucgugcgguuccccaauaucaccaaucugugccccuucggcgagguguucaaugccaccagauucgccucuguguacgccuggaaccggaagcggaucagcaauugcguggccgacuacuccgugcuguacaacuccgccagcuucagcaccuucaagugcuacggcguguccccuaccaagcugaacgaccugugcuucacaaacguguacgccgacagcuucgugauccggggagaugaagugcggcagauugccccuggacagacaggcaagaucgccgacuacaacuacaagcugcccgacgacuucaccggcugugugauugccuggaacagcaacaaccuggacuccaaagucggcggcaacuacaauuaccuguuccggcuguuccggaaguccaaucugaagcccuucgagcgggacaucagcaccgaaaucuaucaggccggcagcaccccuugcaacggcguggaaggcuucaacugcuacuucccacugcaguccuacggcuuucagcccacaaauggcgugggcuaucagcccuacagagugguggugcugagcuucgaacugcugcaugcuccugccacagugugcggcccuaagaaaagcaccaaucucgugaagaacaaaugcgugaacuucaacuucaacggccugaccggcaccggcgugcugacagagagcaacaagaaguuccugccauuccagcaguuuggccgggauaucgccgauaccacagacgccguuagagauccccagacacuggaaauccuggacaucaccccaugcagcuucggcggagugucugugaucaccccuggcaccaacaccagcaaucagguggcagugcuguaccagggcgugaacuguaccgaagugcccguggccauucacgccgaucagcugacaccuacauggcggguguacuccaccggcagcaauguguuucagaccagagccggcugucugaucggagccgagcacgugaacaauagcuacgagugcgacauccccaucggcgcuggcaucugugccagcuaccagacacagacaaacagccccagacgggcuagaagcguggccagccagagcaucauugccuacacaaugucucugggcgccgagaacagcguggccuacuccaacaacucuaucgcuauccccaccaacuucaccaucagcgugaccaccgagauccugccuguguccaugaccaagaccagcguggacugcaccauguacaucugcggcgauuccaccgagugcuccaaccugcugcugcaguacggcagcuucugcacccagcugaauagagcccugacagggaucgccguggaacaggacaagaacacccaagagguguucgcccaagugaagcaaaucuacaagaccccuccuaucaaggacuucggcggcuucaauuucagccagauucugcccgauccuagcaagcccagcaagcggagcuucaucgaggaccugcuguucaacaaagugacacuggccgacgccggcuucaucaagcaguauggcgauugucugggcgacauugccgccagggaucugauuugcgcccagaaguuuaacggacugacagugcugccuccucugcugaccgaugagaugaucgcccaguacacaucugcccugcuggccggcacaaucacaagcggcuggacauuuggagcuggcgccgcucugcagauccccuuugcuaugcagauggccuaccgguucaacggcaucggagugacccagaaugugcuguacgagaaccagaagcugaucgccaaccaguucaacagcgccaucggcaagauccaggacagccugagcagcacagcaagcgcccugggaaagcugcaggacguggucaaccagaaugcccaggcacugaacacccuggucaagcagcuguccuccaacuucggcgccaucagcucugugcugaacgauauccugagcagacuggacccuccugaggccgaggugcagaucgacagacugaucacaggcagacugcagagccuccagacauacgugacccagcagcugaucagagccgccgagauuagagccucugccaaucuggccgccaccaagaugucugagugugugcugggccagagcaagagaguggacuuuugcggcaagggcuaccaccugaugagcuucccucagucugccccucacggcgugguguuucugcacgugacauaugugcccgcucaagagaagaauuucaccaccgcuccagccaucugccacgacggcaaagcccacuuuccuagagaaggcguguucguguccaacggcacccauugguucgugacacagcggaacuucuacgagccccagaucaucaccaccgacaacaccuucgugucuggcaacugcgacguugugaucggcauugugaacaauaccguguacgacccucugcagcccgagcuggacagcuucaaagaggaacuggacaaguacuuuaagaaccacacaagccccgacguggaccugggcgauaucagcggaaucaaugccagcgucgugaacauccagaaagagaucgaccggcugaacgagguggccaagaaucugaacgagagccugaucgaccugcaagaacuggggaaguacgagcaguacaucaaguggcccugguacaucuggcugggcuuuaucgccggacugauugccaucgugauggucacaaucaugcuguguugcaugaccagcugcuguagcugccugaagggcuguuguagcuguggcagcugcugcaaguucgacgaggacgauucugagcccgugcugaagggcgugaaacugcacuacaccugaggacuaguuauaagacugacuagcccgaugggccucccaacgggcccuccuccccuccuugcaccgagauuaaucaaaggcucuuuucagagccaccaaaaaaaaaaaaaaaaaaaaaaaaaaaaaaaaaaaaaaaaaaaaaaaaaaaaaaaaaaaaaaaaaaaaaaaaaaaaaaaaaaaaaaaaaaaaaaaaaaaaa

SEQ ID NO: 24257 - RNA, 4035 nt, Artificial Sequence
  SARS-CoV-2/Wuhan/WIV05/2019__EPI_ISL_402128 spike protein mRNA gc mod (1-1273)(K986P_V987P_D614G_I692V)
aggagaaagcuuaccauguucguguuucuggugcugcugccccugguguccagccagugugugaaccugaccaccagaacacagcugccuccagccuacaccaacagcuucaccagaggcguguacuaccccgacaagguguucagauccagcgugcugcacucuacccaggaccuguuccugccuuucuucagcaacgugaccugguuccacgccauccacguguccggcaccaauggcaccaagagauucgacaaccccgugcugcccuucaacgacgggguguacuuugccagcaccgagaaguccaacaucaucagaggcuggaucuucggcaccacacuggacagcaagacccagagccugcugaucgugaacaacgccaccaacguggucaucaaagugugcgaguuccaguucugcaacgaccccuuccugggcgucuacuaccacaagaacaacaagagcuggauggaaagcgaguuccggguguacagcagcgccaacaacugcaccuucgaguacgugucccagccuuuccugauggaccuggaaggcaagcagggcaacuucaagaaccugcgcgaguucguguucaagaacaucgacggcuacuucaaaaucuacagcaagcacaccccuaucaaccucgugcgggaucugccucagggcuucucugcucuggaaccccugguggaucugcccaucggcaucaacaucacccgguuucagacacugcuggcccugcacagaagcuaccugacaccuggcgauagcagcagcggauggacagcuggugccgccgcuuacuaugugggcuaccugcagccuagaaccuuccugcugaaguacaacgagaacggcaccaucaccgacgccguggauugugcucuggauccucugagcgagacaaagugcacccugaaguccuucaccguggaaaagggcaucuaccagaccagcaacuuccgggugcagcccaccgaauccaucgugcgguuccccaauaucaccaaucugugccccuucggcgagguguucaaugccaccagauucgccucuguguacgccuggaaccggaagcggaucagcaauugcguggccgacuacuccgugcuguacaacuccgccagcuucagcaccuucaagugcuacggcguguccccuaccaagcugaacgaccugugcuucacaaacguguacgccgacagcuucgugauccggggagaugaagugcggcagauugccccuggacagacaggcaagaucgccgacuacaacuacaagcugcccgacgacuucaccggcugugugauugccuggaacagcaacaaccuggacuccaaagucggcggcaacuacaauuaccuguaccggcuguuccggaaguccaaucugaagcccuucgagcgggacaucagcaccgaaaucuaucaggccggcagcaccccuugcaacggcguggaaggcuucaacugcuacuucccacugcaguccuacggcuuucagcccacaaauggcgugggcuaucagcccuacagagugguggugcugagcuucgaacugcugcaugcuccugccacagugugcggcccuaagaaaagcaccaaucucgugaagaacaaaugcgugaacuucaacuucaacggccugaccggcaccggcgugcugacagagagcaacaagaaguuccugccauuccagcaguuuggccgggauaucgccgauaccacagacgccguuagagauccccagacacuggaaauccuggacaucaccccaugcagcuucggcggagugucugugaucaccccuggcaccaacaccagcaaucagguggcagugcuguaccagggcgugaacuguaccgaagugcccguggccauucacgccgaucagcugacaccuacauggcggguguacuccaccggcagcaauguguuucagaccagagccggcugucugaucggagccgagcacgugaacaauagcuacgagugcgacauccccaucggcgcuggcaucugugccagcuaccagacacagacaaacagccccagacgggcuagaagcguggccagccagagcgugauugccuacacaaugucucugggcgccgagaacagcguggccuacuccaacaacucuaucgcuauccccaccaacuucaccaucagcgugaccaccgagauccugccuguguccaugaccaagaccagcguggacugcaccauguacaucugcggcgauuccaccgagugcuccaaccugcugcugcaguacggcagcuucugcacccagcugaauagagcccugacagggaucgccguggaacaggacaagaacacccaagagguguucgcccaagugaagcaaaucuacaagaccccuccuaucaaggacuucggcggcuucaauuucagccagauucugcccgauccuagcaagcccagcaagcggagcuucaucgaggaccugcuguucaacaaagugacacuggccgacgccggcuucaucaagcaguauggcgauugucugggcgacauugccgccagggaucugauuugcgcccagaaguuuaacggacugacagugcugccuccucugcugaccgaugagaugaucgcccaguacacaucugcccugcuggccggcacaaucacaagcggcuggacauuuggagcuggcgccgcucugcagauccccuuugcuaugcagauggccuaccgguucaacggcaucggagugacccagaaugugcuguacgagaaccagaagcugaucgccaaccaguucaacagcgccaucggcaagauccaggacagccugagcagcacagcaagcgcccugggaaagcugcaggacguggucaaccagaaugcccaggcacugaacacccuggucaagcagcuguccuccaacuucggcgccaucagcucugugcugaacgauauccugagcagacuggacccuccugaggccgaggugcagaucgacagacugaucacaggcagacugcagagccuccagacauacgugacccagcagcugaucagagccgccgagauuagagccucugccaaucuggccgccaccaagaugucugagugugugcugggccagagcaagagaguggacuuuugcggcaagggcuaccaccugaugagcuucccucagucugccccucacggcgugguguuucugcacgugacauaugugcccgcucaagagaagaauuucaccaccgcuccagccaucugccacgacggcaaagcccacuuuccuagagaaggcguguucguguccaacggcacccauugguucgugacacagcggaacuucuacgagccccagaucaucaccaccgacaacaccuucgugucuggcaacugcgacguugugaucggcauugugaacaauaccguguacgacccucugcagcccgagcuggacagcuucaaagaggaacuggacaaguacuuuaagaaccacacaagccccgacguggaccugggcgauaucagcggaaucaaugccagcgucgugaacauccagaaagagaucgaccggcugaacgagguggccaagaaucugaacgagagccugaucgaccugcaagaacuggggaaguacgagcaguacaucaaguggcccugguacaucuggcugggcuuuaucgccggacugauugccaucgugauggucacaaucaugcuguguugcaugaccagcugcuguagcugccugaagggcuguuguagcuguggcagcugcugcaaguucgacgaggacgauucugagcccgugcugaagggcgugaaacugcacuacaccugaggacuaguuauaagacugacuagcccgaugggccucccaacgggcccuccuccccuccuugcaccgagauuaaucaaaggcucuuuucagagccaccaaaaaaaaaaaaaaaaaaaaaaaaaaaaaaaaaaaaaaaaaaaaaaaaaaaaaaaaaaaaaaaaaaaaaaaaaaaaaaaaaaaaaaaaaaaaaaaaaaaaa

SEQ ID NO: 24258 - RNA, 4035 nt, Artificial Sequence
  SARS-CoV-2/Wuhan/WIV05/2019__EPI_ISL_402128 spike protein mRNA gc mod (1-1273)(K986P_V987P_D614G_M1229I)
aggagaaagcuuaccauguucguguuucuggugcugcugccccugguguccagccagugugugaaccugaccaccagaacacagcugccuccagccuacaccaacagcuucaccagaggcguguacuaccccgacaagguguucagauccagcgugcugcacucuacccaggaccuguuccugccuuucuucagcaacgugaccugguuccacgccauccacguguccggcaccaauggcaccaagagauucgacaaccccgugcugcccuucaacgacgggguguacuuugccagcaccgagaaguccaacaucaucagaggcuggaucuucggcaccacacuggacagcaagacccagagccugcugaucgugaacaacgccaccaacguggucaucaaagugugcgaguuccaguucugcaacgaccccuuccugggcgucuacuaccacaagaacaacaagagcuggauggaaagcgaguuccggguguacagcagcgccaacaacugcaccuucgaguacgugucccagccuuuccugauggaccuggaaggcaagcagggcaacuucaagaaccugcgcgaguucguguucaagaacaucgacggcuacuucaaaaucuacagcaagcacaccccuaucaaccucgugcgggaucugccucagggcuucucugcucuggaaccccugguggaucugcccaucggcaucaacaucacccgguuucagacacugcuggcccugcacagaagcuaccugacaccuggcgauagcagcagcggauggacagcuggugccgccgcuuacuaugugggcuaccugcagccuagaaccuuccugcugaaguacaacgagaacggcaccaucaccgacgccguggauugugcucuggauccucugagcgagacaaagugcacccugaaguccuucaccguggaaaagggcaucuaccagaccagcaacuuccgggugcagcccaccgaauccaucgugcgguuccccaauaucaccaaucugugccccuucggcgagguguucaaugccaccagauucgccucuguguacgccuggaaccggaagcggaucagcaauugcguggccgacuacuccgugcuguacaacuccgccagcuucagcaccuucaagugcuacggcguguccccuaccaagcugaacgaccugugcuucacaaacguguacgccgacagcuucgugauccggggagaugaagugcggcagauugccccuggacagacaggcaagaucgccgacuacaacuacaagcugcccgacgacuucaccggcugugugauugccuggaacagcaacaaccuggacuccaaagucggcggcaacuacaauuaccuguaccggcuguuccggaaguccaaucugaagcccuucgagcgggacaucagcaccgaaaucuaucaggccggcagcaccccuugcaacggcguggaaggcuucaacugcuacuucccacugcaguccuacggcuuucagcccacaaauggcgugggcuaucagcccuacagagugguggugcugagcuucgaacugcugcaugcuccugccacagugugcggcccuaagaaaagcaccaaucucgugaagaacaaaugcgugaacuucaacuucaacggccugaccggcaccggcgugcugacagagagcaacaagaaguuccugccauuccagcaguuuggccgggauaucgccgauaccacagacgccguuagagauccccagacacuggaaauccuggacaucaccccaugcagcuucggcggagugucugugaucaccccuggcaccaacaccagcaaucagguggcagugcuguaccagggcgugaacuguaccgaagugcccguggccauucacgccgaucagcugacaccuacauggcggguguacuccaccggcagcaauguguuucagaccagagccggcugucugaucggagccgagcacgugaacaauagcuacgagugcgacauccccaucggcgcuggcaucugugccagcuaccagacacagacaaacagccccagacgggcuagaagcguggccagccagagcaucauugccuacacaaugucucugggcgccgagaacagcguggccuacuccaacaacucuaucgcuauccccaccaacuucaccaucagcgugaccaccgagauccugccuguguccaugaccaagaccagcguggacugcaccauguacaucugcggcgauuccaccgagugcuccaaccugcugcugcaguacggcagcuucugcacccagcugaauagagcccugacagggaucgccguggaacaggacaagaacacccaagagguguucgcccaagugaagcaaaucuacaagaccccuccuaucaaggacuucggcggcuucaauuucagccagauucugcccgauccuagcaagcccagcaagcggagcuucaucgaggaccugcuguucaacaaagugacacuggccgacgccggcuucaucaagcaguauggcgauugucugggcgacauugccgccagggaucugauuugcgcccagaaguuuaacggacugacagugcugccuccucugcugaccgaugagaugaucgcccaguacacaucugcccugcuggccggcacaaucacaagcggcuggacauuuggagcuggcgccgcucugcagauccccuuugcuaugcagauggccuaccgguucaacggcaucggagugacccagaaugugcuguacgagaaccagaagcugaucgccaaccaguucaacagcgccaucggcaagauccaggacagccugagcagcacagcaagcgcccugggaaagcugcaggacguggucaaccagaaugcccaggcacugaacacccuggucaagcagcuguccuccaacuucggcgccaucagcucugugcugaacgauauccugagcagacuggacccuccugaggccgaggugcagaucgacagacugaucacaggcagacugcagagccuccagacauacgugacccagcagcugaucagagccgccgagauuagagccucugccaaucuggccgccaccaagaugucugagugugugcugggccagagcaagagaguggacuuuugcggcaagggcuaccaccugaugagcuucccucagucugccccucacggcgugguguuucugcacgugacauaugugcccgcucaagagaagaauuucaccaccgcuccagccaucugccacgacggcaaagcccacuuuccuagagaaggcguguucguguccaacggcacccauugguucgugacacagcggaacuucuacgagccccagaucaucaccaccgacaacaccuucgugucuggcaacugcgacguugugaucggcauugugaacaauaccguguacgacccucugcagcccgagcuggacagcuucaaagaggaacuggacaaguacuuuaagaaccacacaagccccgacguggaccugggcgauaucagcggaaucaaugccagcgucgugaacauccagaaagagaucgaccggcugaacgagguggccaagaaucugaacgagagccugaucgaccugcaagaacuggggaaguacgagcaguacaucaaguggcccugguacaucuggcugggcuuuaucgccggacugauugccaucgugaucgucacaaucaugcuguguugcaugaccagcugcuguagcugccugaagggcuguuguagcuguggcagcugcugcaaguucgacgaggacgauucugagcccgugcugaagggcgugaaacugcacuacaccugaggacuaguuauaagacugacuagcccgaugggccucccaacgggcccuccuccccuccuugcaccgagauuaaucaaaggcucuuuucagagccaccaaaaaaaaaaaaaaaaaaaaaaaaaaaaaaaaaaaaaaaaaaaaaaaaaaaaaaaaaaaaaaaaaaaaaaaaaaaaaaaaaaaaaaaaaaaaaaaaaaaaa

SEQ ID NO: 24259 - RNA, 4029 nt, Artificial Sequence
  SARS-CoV-2/Wuhan/WIV05/2019__EPI_ISL_402128 spike protein mRNA gc mod (1-1273)(K986P_V987P_H69del_V70del_A222V_Y453F_S477N_D614G_I692V)
aggagaaagcuuaccauguucguguuucuggugcugcugccccugguguccagccagugugugaaccugaccaccagaacacagcugccuccagccuacaccaacagcuucaccagaggcguguacuaccccgacaagguguucagauccagcgugcugcacucuacccaggaccuguuccugccuuucuucagcaacgugaccugguuccacgccaucuccggcaccaauggcaccaagagauucgacaaccccgugcugcccuucaacgacgggguguacuuugccagcaccgagaaguccaacaucaucagaggcuggaucuucggcaccacacuggacagcaagacccagagccugcugaucgugaacaacgccaccaacguggucaucaaagugugcgaguuccaguucugcaacgaccccuuccugggcgucuacuaccacaagaacaacaagagcuggauggaaagcgaguuccggguguacagcagcgccaacaacugcaccuucgaguacgugucccagccuuuccugauggaccuggaaggcaagcagggcaacuucaagaaccugcgcgaguucguguucaagaacaucgacggcuacuucaaaaucuacagcaagcacaccccuaucaaccucgugcgggaucugccucagggcuucucugugcuggaaccccugguggaucugcccaucggcaucaacaucacccgguuucagacacugcuggcccugcacagaagcuaccugacaccuggcgauagcagcagcggauggacagcuggugccgccgcuuacuaugugggcuaccugcagccuagaaccuuccugcugaaguacaacgagaacggcaccaucaccgacgccguggauugugcucuggauccucugagcgagacaaagugcacccugaaguccuucaccguggaaaagggcaucuaccagaccagcaacuuccgggugcagcccaccgaauccaucgugcgguuccccaauaucaccaaucugugccccuucggcgagguguucaaugccaccagauucgccucuguguacgccuggaaccggaagcggaucagcaauugcguggccgacuacuccgugcuguacaacuccgccagcuucagcaccuucaagugcuacggcguguccccuaccaagcugaacgaccugugcuucacaaacguguacgccgacagcuucgugauccggggagaugaagugcggcagauugccccuggacagacaggcaagaucgccgacuacaacuacaagcugcccgacgacuucaccggcugugugauugccuggaacagcaacaaccuggacuccaaagucggcggcaacuacaauuaccuguuccggcuguuccggaaguccaaucugaagcccuucgagcgggacaucagcaccgaaaucuaucaggccggcaacaccccuugcaacggcguggaaggcuucaacugcuacuucccacugcaguccuacggcuuucagcccacaaauggcgugggcuaucagcccuacagagugguggugcugagcuucgaacugcugcaugcuccugccacagugugcggcccuaagaaaagcaccaaucucgugaagaacaaaugcgugaacuucaacuucaacggccugaccggcaccggcgugcugacagagagcaacaagaaguuccugccauuccagcaguuuggccgggauaucgccgauaccacagacgccguuagagauccccagacacuggaaauccuggacaucaccccaugcagcuucggcggagugucugugaucaccccuggcaccaacaccagcaaucagguggcagugcuguaccagggcgugaacuguaccgaagugcccguggccauucacgccgaucagcugacaccuacauggcggguguacuccaccggcagcaauguguuucagaccagagccggcugucugaucggagccgagcacgugaacaauagcuacgagugcgacauccccaucggcgcuggcaucugugccagcuaccagacacagacaaacagccccagacgggcuagaagcguggccagccagagcgugauugccuacacaaugucucugggcgccgagaacagcguggccuacuccaacaacucuaucgcuauccccaccaacuucaccaucagcgugaccaccgagauccugccuguguccaugaccaagaccagcguggacugcaccauguacaucugcggcgauuccaccgagugcuccaaccugcugcugcaguacggcagcuucugcacccagcugaauagagcccugacagggaucgccguggaacaggacaagaacacccaagagguguucgcccaagugaagcaaaucuacaagaccccuccuaucaaggacuucggcggcuucaauuucagccagauucugcccgauccuagcaagcccagcaagcggagcuucaucgaggaccugcuguucaacaaagugacacuggccgacgccggcuucaucaagcaguauggcgauugucugggcgacauugccgccagggaucugauuugcgcccagaaguuuaacggacugacagugcugccuccucugcugaccgaugagaugaucgcccaguacacaucugcccugcuggccggcacaaucacaagcggcuggacauuuggagcuggcgccgcucugcagauccccuuugcuaugcagauggccuaccgguucaacggcaucggagugacccagaaugugcuguacgagaaccagaagcugaucgccaaccaguucaacagcgccaucggcaagauccaggacagccugagcagcacagcaagcgcccugggaaagcugcaggacguggucaaccagaaugcccaggcacugaacacccuggucaagcagcuguccuccaacuucggcgccaucagcucugugcugaacgauauccugagcagacuggacccuccugaggccgaggugcagaucgacagacugaucacaggcagacugcagagccuccagacauacgugacccagcagcugaucagagccgccgagauuagagccucugccaaucuggccgccaccaagaugucugagugugugcugggccagagcaagagaguggacuuuugcggcaagggcuaccaccugaugagcuucccucagucugccccucacggcgugguguuucugcacgugacauaugugcccgcucaagagaagaauuucaccaccgcuccagccaucugccacgacggcaaagcccacuuuccuagagaaggcguguucguguccaacggcacccauugguucgugacacagcggaacuucuacgagccccagaucaucaccaccgacaacaccuucgugucuggcaacugcgacguugugaucggcauugugaacaauaccguguacgacccucugcagcccgagcuggacagcuucaaagaggaacuggacaaguacuuuaagaaccacacaagccccgacguggaccugggcgauaucagcggaaucaaugccagcgucgugaacauccagaaagagaucgaccggcugaacgagguggccaagaaucugaacgagagccugaucgaccugcaagaacuggggaaguacgagcaguacaucaaguggcccugguacaucuggcugggcuuuaucgccggacugauugccaucgugauggucacaaucaugcuguguugcaugaccagcugcuguagcugccugaagggcuguuguagcuguggcagcugcugcaaguucgacgaggacgauucugagcccgugcugaagggcgugaaacugcacuacaccugaggacuaguuauaagacugacuagcccgaugggccucccaacgggcccuccuccccuccuugcaccgagauuaaucaaaggcucuuuucagagccaccaaaaaaaaaaaaaaaaaaaaaaaaaaaaaaaaaaaaaaaaaaaaaaaaaaaaaaaaaaaaaaaaaaaaaaaaaaaaaaaaaaaaaaaaaaaaaaaaaaaaa

SEQ ID NO: 24260 - RNA, 4029 nt, Artificial Sequence
  SARS-CoV-2/Wuhan/WIV05/2019__EPI_ISL_402128 spike protein mRNA gc mod (1-1273)(K986P_V987P_H69del_V70del_Y453F_D614G_I692V_M1229I)
aggagaaagcuuaccauguucguguuucuggugcugcugccccugguguccagccagugugugaaccugaccaccagaacacagcugccuccagccuacaccaacagcuucaccagaggcguguacuaccccgacaagguguucagauccagcgugcugcacucuacccaggaccuguuccugccuuucuucagcaacgugaccugguuccacgccaucuccggcaccaauggcaccaagagauucgacaaccccgugcugcccuucaacgacgggguguacuuugccagcaccgagaaguccaacaucaucagaggcuggaucuucggcaccacacuggacagcaagacccagagccugcugaucgugaacaacgccaccaacguggucaucaaagugugcgaguuccaguucugcaacgaccccuuccugggcgucuacuaccacaagaacaacaagagcuggauggaaagcgaguuccggguguacagcagcgccaacaacugcaccuucgaguacgugucccagccuuuccugauggaccuggaaggcaagcagggcaacuucaagaaccugcgcgaguucguguucaagaacaucgacggcuacuucaaaaucuacagcaagcacaccccuaucaaccucgugcgggaucugccucagggcuucucugcucuggaaccccugguggaucugcccaucggcaucaacaucacccgguuucagacacugcuggcccugcacagaagcuaccugacaccuggcgauagcagcagcggauggacagcuggugccgccgcuuacuaugugggcuaccugcagccuagaaccuuccugcugaaguacaacgagaacggcaccaucaccgacgccguggauugugcucuggauccucugagcgagacaaagugcacccugaaguccuucaccguggaaaagggcaucuaccagaccagcaacuuccgggugcagcccaccgaauccaucgugcgguuccccaauaucaccaaucugugccccuucggcgagguguucaaugccaccagauucgccucuguguacgccuggaaccggaagcggaucagcaauugcguggccgacuacuccgugcuguacaacuccgccagcuucagcaccuucaagugcuacggcguguccccuaccaagcugaacgaccugugcuucacaaacguguacgccgacagcuucgugauccggggagaugaagugcggcagauugccccuggacagacaggcaagaucgccgacuacaacuacaagcugcccgacgacuucaccggcugugugauugccuggaacagcaacaaccuggacuccaaagucggcggcaacuacaauuaccuguuccggcuguuccggaaguccaaucugaagcccuucgagcgggacaucagcaccgaaaucuaucaggccggcagcaccccuugcaacggcguggaaggcuucaacugcuacuucccacugcaguccuacggcuuucagcccacaaauggcgugggcuaucagcccuacagagugguggugcugagcuucgaacugcugcaugcuccugccacagugugcggcccuaagaaaagcaccaaucucgugaagaacaaaugcgugaacuucaacuucaacggccugaccggcaccggcgugcugacagagagcaacaagaaguuccugccauuccagcaguuuggccgggauaucgccgauaccacagacgccguuagagauccccagacacuggaaauccuggacaucaccccaugcagcuucggcggagugucugugaucaccccuggcaccaacaccagcaaucagguggcagugcuguaccagggcgugaacuguaccgaagugcccguggccauucacgccgaucagcugacaccuacauggcggguguacuccaccggcagcaauguguuucagaccagagccggcugucugaucggagccgagcacgugaacaauagcuacgagugcgacauccccaucggcgcuggcaucugugccagcuaccagacacagacaaacagccccagacgggcuagaagcguggccagccagagcgugauugccuacacaaugucucugggcgccgagaacagcguggccuacuccaacaacucuaucgcuauccccaccaacuucaccaucagcgugaccaccgagauccugccuguguccaugaccaagaccagcguggacugcaccauguacaucugcggcgauuccaccgagugcuccaaccugcugcugcaguacggcagcuucugcacccagcugaauagagcccugacagggaucgccguggaacaggacaagaacacccaagagguguucgcccaagugaagcaaaucuacaagaccccuccuaucaaggacuucggcggcuucaauuucagccagauucugcccgauccuagcaagcccagcaagcggagcuucaucgaggaccugcuguucaacaaagugacacuggccgacgccggcuucaucaagcaguauggcgauugucugggcgacauugccgccagggaucugauuugcgcccagaaguuuaacggacugacagugcugccuccucugcugaccgaugagaugaucgcccaguacacaucugcccugcuggccggcacaaucacaagcggcuggacauuuggagcuggcgccgcucugcagauccccuuugcuaugcagauggccuaccgguucaacggcaucggagugacccagaaugugcuguacgagaaccagaagcugaucgccaaccaguucaacagcgccaucggcaagauccaggacagccugagcagcacagcaagcgcccugggaaagcugcaggacguggucaaccagaaugcccaggcacugaacacccuggucaagcagcuguccuccaacuucggcgccaucagcucugugcugaacgauauccugagcagacuggacccuccugaggccgaggugcagaucgacagacugaucacaggcagacugcagagccuccagacauacgugacccagcagcugaucagagccgccgagauuagagccucugccaaucuggccgccaccaagaugucugagugugugcugggccagagcaagagaguggacuuuugcggcaagggcuaccaccugaugagcuucccucagucugccccucacggcgugguguuucugcacgugacauaugugcccgcucaagagaagaauuucaccaccgcuccagccaucugccacgacggcaaagcccacuuuccuagagaaggcguguucguguccaacggcacccauugguucgugacacagcggaacuucuacgagccccagaucaucaccaccgacaacaccuucgugucuggcaacugcgacguugugaucggcauugugaacaauaccguguacgacccucugcagcccgagcuggacagcuucaaagaggaacuggacaaguacuuuaagaaccacacaagccccgacguggaccugggcgauaucagcggaaucaaugccagcgucgugaacauccagaaagagaucgaccggcugaacgagguggccaagaaucugaacgagagccugaucgaccugcaagaacuggggaaguacgagcaguacaucaaguggcccugguacaucuggcugggcuuuaucgccggacugauugccaucgugaucgucacaaucaugcuguguugcaugaccagcugcuguagcugccugaagggcuguuguagcuguggcagcugcugcaaguucgacgaggacgauucugagcccgugcugaagggcgugaaacugcacuacaccugaggacuaguuauaagacugacuagcccgaugggccucccaacgggcccuccuccccuccuugcaccgagauuaaucaaaggcucuuuucagagccaccaaaaaaaaaaaaaaaaaaaaaaaaaaaaaaaaaaaaaaaaaaaaaaaaaaaaaaaaaaaaaaaaaaaaaaaaaaaaaaaaaaaaaaaaaaaaaaaaaaaaa

SEQ ID NO: 24261 - RNA, 4026 nt, Artificial Sequence
  SARS-CoV-2/Wuhan/WIV05/2019__EPI_ISL_402128 spike protein mRNA gc mod (1-1273)(K986P_V987P_K986P_V987P_H69del_V70del_Y144del_N501Y_A570 D_D614G_P681H_T716I_S982A_D1118H)
aggagaaagcuuaccauguucguguuucuggugcugcugccccugguguccagccagugugugaaccugaccaccagaacacagcugccuccagccuacaccaacagcuucaccagaggcguguacuaccccgacaagguguucagauccagcgugcugcacucuacccaggaccuguuccugccuuucuucagcaacgugaccugguuccacgccaucuccggcaccaauggcaccaagagauucgacaaccccgugcugcccuucaacgacgggguguacuuugccagcaccgagaaguccaacaucaucagaggcuggaucuucggcaccacacuggacagcaagacccagagccugcugaucgugaacaacgccaccaacguggucaucaaagugugcgaguuccaguucugcaacgaccccuuccugggcgucuaccacaagaacaacaagagcuggauggaaagcgaguuccggguguacagcagcgccaacaacugcaccuucgaguacgugucccagccuuuccugauggaccuggaaggcaagcagggcaacuucaagaaccugcgcgaguucguguucaagaacaucgacggcuacuucaaaaucuacagcaagcacaccccuaucaaccucgugcgggaucugccucagggcuucucugcucuggaaccccugguggaucugcccaucggcaucaacaucacccgguuucagacacugcuggcccugcacagaagcuaccugacaccuggcgauagcagcagcggauggacagcuggugccgccgcuuacuaugugggcuaccugcagccuagaaccuuccugcugaaguacaacgagaacggcaccaucaccgacgccguggauugugcucuggauccucugagcgagacaaagugcacccugaaguccuucaccguggaaaagggcaucuaccagaccagcaacuuccgggugcagcccaccgaauccaucgugcgguuccccaauaucaccaaucugugccccuucggcgagguguucaaugccaccagauucgccucuguguacgccuggaaccggaagcggaucagcaauugcguggccgacuacuccgugcuguacaacuccgccagcuucagcaccuucaagugcuacggcguguccccuaccaagcugaacgaccugugcuucacaaacguguacgccgacagcuucgugauccggggagaugaagugcggcagauugccccuggacagacaggcaagaucgccgacuacaacuacaagcugcccgacgacuucaccggcugugugauugccuggaacagcaacaaccuggacuccaaagucggcggcaacuacaauuaccuguaccggcuguuccggaaguccaaucugaagcccuucgagcgggacaucagcaccgaaaucuaucaggccggcagcaccccuugcaacggcguggaaggcuucaacugcuacuucccacugcaguccuacggcuuucagcccacauacggcgugggcuaucagcccuacagagugguggugcugagcuucgaacugcugcaugcuccugccacagugugcggcccuaagaaaagcaccaaucucgugaagaacaaaugcgugaacuucaacuucaacggccugaccggcaccggcgugcugacagagagcaacaagaaguuccugccauuccagcaguuuggccgggauaucgacgauaccacagacgccguuagagauccccagacacuggaaauccuggacaucaccccaugcagcuucggcggagugucugugaucaccccuggcaccaacaccagcaaucagguggcagugcuguaccagggcgugaacuguaccgaagugcccguggccauucacgccgaucagcugacaccuacauggcggguguacuccaccggcagcaauguguuucagaccagagccggcugucugaucggagccgagcacgugaacaauagcuacgagugcgacauccccaucggcgcuggcaucugugccagcuaccagacacagacaaacagccacagacgggcuagaagcguggccagccagagcaucauugccuacacaaugucucugggcgccgagaacagcguggccuacuccaacaacucuaucgcuauccccaucaacuucaccaucagcgugaccaccgagauccugccuguguccaugaccaagaccagcguggacugcaccauguacaucugcggcgauuccaccgagugcuccaaccugcugcugcaguacggcagcuucugcacccagcugaauagagcccugacagggaucgccguggaacaggacaagaacacccaagagguguucgcccaagugaagcaaaucuacaagaccccuccuaucaaggacuucggcggcuucaauuucagccagauucugcccgauccuagcaagcccagcaagcggagcuucaucgaggaccugcuguucaacaaagugacacuggccgacgccggcuucaucaagcaguauggcgauugucugggcgacauugccgccagggaucugauuugcgcccagaaguuuaacggacugacagugcugccuccucugcugaccgaugagaugaucgcccaguacacaucugcccugcuggccggcacaaucacaagcggcuggacauuuggagcuggcgccgcucugcagauccccuuugcuaugcagauggccuaccgguucaacggcaucggagugacccagaaugugcuguacgagaaccagaagcugaucgccaaccaguucaacagcgccaucggcaagauccaggacagccugagcagcacagcaagcgcccugggaaagcugcaggacguggucaaccagaaugcccaggcacugaacacccuggucaagcagcuguccuccaacuucggcgccaucagcucugugcugaacgauauccuggccagacuggacccuccugaggccgaggugcagaucgacagacugaucacaggcagacugcagagccuccagacauacgugacccagcagcugaucagagccgccgagauuagagccucugccaaucuggccgccaccaagaugucugagugugugcugggccagagcaagagaguggacuuuugcggcaagggcuaccaccugaugagcuucccucagucugccccucacggcgugguguuucugcacgugacauaugugcccgcucaagagaagaauuucaccaccgcuccagccaucugccacgacggcaaagcccacuuuccuagagaaggcguguucguguccaacggcacccauugguucgugacacagcggaacuucuacgagccccagaucaucaccacccacaacaccuucgugucuggcaacugcgacguugugaucggcauugugaacaauaccguguacgacccucugcagcccgagcuggacagcuucaaagaggaacuggacaaguacuuuaagaaccacacaagccccgacguggaccugggcgauaucagcggaaucaaugccagcgucgugaacauccagaaagagaucgaccggcugaacgagguggccaagaaucugaacgagagccugaucgaccugcaagaacuggggaaguacgagcaguacaucaaguggcccugguacaucuggcugggcuuuaucgccggacugauugccaucgugauggucacaaucaugcuguguugcaugaccagcugcuguagcugccugaagggcuguuguagcuguggcagcugcugcaaguucgacgaggacgauucugagcccgugcugaagggcgugaaacugcacuacaccugaggacuaguuauaagacugacuagcccgaugggccucccaacgggcccuccuccccuccuugcaccgagauuaaucaaaggcucuuuucagagccaccaaaaaaaaaaaaaaaaaaaaaaaaaaaaaaaaaaaaaaaaaaaaaaaaaaaaaaaaaaaaaaaaaaaaaaaaaaaaaaaaaaaaaaaaaaaaaaaaaaaaa

SEQ ID NO: 24262 - RNA, 4035 nt, Artificial Sequence
  SARS-CoV-2/Wuhan/WIV05/2019__EPI_ISL_402128 spike protein mRNA gc mod (1-1273)(K986P_V987P_K986P_V987P_K417N_E484K_N501Y_D614G)
aggagaaagcuuaccauguucguguuucuggugcugcugccccugguguccagccagugugugaaccugaccaccagaacacagcugccuccagccuacaccaacagcuucaccagaggcguguacuaccccgacaagguguucagauccagcgugcugcacucuacccaggaccuguuccugccuuucuucagcaacgugaccugguuccacgccauccacguguccggcaccaauggcaccaagagauucgacaaccccgugcugcccuucaacgacgggguguacuuugccagcaccgagaaguccaacaucaucagaggcuggaucuucggcaccacacuggacagcaagacccagagccugcugaucgugaacaacgccaccaacguggucaucaaagugugcgaguuccaguucugcaacgaccccuuccugggcgucuacuaccacaagaacaacaagagcuggauggaaagcgaguuccggguguacagcagcgccaacaacugcaccuucgaguacgugucccagccuuuccugauggaccuggaaggcaagcagggcaacuucaagaaccugcgcgaguucguguucaagaacaucgacggcuacuucaaaaucuacagcaagcacaccccuaucaaccucgugcgggaucugccucagggcuucucugcucuggaaccccugguggaucugcccaucggcaucaacaucacccgguuucagacacugcuggcccugcacagaagcuaccugacaccuggcgauagcagcagcggauggacagcuggugccgccgcuuacuaugugggcuaccugcagccuagaaccuuccugcugaaguacaacgagaacggcaccaucaccgacgccguggauugugcucuggauccucugagcgagacaaagugcacccugaaguccuucaccguggaaaagggcaucuaccagaccagcaacuuccgggugcagcccaccgaauccaucgugcgguuccccaauaucaccaaucugugccccuucggcgagguguucaaugccaccagauucgccucuguguacgccuggaaccggaagcggaucagcaauugcguggccgacuacuccgugcuguacaacuccgccagcuucagcaccuucaagugcuacggcguguccccuaccaagcugaacgaccugugcuucacaaacguguacgccgacagcuucgugauccggggagaugaagugcggcagauugccccuggacagacaggcaacaucgccgacuacaacuacaagcugcccgacgacuucaccggcugugugauugccuggaacagcaacaaccuggacuccaaagucggcggcaacuacaauuaccuguaccggcuguuccggaaguccaaucugaagcccuucgagcgggacaucagcaccgaaaucuaucaggccggcagcaccccuugcaacggcgugaagggcuucaacugcuacuucccacugcaguccuacggcuuucagcccacauacggcgugggcuaucagcccuacagagugguggugcugagcuucgaacugcugcaugcuccugccacagugugcggcccuaagaaaagcaccaaucucgugaagaacaaaugcgugaacuucaacuucaacggccugaccggcaccggcgugcugacagagagcaacaagaaguuccugccauuccagcaguuuggccgggauaucgccgauaccacagacgccguuagagauccccagacacuggaaauccuggacaucaccccaugcagcuucggcggagugucugugaucaccccuggcaccaacaccagcaaucagguggcagugcuguaccagggcgugaacuguaccgaagugcccguggccauucacgccgaucagcugacaccuacauggcggguguacuccaccggcagcaauguguuucagaccagagccggcugucugaucggagccgagcacgugaacaauagcuacgagugcgacauccccaucggcgcuggcaucugugccagcuaccagacacagacaaacagccccagacgggcuagaagcguggccagccagagcaucauugccuacacaaugucucugggcgccgagaacagcguggccuacuccaacaacucuaucgcuauccccaccaacuucaccaucagcgugaccaccgagauccugccuguguccaugaccaagaccagcguggacugcaccauguacaucugcggcgauuccaccgagugcuccaaccugcugcugcaguacggcagcuucugcacccagcugaauagagcccugacagggaucgccguggaacaggacaagaacacccaagagguguucgcccaagugaagcaaaucuacaagaccccuccuaucaaggacuucggcggcuucaauuucagccagauucugcccgauccuagcaagcccagcaagcggagcuucaucgaggaccugcuguucaacaaagugacacuggccgacgccggcuucaucaagcaguauggcgauugucugggcgacauugccgccagggaucugauuugcgcccagaaguuuaacggacugacagugcugccuccucugcugaccgaugagaugaucgcccaguacacaucugcccugcuggccggcacaaucacaagcggcuggacauuuggagcuggcgccgcucugcagauccccuuugcuaugcagauggccuaccgguucaacggcaucggagugacccagaaugugcuguacgagaaccagaagcugaucgccaaccaguucaacagcgccaucggcaagauccaggacagccugagcagcacagcaagcgcccugggaaagcugcaggacguggucaaccagaaugcccaggcacugaacacccuggucaagcagcuguccuccaacuucggcgccaucagcucugugcugaacgauauccugagcagacuggacccuccugaggccgaggugcagaucgacagacugaucacaggcagacugcagagccuccagacauacgugacccagcagcugaucagagccgccgagauuagagccucugccaaucuggccgccaccaagaugucugagugugugcugggccagagcaagagaguggacuuuugcggcaagggcuaccaccugaugagcuucccucagucugccccucacggcgugguguuucugcacgugacauaugugcccgcucaagagaagaauuucaccaccgcuccagccaucugccacgacggcaaagcccacuuuccuagagaaggcguguucguguccaacggcacccauugguucgugacacagcggaacuucuacgagccccagaucaucaccaccgacaacaccuucgugucuggcaacugcgacguugugaucggcauugugaacaauaccguguacgacccucugcagcccgagcuggacagcuucaaagaggaacuggacaaguacuuuaagaaccacacaagccccgacguggaccugggcgauaucagcggaaucaaugccagcgucgugaacauccagaaagagaucgaccggcugaacgagguggccaagaaucugaacgagagccugaucgaccugcaagaacuggggaaguacgagcaguacaucaaguggcccugguacaucuggcugggcuuuaucgccggacugauugccaucgugauggucacaaucaugcuguguugcaugaccagcugcuguagcugccugaagggcuguuguagcuguggcagcugcugcaaguucgacgaggacgauucugagcccgugcugaagggcgugaaacugcacuacaccugaggacuaguuauaagacugacuagcccgaugggccucccaacgggcccuccuccccuccuugcaccgagauuaaucaaaggcucuuuucagagccaccaaaaaaaaaaaaaaaaaaaaaaaaaaaaaaaaaaaaaaaaaaaaaaaaaaaaaaaaaaaaaaaaaaaaaaaaaaaaaaaaaaaaaaaaaaaaaaaaaaaaa

SEQ ID NO: 24263 - RNA, 4026 nt, Artificial Sequence
  SARS-CoV-2/Wuhan/WIV05/2019__EPI_ISL_402128 spike protein mRNA gc mod (1-1273)(K986P_V987P_K986P_V987P_L18F_D80A_D215G_L242del_A243del_ L244del_R246I_K417N_E484K_N501Y_D614G_A701V)
aggagaaagcuuaccauguucguguuucuggugcugcugccccugguguccagccagugugugaacuucaccaccagaacacagcugccuccagccuacaccaacagcuucaccagaggcguguacuaccccgacaagguguucagauccagcgugcugcacucuacccaggaccuguuccugccuuucuucagcaacgugaccugguuccacgccauccacguguccggcaccaauggcaccaagagauucgccaaccccgugcugcccuucaacgacgggguguacuuugccagcaccgagaaguccaacaucaucagaggcuggaucuucggcaccacacuggacagcaagacccagagccugcugaucgugaacaacgccaccaacguggucaucaaagugugcgaguuccaguucugcaacgaccccuuccugggcgucuacuaccacaagaacaacaagagcuggauggaaagcgaguuccggguguacagcagcgccaacaacugcaccuucgaguacgugucccagccuuuccugauggaccuggaaggcaagcagggcaacuucaagaaccugcgcgaguucguguucaagaacaucgacggcuacuucaaaaucuacagcaagcacaccccuaucaaccucgugcggggccugccucagggcuucucugcucuggaaccccugguggaucugcccaucggcaucaacaucacccgguuucagacacugcacaucagcuaccugacaccuggcgauagcagcagcggauggacagcuggugccgccgcuuacuaugugggcuaccugcagccuagaaccuuccugcugaaguacaacgagaacggcaccaucaccgacgccguggauugugcucuggauccucugagcgagacaaagugcacccugaaguccuucaccguggaaaagggcaucuaccagaccagcaacuuccgggugcagcccaccgaauccaucgugcgguuccccaauaucaccaaucugugccccuucggcgagguguucaaugccaccagauucgccucuguguacgccuggaaccggaagcggaucagcaauugcguggccgacuacuccgugcuguacaacuccgccagcuucagcaccuucaagugcuacggcguguccccuaccaagcugaacgaccugugcuucacaaacguguacgccgacagcuucgugauccggggagaugaagugcggcagauugccccuggacagacaggcaacaucgccgacuacaacuacaagcugcccgacgacuucaccggcugugugauugccuggaacagcaacaaccuggacuccaaagucggcggcaacuacaauuaccuguaccggcuguuccggaaguccaaucugaagcccuucgagcgggacaucagcaccgaaaucuaucaggccggcagcaccccuugcaacggcgugaagggcuucaacugcuacuucccacugcaguccuacggcuuucagcccacauacggcgugggcuaucagcccuacagagugguggugcugagcuucgaacugcugcaugcuccugccacagugugcggcccuaagaaaagcaccaaucucgugaagaacaaaugcgugaacuucaacuucaacggccugaccggcaccggcgugcugacagagagcaacaagaaguuccugccauuccagcaguuuggccgggauaucgccgauaccacagacgccguuagagauccccagacacuggaaauccuggacaucaccccaugcagcuucggcggagugucugugaucaccccuggcaccaacaccagcaaucagguggcagugcuguaccagggcgugaacuguaccgaagugcccguggccauucacgccgaucagcugacaccuacauggcggguguacuccaccggcagcaauguguuucagaccagagccggcugucugaucggagccgagcacgugaacaauagcuacgagugcgacauccccaucggcgcuggcaucugugccagcuaccagacacagacaaacagccccagacgggcuagaagcguggccagccagagcaucauugccuacacaaugucucugggcguggagaacagcguggccuacuccaacaacucuaucgcuauccccaccaacuucaccaucagcgugaccaccgagauccugccuguguccaugaccaagaccagcguggacugcaccauguacaucugcggcgauuccaccgagugcuccaaccugcugcugcaguacggcagcuucugcacccagcugaauagagcccugacagggaucgccguggaacaggacaagaacacccaagagguguucgcccaagugaagcaaaucuacaagaccccuccuaucaaggacuucggcggcuucaauuucagccagauucugcccgauccuagcaagcccagcaagcggagcuucaucgaggaccugcuguucaacaaagugacacuggccgacgccggcuucaucaagcaguauggcgauugucugggcgacauugccgccagggaucugauuugcgcccagaaguuuaacggacugacagugcugccuccucugcugaccgaugagaugaucgcccaguacacaucugcccugcuggccggcacaaucacaagcggcuggacauuuggagcuggcgccgcucugcagauccccuuugcuaugcagauggccuaccgguucaacggcaucggagugacccagaaugugcuguacgagaaccagaagcugaucgccaaccaguucaacagcgccaucggcaagauccaggacagccugagcagcacagcaagcgcccugggaaagcugcaggacguggucaaccagaaugcccaggcacugaacacccuggucaagcagcuguccuccaacuucggcgccaucagcucugugcugaacgauauccugagcagacuggacccuccugaggccgaggugcagaucgacagacugaucacaggcagacugcagagccuccagacauacgugacccagcagcugaucagagccgccgagauuagagccucugccaaucuggccgccaccaagaugucugagugugugcugggccagagcaagagaguggacuuuugcggcaagggcuaccaccugaugagcuucccucagucugccccucacggcgugguguuucugcacgugacauaugugcccgcucaagagaagaauuucaccaccgcuccagccaucugccacgacggcaaagcccacuuuccuagagaaggcguguucguguccaacggcacccauugguucgugacacagcggaacuucuacgagccccagaucaucaccaccgacaacaccuucgugucuggcaacugcgacguugugaucggcauugugaacaauaccguguacgacccucugcagcccgagcuggacagcuucaaagaggaacuggacaaguacuuuaagaaccacacaagccccgacguggaccugggcgauaucagcggaaucaaugccagcgucgugaacauccagaaagagaucgaccggcugaacgagguggccaagaaucugaacgagagccugaucgaccugcaagaacuggggaaguacgagcaguacaucaaguggcccugguacaucuggcugggcuuuaucgccggacugauugccaucgugauggucacaaucaugcuguguugcaugaccagcugcuguagcugccugaagggcuguuguagcuguggcagcugcugcaaguucgacgaggacgauucugagcccgugcugaagggcgugaaacugcacuacaccugaggacuaguuauaagacugacuagcccgaugggccucccaacgggcccuccuccccuccuugcaccgagauuaaucaaaggcucuuuucagagccaccaaaaaaaaaaaaaaaaaaaaaaaaaaaaaaaaaaaaaaaaaaaaaaaaaaaaaaaaaaaaaaaaaaaaaaaaaaaaaaaaaaaaaaaaaaaaaaaaaaaaa

SEQ ID NO: 24264 - RNA, 4035 nt, Artificial Sequence
  SARS-CoV-2/Wuhan/WIV05/2019__EPI_ISL_402128 spike protein mRNA gc mod (1-1273)(K986P_V987P_K986P_V987P_E484K_D614G)
aggagaaagcuuaccauguucguguuucuggugcugcugccccugguguccagccagugugugaaccugaccaccagaacacagcugccuccagccuacaccaacagcuucaccagaggcguguacuaccccgacaagguguucagauccagcgugcugcacucuacccaggaccuguuccugccuuucuucagcaacgugaccugguuccacgccauccacguguccggcaccaauggcaccaagagauucgacaaccccgugcugcccuucaacgacgggguguacuuugccagcaccgagaaguccaacaucaucagaggcuggaucuucggcaccacacuggacagcaagacccagagccugcugaucgugaacaacgccaccaacguggucaucaaagugugcgaguuccaguucugcaacgaccccuuccugggcgucuacuaccacaagaacaacaagagcuggauggaaagcgaguuccggguguacagcagcgccaacaacugcaccuucgaguacgugucccagccuuuccugauggaccuggaaggcaagcagggcaacuucaagaaccugcgcgaguucguguucaagaacaucgacggcuacuucaaaaucuacagcaagcacaccccuaucaaccucgugcgggaucugccucagggcuucucugcucuggaaccccugguggaucugcccaucggcaucaacaucacccgguuucagacacugcuggcccugcacagaagcuaccugacaccuggcgauagcagcagcggauggacagcuggugccgccgcuuacuaugugggcuaccugcagccuagaaccuuccugcugaaguacaacgagaacggcaccaucaccgacgccguggauugugcucuggauccucugagcgagacaaagugcacccugaaguccuucaccguggaaaagggcaucuaccagaccagcaacuuccgggugcagcccaccgaauccaucgugcgguuccccaauaucaccaaucugugccccuucggcgagguguucaaugccaccagauucgccucuguguacgccuggaaccggaagcggaucagcaauugcguggccgacuacuccgugcuguacaacuccgccagcuucagcaccuucaagugcuacggcguguccccuaccaagcugaacgaccugugcuucacaaacguguacgccgacagcuucgugauccggggagaugaagugcggcagauugccccuggacagacaggcaagaucgccgacuacaacuacaagcugcccgacgacuucaccggcugugugauugccuggaacagcaacaaccuggacuccaaagucggcggcaacuacaauuaccuguaccggcuguuccggaaguccaaucugaagcccuucgagcgggacaucagcaccgaaaucuaucaggccggcagcaccccuugcaacggcgugaagggcuucaacugcuacuucccacugcaguccuacggcuuucagcccacaaauggcgugggcuaucagcccuacagagugguggugcugagcuucgaacugcugcaugcuccugccacagugugcggcccuaagaaaagcaccaaucucgugaagaacaaaugcgugaacuucaacuucaacggccugaccggcaccggcgugcugacagagagcaacaagaaguuccugccauuccagcaguuuggccgggauaucgccgauaccacagacgccguuagagauccccagacacuggaaauccuggacaucaccccaugcagcuucggcggagugucugugaucaccccuggcaccaacaccagcaaucagguggcagugcuguaccagggcgugaacuguaccgaagugcccguggccauucacgccgaucagcugacaccuacauggcggguguacuccaccggcagcaauguguuucagaccagagccggcugucugaucggagccgagcacgugaacaauagcuacgagugcgacauccccaucggcgcuggcaucugugccagcuaccagacacagacaaacagccccagacgggcuagaagcguggccagccagagcaucauugccuacacaaugucucugggcgccgagaacagcguggccuacuccaacaacucuaucgcuauccccaccaacuucaccaucagcgugaccaccgagauccugccuguguccaugaccaagaccagcguggacugcaccauguacaucugcggcgauuccaccgagugcuccaaccugcugcugcaguacggcagcuucugcacccagcugaauagagcccugacagggaucgccguggaacaggacaagaacacccaagagguguucgcccaagugaagcaaaucuacaagaccccuccuaucaaggacuucggcggcuucaauuucagccagauucugcccgauccuagcaagcccagcaagcggagcuucaucgaggaccugcuguucaacaaagugacacuggccgacgccggcuucaucaagcaguauggcgauugucugggcgacauugccgccagggaucugauuugcgcccagaaguuuaacggacugacagugcugccuccucugcugaccgaugagaugaucgcccaguacacaucugcccugcuggccggcacaaucacaagcggcuggacauuuggagcuggcgccgcucugcagauccccuuugcuaugcagauggccuaccgguucaacggcaucggagugacccagaaugugcuguacgagaaccagaagcugaucgccaaccaguucaacagcgccaucggcaagauccaggacagccugagcagcacagcaagcgcccugggaaagcugcaggacguggucaaccagaaugcccaggcacugaacacccuggucaagcagcuguccuccaacuucggcgccaucagcucugugcugaacgauauccugagcagacuggacccuccugaggccgaggugcagaucgacagacugaucacaggcagacugcagagccuccagacauacgugacccagcagcugaucagagccgccgagauuagagccucugccaaucuggccgccaccaagaugucugagugugugcugggccagagcaagagaguggacuuuugcggcaagggcuaccaccugaugagcuucccucagucugccccucacggcgugguguuucugcacgugacauaugugcccgcucaagagaagaauuucaccaccgcuccagccaucugccacgacggcaaagcccacuuuccuagagaaggcguguucguguccaacggcacccauugguucgugacacagcggaacuucuacgagccccagaucaucaccaccgacaacaccuucgugucuggcaacugcgacguugugaucggcauugugaacaauaccguguacgacccucugcagcccgagcuggacagcuucaaagaggaacuggacaaguacuuuaagaaccacacaagccccgacguggaccugggcgauaucagcggaaucaaugccagcgucgugaacauccagaaagagaucgaccggcugaacgagguggccaagaaucugaacgagagccugaucgaccugcaagaacuggggaaguacgagcaguacaucaaguggcccugguacaucuggcugggcuuuaucgccggacugauugccaucgugauggucacaaucaugcuguguugcaugaccagcugcuguagcugccugaagggcuguuguagcuguggcagcugcugcaaguucgacgaggacgauucugagcccgugcugaagggcgugaaacugcacuacaccugaggacuaguuauaagacugacuagcccgaugggccucccaacgggcccuccuccccuccuugcaccgagauuaaucaaaggcucuuuucagagccaccaaaaaaaaaaaaaaaaaaaaaaaaaaaaaaaaaaaaaaaaaaaaaaaaaaaaaaaaaaaaaaaaaaaaaaaaaaaaaaaaaaaaaaaaaaaaaaaaaaaaa

SEQ ID NO: 24265 - RNA, 4035 nt, Artificial Sequence
  SARS-CoV-2/Wuhan/WIV05/2019__EPI_ISL_402128 spike protein mRNA gc mod (1-1273)(K986P_V987P_K986P_V987P_L18F_T20N_P26S_D138Y_R190S_K417T _E484K_N501Y_D614G_H655Y_T1027I)
aggagaaagcuuaccauguucguguuucuggugcugcugccccugguguccagccagugugugaacuucaccaacagaacacagcugccuagcgccuacaccaacagcuucaccagaggcguguacuaccccgacaagguguucagauccagcgugcugcacucuacccaggaccuguuccugccuuucuucagcaacgugaccugguuccacgccauccacguguccggcaccaauggcaccaagagauucgacaaccccgugcugcccuucaacgacgggguguacuuugccagcaccgagaaguccaacaucaucagaggcuggaucuucggcaccacacuggacagcaagacccagagccugcugaucgugaacaacgccaccaacguggucaucaaagugugcgaguuccaguucugcaacuaccccuuccugggcgucuacuaccacaagaacaacaagagcuggauggaaagcgaguuccggguguacagcagcgccaacaacugcaccuucgaguacgugucccagccuuuccugauggaccuggaaggcaagcagggcaacuucaagaaccugagcgaguucguguucaagaacaucgacggcuacuucaaaaucuacagcaagcacaccccuaucaaccucgugcgggaucugccucagggcuucucugcucuggaaccccugguggaucugcccaucggcaucaacaucacccgguuucagacacugcuggcccugcacagaagcuaccugacaccuggcgauagcagcagcggauggacagcuggugccgccgcuuacuaugugggcuaccugcagccuagaaccuuccugcugaaguacaacgagaacggcaccaucaccgacgccguggauugugcucuggauccucugagcgagacaaagugcacccugaaguccuucaccguggaaaagggcaucuaccagaccagcaacuuccgggugcagcccaccgaauccaucgugcgguuccccaauaucaccaaucugugccccuucggcgagguguucaaugccaccagauucgccucuguguacgccuggaaccggaagcggaucagcaauugcguggccgacuacuccgugcuguacaacuccgccagcuucagcaccuucaagugcuacggcguguccccuaccaagcugaacgaccugugcuucacaaacguguacgccgacagcuucgugauccggggagaugaagugcggcagauugccccuggacagacaggcaccaucgccgacuacaacuacaagcugcccgacgacuucaccggcugugugauugccuggaacagcaacaaccuggacuccaaagucggcggcaacuacaauuaccuguaccggcuguuccggaaguccaaucugaagcccuucgagcgggacaucagcaccgaaaucuaucaggccggcagcaccccuugcaacggcgugaagggcuucaacugcuacuucccacugcaguccuacggcuuucagcccacauacggcgugggcuaucagcccuacagagugguggugcugagcuucgaacugcugcaugcuccugccacagugugcggcccuaagaaaagcaccaaucucgugaagaacaaaugcgugaacuucaacuucaacggccugaccggcaccggcgugcugacagagagcaacaagaaguuccugccauuccagcaguuuggccgggauaucgccgauaccacagacgccguuagagauccccagacacuggaaauccuggacaucaccccaugcagcuucggcggagugucugugaucaccccuggcaccaacaccagcaaucagguggcagugcuguaccagggcgugaacuguaccgaagugcccguggccauucacgccgaucagcugacaccuacauggcggguguacuccaccggcagcaauguguuucagaccagagccggcugucugaucggagccgaguacgugaacaauagcuacgagugcgacauccccaucggcgcuggcaucugugccagcuaccagacacagacaaacagccccagacgggcuagaagcguggccagccagagcaucauugccuacacaaugucucugggcgccgagaacagcguggccuacuccaacaacucuaucgcuauccccaccaacuucaccaucagcgugaccaccgagauccugccuguguccaugaccaagaccagcguggacugcaccauguacaucugcggcgauuccaccgagugcuccaaccugcugcugcaguacggcagcuucugcacccagcugaauagagcccugacagggaucgccguggaacaggacaagaacacccaagagguguucgcccaagugaagcaaaucuacaagaccccuccuaucaaggacuucggcggcuucaauuucagccagauucugcccgauccuagcaagcccagcaagcggagcuucaucgaggaccugcuguucaacaaagugacacuggccgacgccggcuucaucaagcaguauggcgauugucugggcgacauugccgccagggaucugauuugcgcccagaaguuuaacggacugacagugcugccuccucugcugaccgaugagaugaucgcccaguacacaucugcccugcuggccggcacaaucacaagcggcuggacauuuggagcuggcgccgcucugcagauccccuuugcuaugcagauggccuaccgguucaacggcaucggagugacccagaaugugcuguacgagaaccagaagcugaucgccaaccaguucaacagcgccaucggcaagauccaggacagccugagcagcacagcaagcgcccugggaaagcugcaggacguggucaaccagaaugcccaggcacugaacacccuggucaagcagcuguccuccaacuucggcgccaucagcucugugcugaacgauauccugagcagacuggacccuccugaggccgaggugcagaucgacagacugaucacaggcagacugcagagccuccagacauacgugacccagcagcugaucagagccgccgagauuagagccucugccaaucuggccgccaucaagaugucugagugugugcugggccagagcaagagaguggacuuuugcggcaagggcuaccaccugaugagcuucccucagucugccccucacggcgugguguuucugcacgugacauaugugcccgcucaagagaagaauuucaccaccgcuccagccaucugccacgacggcaaagcccacuuuccuagagaaggcguguucguguccaacggcacccauugguucgugacacagcggaacuucuacgagccccagaucaucaccaccgacaacaccuucgugucuggcaacugcgacguugugaucggcauugugaacaauaccguguacgacccucugcagcccgagcuggacagcuucaaagaggaacuggacaaguacuuuaagaaccacacaagccccgacguggaccugggcgauaucagcggaaucaaugccagcgucgugaacauccagaaagagaucgaccggcugaacgagguggccaagaaucugaacgagagccugaucgaccugcaagaacuggggaaguacgagcaguacaucaaguggcccugguacaucuggcugggcuuuaucgccggacugauugccaucgugauggucacaaucaugcuguguugcaugaccagcugcuguagcugccugaagggcuguuguagcuguggcagcugcugcaaguucgacgaggacgauucugagcccgugcugaagggcgugaaacugcacuacaccugaggacuaguuauaagacugacuagcccgaugggccucccaacgggcccuccuccccuccuugcaccgagauuaaucaaaggcucuuuucagagccaccaaaaaaaaaaaaaaaaaaaaaaaaaaaaaaaaaaaaaaaaaaaaaaaaaaaaaaaaaaaaaaaaaaaaaaaaaaaaaaaaaaaaaaaaaaaaaaaaaaaaa

SEQ ID NO: 24266 - RNA, 4035 nt, Artificial Sequence
  SARS-CoV-2/Wuhan/WIV05/2019__EPI_ISL_402128 spike protein mRNA gc mod (1-1273)(K986P_V987P_K986P_V987P_S13I_W152C_L452R_D614G)
aggagaaagcuuaccauguucguguuucuggugcugcugccccugguguccauccagugugugaaccugaccaccagaacacagcugccuccagccuacaccaacagcuucaccagaggcguguacuaccccgacaagguguucagauccagcgugcugcacucuacccaggaccuguuccugccuuucuucagcaacgugaccugguuccacgccauccacguguccggcaccaauggcaccaagagauucgacaaccccgugcugcccuucaacgacgggguguacuuugccagcaccgagaaguccaacaucaucagaggcuggaucuucggcaccacacuggacagcaagacccagagccugcugaucgugaacaacgccaccaacguggucaucaaagugugcgaguuccaguucugcaacgaccccuuccugggcgucuacuaccacaagaacaacaagagcugcauggaaagcgaguuccggguguacagcagcgccaacaacugcaccuucgaguacgugucccagccuuuccugauggaccuggaaggcaagcagggcaacuucaagaaccugcgcgaguucguguucaagaacaucgacggcuacuucaaaaucuacagcaagcacaccccuaucaaccucgugcgggaucugccucagggcuucucugcucuggaaccccugguggaucugcccaucggcaucaacaucacccgguuucagacacugcuggcccugcacagaagcuaccugacaccuggcgauagcagcagcggauggacagcuggugccgccgcuuacuaugugggcuaccugcagccuagaaccuuccugcugaaguacaacgagaacggcaccaucaccgacgccguggauugugcucuggauccucugagcgagacaaagugcacccugaaguccuucaccguggaaaagggcaucuaccagaccagcaacuuccgggugcagcccaccgaauccaucgugcgguuccccaauaucaccaaucugugccccuucggcgagguguucaaugccaccagauucgccucuguguacgccuggaaccggaagcggaucagcaauugcguggccgacuacuccgugcuguacaacuccgccagcuucagcaccuucaagugcuacggcguguccccuaccaagcugaacgaccugugcuucacaaacguguacgccgacagcuucgugauccggggagaugaagugcggcagauugccccuggacagacaggcaagaucgccgacuacaacuacaagcugcccgacgacuucaccggcugugugauugccuggaacagcaacaaccuggacuccaaagucggcggcaacuacaauuaccgcuaccggcuguuccggaaguccaaucugaagcccuucgagcgggacaucagcaccgaaaucuaucaggccggcagcaccccuugcaacggcguggaaggcuucaacugcuacuucccacugcaguccuacggcuuucagcccacaaauggcgugggcuaucagcccuacagagugguggugcugagcuucgaacugcugcaugcuccugccacagugugcggcccuaagaaaagcaccaaucucgugaagaacaaaugcgugaacuucaacuucaacggccugaccggcaccggcgugcugacagagagcaacaagaaguuccugccauuccagcaguuuggccgggauaucgccgauaccacagacgccguuagagauccccagacacuggaaauccuggacaucaccccaugcagcuucggcggagugucugugaucaccccuggcaccaacaccagcaaucagguggcagugcuguaccagggcgugaacuguaccgaagugcccguggccauucacgccgaucagcugacaccuacauggcggguguacuccaccggcagcaauguguuucagaccagagccggcugucugaucggagccgagcacgugaacaauagcuacgagugcgacauccccaucggcgcuggcaucugugccagcuaccagacacagacaaacagccccagacgggcuagaagcguggccagccagagcaucauugccuacacaaugucucugggcgccgagaacagcguggccuacuccaacaacucuaucgcuauccccaccaacuucaccaucagcgugaccaccgagauccugccuguguccaugaccaagaccagcguggacugcaccauguacaucugcggcgauuccaccgagugcuccaaccugcugcugcaguacggcagcuucugcacccagcugaauagagcccugacagggaucgccguggaacaggacaagaacacccaagagguguucgcccaagugaagcaaaucuacaagaccccuccuaucaaggacuucggcggcuucaauuucagccagauucugcccgauccuagcaagcccagcaagcggagcuucaucgaggaccugcuguucaacaaagugacacuggccgacgccggcuucaucaagcaguauggcgauugucugggcgacauugccgccagggaucugauuugcgcccagaaguuuaacggacugacagugcugccuccucugcugaccgaugagaugaucgcccaguacacaucugcccugcuggccggcacaaucacaagcggcuggacauuuggagcuggcgccgcucugcagauccccuuugcuaugcagauggccuaccgguucaacggcaucggagugacccagaaugugcuguacgagaaccagaagcugaucgccaaccaguucaacagcgccaucggcaagauccaggacagccugagcagcacagcaagcgcccugggaaagcugcaggacguggucaaccagaaugcccaggcacugaacacccuggucaagcagcuguccuccaacuucggcgccaucagcucugugcugaacgauauccugagcagacuggacccuccugaggccgaggugcagaucgacagacugaucacaggcagacugcagagccuccagacauacgugacccagcagcugaucagagccgccgagauuagagccucugccaaucuggccgccaccaagaugucugagugugugcugggccagagcaagagaguggacuuuugcggcaagggcuaccaccugaugagcuucccucagucugccccucacggcgugguguuucugcacgugacauaugugcccgcucaagagaagaauuucaccaccgcuccagccaucugccacgacggcaaagcccacuuuccuagagaaggcguguucguguccaacggcacccauugguucgugacacagcggaacuucuacgagccccagaucaucaccaccgacaacaccuucgugucuggcaacugcgacguugugaucggcauugugaacaauaccguguacgacccucugcagcccgagcuggacagcuucaaagaggaacuggacaaguacuuuaagaaccacacaagccccgacguggaccugggcgauaucagcggaaucaaugccagcgucgugaacauccagaaagagaucgaccggcugaacgagguggccaagaaucugaacgagagccugaucgaccugcaagaacuggggaaguacgagcaguacaucaaguggcccugguacaucuggcugggcuuuaucgccggacugauugccaucgugauggucacaaucaugcuguguugcaugaccagcugcuguagcugccugaagggcuguuguagcuguggcagcugcugcaaguucgacgaggacgauucugagcccgugcugaagggcgugaaacugcacuacaccugaggacuaguuauaagacugacuagcccgaugggccucccaacgggcccuccuccccuccuugcaccgagauuaaucaaaggcucuuuucagagccaccaaaaaaaaaaaaaaaaaaaaaaaaaaaaaaaaaaaaaaaaaaaaaaaaaaaaaaaaaaaaaaaaaaaaaaaaaaaaaaaaaaaaaaaaaaaaaaaaaaaaa

SEQ ID NO: 24267 - RNA, 4035 nt, Artificial Sequence
  SARS-CoV-2/Wuhan/WIV05/2019__EPI_ISL_402128 spike protein mRNA gc mod (1-1273)(K986P_V987P)
aggagaaagcuuaccauguucguguuccuggugcugcugccucugguguccagccagugugugaaccugaccaccagaacacagcugccuccagccuacaccaacagcuuuaccagaggcguguacuaccccgacaagguguucagauccagcgugcugcacucuacccaggaccuguuccugccuuucuucagcaacgugaccugguuccacgccauccacguguccggcaccaauggcaccaagagauucgacaaccccgugcugcccuucaacgacgggguguacuuugccagcaccgagaaguccaacaucaucagaggcuggaucuucggcaccacacuggacagcaagacccagagccugcugaucgugaacaacgccaccaacguggucaucaaagugugcgaguuccaguucugcaacgaccccuuccugggcgucuacuaccacaagaacaacaagagcuggauggaaagcgaguuccggguguacagcagcgccaacaacugcaccuucgaguacgugucccagccuuuccugauggaccuggaaggcaagcagggcaacuucaagaaccugcgcgaguucguguuuaagaacaucgacggcuacuucaagaucuacagcaagcacaccccuaucaaccucgugcgggaucugccucagggcuucucugcucuggaaccccugguggaucugcccaucggcaucaacaucacccgguuucagacacugcuggcccugcacagaagcuaccugacaccuggcgauagcagcagcggauggacagcuggugccgccgcuuacuaugugggcuaccugcagccuagaaccuuccugcugaaguacaacgagaacggcaccaucaccgacgccguggauugugcucuggauccucugagcgagacaaagugcacccugaaguccuucaccguggaaaagggcaucuaccagaccagcaacuuccgggugcagcccaccgaauccaucgugcgguuccccaauaucaccaaucugugccccuucggcgagguguucaaugccaccagauucgccucuguguacgccuggaaccggaagcggaucagcaauugcguggccgacuacuccgugcuguacaacuccgccagcuucagcaccuucaagugcuacggcguguccccuaccaagcugaacgaccugugcuucacaaacguguacgccgacagcuucgugauccggggagaugaagugcggcagauugccccuggacagacaggcaagaucgccgacuacaacuacaagcugcccgacgacuucaccggcugugugauugccuggaacagcaacaaccuggacuccaaagucggcggcaacuacaauuaccuguaccggcuguuccggaaguccaaucugaagcccuucgagcgggacaucuccaccgagaucuaucaggccggcagcaccccuuguaacggcguggaaggcuucaacugcuacuucccacugcaguccuacggcuuucagcccacaaauggcgugggcuaucagcccuacagagugguggugcugagcuucgaacugcugcaugccccugccacagugugcggcccuaagaaaagcaccaaucucgugaagaacaaaugcgugaacuucaacuucaacggccugaccggcaccggcgugcugacagagagcaacaagaaguuccugccauuccagcaguuuggccgggauaucgccgauaccacagacgccguuagagauccccagacacuggaaauccuggacaucaccccuugcagcuucggcggagugucugugaucaccccuggcaccaacaccagcaaucagguggcagugcuguaccaggacgugaacuguaccgaagugcccguggccauucacgccgaucagcugacaccuacauggcggguguacuccaccggcagcaauguguuucagaccagagccggcugucugaucggagccgagcacgugaacaauagcuacgagugcgacauccccaucggcgcuggaaucugcgccagcuaccagacacagacaaacagcccucggagagccagaagcguggccagccagagcaucauugccuacacaaugucucugggcgccgagaacagcguggccuacuccaacaacucuaucgcuauccccaccaacuucaccaucagcgugaccacagagauccugccuguguccaugaccaagaccagcguggacugcaccauguacaucugcggcgauuccaccgagugcuccaaccugcugcugcaguacggcagcuucugcacccagcugaauagagcccugacagggaucgccguggaacaggacaagaacacccaagagguguucgcccaagugaagcagaucuacaagaccccuccuaucaaggacuucggcggcuucaauuucagccagauucugcccgauccuagcaagcccagcaagcggagcuucaucgaggaccugcuguucaacaaagugacacuggccgacgccggcuucaucaagcaguauggcgauugucugggcgacauugccgccagggaucugauuugcgcccagaaguuuaacggacugacagugcugccuccucugcugaccgaugagaugaucgcccaguacacaucugcccugcuggccggcacaaucacaagcggcuggacauuuggagcaggcgccgcucugcagauccccuuugcuaugcagauggccuaccgguucaacggcaucggagugacccagaaugugcuguacgagaaccagaagcugaucgccaaccaguucaacagcgccaucggcaagauccaggacagccugagcagcacagcaagcgcccugggaaagcugcaggacguggucaaccagaaugcccaggcacugaacacccuggucaagcagcuguccuccaacuucggcgccaucagcucugugcugaacgauauccugagcagacuggacccuccugaggccgaggugcagaucgacagacugaucacaggcagacugcagagccuccagacauacgugacccagcagcugaucagagccgccgagauuagagccucugccaaucuggccgccaccaagaugucugagugugugcugggccagagcaagagaguggacuuuugcggcaagggcuaccaccugaugagcuucccucagucugccccucacggcgugguguuucugcacgugacauaugugcccgcucaagagaagaauuucaccaccgcuccagccaucugccacgacggcaaagcccacuuuccuagagaaggcguguucguguccaacggcacccauugguucgugacacagcggaacuucuacgagccccagaucaucaccaccgacaacaccuucgugucuggcaacugcgacgucgugaucggcauugugaacaauaccguguacgacccucugcagcccgagcuggacagcuucaaagaggaacuggacaaguacuuuaagaaccacacaagccccgacguggaccugggcgauaucagcggaaucaaugccagcgucgugaacauccagaaagagaucgaccggcugaacgagguggccaagaaucugaacgagagccugaucgaccugcaagaacuggggaaguacgagcaguacaucaaguggcccugguacaucuggcugggcuuuaucgccggacugauugccaucgugauggucacaaucaugcuguguugcaugaccagcugcuguagcugccugaagggcuguuguagcuguggcagcugcugcaaguucgacgaggacgauucugagcccgugcugaagggcgugaaacugcacuacacaugaggacuaguuauaagacugacuagcccgaugggccucccaacgggcccuccuccccuccuugcaccgagauuaaucaaaggcucuuuucagagccaccaaaaaaaaaaaaaaaaaaaaaaaaaaaaaaaaaaaaaaaaaaaaaaaaaaaaaaaaaaaaaaaaaaaaaaaaaaaaaaaaaaaaaaaaaaaaaaaaaaaaa

SEQ ID NO: 24268 - RNA, 4035 nt, Artificial Sequence
  SARS-CoV-2/Wuhan/WIV05/2019__EPI_ISL_402128 spike protein mRNA gc mod (1-1273)(K986P_V987P_ D614G)
aggagaaagcuuaccauguucguguuccuggugcugcugccucugguguccagccagugugugaaccugaccaccagaacacagcugccuccagccuacaccaacagcuuuaccagaggcguguacuaccccgacaagguguucagauccagcgugcugcacucuacccaggaccuguuccugccuuucuucagcaacgugaccugguuccacgccauccacguguccggcaccaauggcaccaagagauucgacaaccccgugcugcccuucaacgacgggguguacuuugccagcaccgagaaguccaacaucaucagaggcuggaucuucggcaccacacuggacagcaagacccagagccugcugaucgugaacaacgccaccaacguggucaucaaagugugcgaguuccaguucugcaacgaccccuuccugggcgucuacuaccacaagaacaacaagagcuggauggaaagcgaguuccggguguacagcagcgccaacaacugcaccuucgaguacgugucccagccuuuccugauggaccuggaaggcaagcagggcaacuucaagaaccugcgcgaguucguguuuaagaacaucgacggcuacuucaagaucuacagcaagcacaccccuaucaaccucgugcgggaucugccucagggcuucucugcucuggaaccccugguggaucugcccaucggcaucaacaucacccgguuucagacacugcuggcccugcacagaagcuaccugacaccuggcgauagcagcagcggauggacagcuggugccgccgcuuacuaugugggcuaccugcagccuagaaccuuccugcugaaguacaacgagaacggcaccaucaccgacgccguggauugugcucuggauccucugagcgagacaaagugcacccugaaguccuucaccguggaaaagggcaucuaccagaccagcaacuuccgggugcagcccaccgaauccaucgugcgguuccccaauaucaccaaucugugccccuucggcgagguguucaaugccaccagauucgccucuguguacgccuggaaccggaagcggaucagcaauugcguggccgacuacuccgugcuguacaacuccgccagcuucagcaccuucaagugcuacggcguguccccuaccaagcugaacgaccugugcuucacaaacguguacgccgacagcuucgugauccggggagaugaagugcggcagauugccccuggacagacaggcaagaucgccgacuacaacuacaagcugcccgacgacuucaccggcugugugauugccuggaacagcaacaaccuggacuccaaagucggcggcaacuacaauuaccuguaccggcuguuccggaaguccaaucugaagcccuucgagcgggacaucuccaccgagaucuaucaggccggcagcaccccuuguaacggcguggaaggcuucaacugcuacuucccacugcaguccuacggcuuucagcccacaaauggcgugggcuaucagcccuacagagugguggugcugagcuucgaacugcugcaugccccugccacagugugcggcccuaagaaaagcaccaaucucgugaagaacaaaugcgugaacuucaacuucaacggccugaccggcaccggcgugcugacagagagcaacaagaaguuccugccauuccagcaguuuggccgggauaucgccgauaccacagacgccguuagagauccccagacacuggaaauccuggacaucaccccuugcagcuucggcggagugucugugaucaccccuggcaccaacaccagcaaucagguggcagugcuguaccagggcgugaacuguaccgaagugcccguggccauucacgccgaucagcugacaccuacauggcggguguacuccaccggcagcaauguguuucagaccagagccggcugucugaucggagccgagcacgugaacaauagcuacgagugcgacauccccaucggcgcuggaaucugcgccagcuaccagacacagacaaacagcccucggagagccagaagcguggccagccagagcaucauugccuacacaaugucucugggcgccgagaacagcguggccuacuccaacaacucuaucgcuauccccaccaacuucaccaucagcgugaccacagagauccugccuguguccaugaccaagaccagcguggacugcaccauguacaucugcggcgauuccaccgagugcuccaaccugcugcugcaguacggcagcuucugcacccagcugaauagagcccugacagggaucgccguggaacaggacaagaacacccaagagguguucgcccaagugaagcagaucuacaagaccccuccuaucaaggacuucggcggcuucaauuucagccagauucugcccgauccuagcaagcccagcaagcggagcuucaucgaggaccugcuguucaacaaagugacacuggccgacgccggcuucaucaagcaguauggcgauugucugggcgacauugccgccagggaucugauuugcgcccagaaguuuaacggacugacagugcugccuccucugcugaccgaugagaugaucgcccaguacacaucugcccugcuggccggcacaaucacaagcggcuggacauuuggagcaggcgccgcucugcagauccccuuugcuaugcagauggccuaccgguucaacggcaucggagugacccagaaugugcuguacgagaaccagaagcugaucgccaaccaguucaacagcgccaucggcaagauccaggacagccugagcagcacagcaagcgcccugggaaagcugcaggacguggucaaccagaaugcccaggcacugaacacccuggucaagcagcuguccuccaacuucggcgccaucagcucugugcugaacgauauccugagcagacuggacccuccugaggccgaggugcagaucgacagacugaucacaggcagacugcagagccuccagacauacgugacccagcagcugaucagagccgccgagauuagagccucugccaaucuggccgccaccaagaugucugagugugugcugggccagagcaagagaguggacuuuugcggcaagggcuaccaccugaugagcuucccucagucugccccucacggcgugguguuucugcacgugacauaugugcccgcucaagagaagaauuucaccaccgcuccagccaucugccacgacggcaaagcccacuuuccuagagaaggcguguucguguccaacggcacccauugguucgugacacagcggaacuucuacgagccccagaucaucaccaccgacaacaccuucgugucuggcaacugcgacgucgugaucggcauugugaacaauaccguguacgacccucugcagcccgagcuggacagcuucaaagaggaacuggacaaguacuuuaagaaccacacaagccccgacguggaccugggcgauaucagcggaaucaaugccagcgucgugaacauccagaaagagaucgaccggcugaacgagguggccaagaaucugaacgagagccugaucgaccugcaagaacuggggaaguacgagcaguacaucaaguggcccugguacaucuggcugggcuuuaucgccggacugauugccaucgugauggucacaaucaugcuguguugcaugaccagcugcuguagcugccugaagggcuguuguagcuguggcagcugcugcaaguucgacgaggacgauucugagcccgugcugaagggcgugaaacugcacuacacaugaggacuaguuauaagacugacuagcccgaugggccucccaacgggcccuccuccccuccuugcaccgagauuaaucaaaggcucuuuucagagccaccaaaaaaaaaaaaaaaaaaaaaaaaaaaaaaaaaaaaaaaaaaaaaaaaaaaaaaaaaaaaaaaaaaaaaaaaaaaaaaaaaaaaaaaaaaaaaaaaaaaaa

SEQ ID NO: 24269 - RNA, 4035 nt, Artificial Sequence
  SARS-CoV-2/Wuhan/WIV05/2019__EPI_ISL_402128 spike protein mRNA gc mod (1-1273)(K986P_V987P_A222V_D614G)
aggagaaagcuuaccauguucguguuccuggugcugcugccucugguguccagccagugugugaaccugaccaccagaacacagcugccuccagccuacaccaacagcuuuaccagaggcguguacuaccccgacaagguguucagauccagcgugcugcacucuacccaggaccuguuccugccuuucuucagcaacgugaccugguuccacgccauccacguguccggcaccaauggcaccaagagauucgacaaccccgugcugcccuucaacgacgggguguacuuugccagcaccgagaaguccaacaucaucagaggcuggaucuucggcaccacacuggacagcaagacccagagccugcugaucgugaacaacgccaccaacguggucaucaaagugugcgaguuccaguucugcaacgaccccuuccugggcgucuacuaccacaagaacaacaagagcuggauggaaagcgaguuccggguguacagcagcgccaacaacugcaccuucgaguacgugucccagccuuuccugauggaccuggaaggcaagcagggcaacuucaagaaccugcgcgaguucguguuuaagaacaucgacggcuacuucaagaucuacagcaagcacaccccuaucaaccucgugcgggaucugccucagggcuucucugugcuggaaccccugguggaucugcccaucggcaucaacaucacccgguuucagacacugcuggcccugcacagaagcuaccugacaccuggcgauagcagcagcggauggacagcuggugccgccgcuuacuaugugggcuaccugcagccuagaaccuuccugcugaaguacaacgagaacggcaccaucaccgacgccguggauugugcucuggauccucugagcgagacaaagugcacccugaaguccuucaccguggaaaagggcaucuaccagaccagcaacuuccgggugcagcccaccgaauccaucgugcgguuccccaauaucaccaaucugugccccuucggcgagguguucaaugccaccagauucgccucuguguacgccuggaaccggaagcggaucagcaauugcguggccgacuacuccgugcuguacaacuccgccagcuucagcaccuucaagugcuacggcguguccccuaccaagcugaacgaccugugcuucacaaacguguacgccgacagcuucgugauccggggagaugaagugcggcagauugccccuggacagacaggcaagaucgccgacuacaacuacaagcugcccgacgacuucaccggcugugugauugccuggaacagcaacaaccuggacuccaaagucggcggcaacuacaauuaccuguaccggcuguuccggaaguccaaucugaagcccuucgagcgggacaucuccaccgagaucuaucaggccggcagcaccccuuguaacggcguggaaggcuucaacugcuacuucccacugcaguccuacggcuuucagcccacaaauggcgugggcuaucagcccuacagagugguggugcugagcuucgaacugcugcaugccccugccacagugugcggcccuaagaaaagcaccaaucucgugaagaacaaaugcgugaacuucaacuucaacggccugaccggcaccggcgugcugacagagagcaacaagaaguuccugccauuccagcaguuuggccgggauaucgccgauaccacagacgccguuagagauccccagacacuggaaauccuggacaucaccccuugcagcuucggcggagugucugugaucaccccuggcaccaacaccagcaaucagguggcagugcuguaccagggcgugaacuguaccgaagugcccguggccauucacgccgaucagcugacaccuacauggcggguguacuccaccggcagcaauguguuucagaccagagccggcugucugaucggagccgagcacgugaacaauagcuacgagugcgacauccccaucggcgcuggaaucugcgccagcuaccagacacagacaaacagcccucggagagccagaagcguggccagccagagcaucauugccuacacaaugucucugggcgccgagaacagcguggccuacuccaacaacucuaucgcuauccccaccaacuucaccaucagcgugaccacagagauccugccuguguccaugaccaagaccagcguggacugcaccauguacaucugcggcgauuccaccgagugcuccaaccugcugcugcaguacggcagcuucugcacccagcugaauagagcccugacagggaucgccguggaacaggacaagaacacccaagagguguucgcccaagugaagcagaucuacaagaccccuccuaucaaggacuucggcggcuucaauuucagccagauucugcccgauccuagcaagcccagcaagcggagcuucaucgaggaccugcuguucaacaaagugacacuggccgacgccggcuucaucaagcaguauggcgauugucugggcgacauugccgccagggaucugauuugcgcccagaaguuuaacggacugacagugcugccuccucugcugaccgaugagaugaucgcccaguacacaucugcccugcuggccggcacaaucacaagcggcuggacauuuggagcaggcgccgcucugcagauccccuuugcuaugcagauggccuaccgguucaacggcaucggagugacccagaaugugcuguacgagaaccagaagcugaucgccaaccaguucaacagcgccaucggcaagauccaggacagccugagcagcacagcaagcgcccugggaaagcugcaggacguggucaaccagaaugcccaggcacugaacacccuggucaagcagcuguccuccaacuucggcgccaucagcucugugcugaacgauauccugagcagacuggacccuccugaggccgaggugcagaucgacagacugaucacaggcagacugcagagccuccagacauacgugacccagcagcugaucagagccgccgagauuagagccucugccaaucuggccgccaccaagaugucugagugugugcugggccagagcaagagaguggacuuuugcggcaagggcuaccaccugaugagcuucccucagucugccccucacggcgugguguuucugcacgugacauaugugcccgcucaagagaagaauuucaccaccgcuccagccaucugccacgacggcaaagcccacuuuccuagagaaggcguguucguguccaacggcacccauugguucgugacacagcggaacuucuacgagccccagaucaucaccaccgacaacaccuucgugucuggcaacugcgacgucgugaucggcauugugaacaauaccguguacgacccucugcagcccgagcuggacagcuucaaagaggaacuggacaaguacuuuaagaaccacacaagccccgacguggaccugggcgauaucagcggaaucaaugccagcgucgugaacauccagaaagagaucgaccggcugaacgagguggccaagaaucugaacgagagccugaucgaccugcaagaacuggggaaguacgagcaguacaucaaguggcccugguacaucuggcugggcuuuaucgccggacugauugccaucgugauggucacaaucaugcuguguugcaugaccagcugcuguagcugccugaagggcuguuguagcuguggcagcugcugcaaguucgacgaggacgauucugagcccgugcugaagggcgugaaacugcacuacacaugaggacuaguuauaagacugacuagcccgaugggccucccaacgggcccuccuccccuccuugcaccgagauuaaucaaaggcucuuuucagagccaccaaaaaaaaaaaaaaaaaaaaaaaaaaaaaaaaaaaaaaaaaaaaaaaaaaaaaaaaaaaaaaaaaaaaaaaaaaaaaaaaaaaaaaaaaaaaaaaaaaaaa

SEQ ID NO: 24270 - RNA, 4035 nt, Artificial Sequence
  SARS-CoV-2/Wuhan/WIV05/2019__EPI_ISL_402128 spike protein mRNA gc mod (1-1273)(K986P_V987P_N439K_D614G)
aggagaaagcuuaccauguucguguuccuggugcugcugccucugguguccagccagugugugaaccugaccaccagaacacagcugccuccagccuacaccaacagcuuuaccagaggcguguacuaccccgacaagguguucagauccagcgugcugcacucuacccaggaccuguuccugccuuucuucagcaacgugaccugguuccacgccauccacguguccggcaccaauggcaccaagagauucgacaaccccgugcugcccuucaacgacgggguguacuuugccagcaccgagaaguccaacaucaucagaggcuggaucuucggcaccacacuggacagcaagacccagagccugcugaucgugaacaacgccaccaacguggucaucaaagugugcgaguuccaguucugcaacgaccccuuccugggcgucuacuaccacaagaacaacaagagcuggauggaaagcgaguuccggguguacagcagcgccaacaacugcaccuucgaguacgugucccagccuuuccugauggaccuggaaggcaagcagggcaacuucaagaaccugcgcgaguucguguuuaagaacaucgacggcuacuucaagaucuacagcaagcacaccccuaucaaccucgugcgggaucugccucagggcuucucugcucuggaaccccugguggaucugcccaucggcaucaacaucacccgguuucagacacugcuggcccugcacagaagcuaccugacaccuggcgauagcagcagcggauggacagcuggugccgccgcuuacuaugugggcuaccugcagccuagaaccuuccugcugaaguacaacgagaacggcaccaucaccgacgccguggauugugcucuggauccucugagcgagacaaagugcacccugaaguccuucaccguggaaaagggcaucuaccagaccagcaacuuccgggugcagcccaccgaauccaucgugcgguuccccaauaucaccaaucugugccccuucggcgagguguucaaugccaccagauucgccucuguguacgccuggaaccggaagcggaucagcaauugcguggccgacuacuccgugcuguacaacuccgccagcuucagcaccuucaagugcuacggcguguccccuaccaagcugaacgaccugugcuucacaaacguguacgccgacagcuucgugauccggggagaugaagugcggcagauugccccuggacagacaggcaagaucgccgacuacaacuacaagcugcccgacgacuucaccggcugugugauugccuggaacagcaagaaccuggacuccaaagucggcggcaacuacaauuaccuguaccggcuguuccggaaguccaaucugaagcccuucgagcgggacaucuccaccgagaucuaucaggccggcagcaccccuuguaacggcguggaaggcuucaacugcuacuucccacugcaguccuacggcuuucagcccacaaauggcgugggcuaucagcccuacagagugguggugcugagcuucgaacugcugcaugccccugccacagugugcggcccuaagaaaagcaccaaucucgugaagaacaaaugcgugaacuucaacuucaacggccugaccggcaccggcgugcugacagagagcaacaagaaguuccugccauuccagcaguuuggccgggauaucgccgauaccacagacgccguuagagauccccagacacuggaaauccuggacaucaccccuugcagcuucggcggagugucugugaucaccccuggcaccaacaccagcaaucagguggcagugcuguaccagggcgugaacuguaccgaagugcccguggccauucacgccgaucagcugacaccuacauggcggguguacuccaccggcagcaauguguuucagaccagagccggcugucugaucggagccgagcacgugaacaauagcuacgagugcgacauccccaucggcgcuggaaucugcgccagcuaccagacacagacaaacagcccucggagagccagaagcguggccagccagagcaucauugccuacacaaugucucugggcgccgagaacagcguggccuacuccaacaacucuaucgcuauccccaccaacuucaccaucagcgugaccacagagauccugccuguguccaugaccaagaccagcguggacugcaccauguacaucugcggcgauuccaccgagugcuccaaccugcugcugcaguacggcagcuucugcacccagcugaauagagcccugacagggaucgccguggaacaggacaagaacacccaagagguguucgcccaagugaagcagaucuacaagaccccuccuaucaaggacuucggcggcuucaauuucagccagauucugcccgauccuagcaagcccagcaagcggagcuucaucgaggaccugcuguucaacaaagugacacuggccgacgccggcuucaucaagcaguauggcgauugucugggcgacauugccgccagggaucugauuugcgcccagaaguuuaacggacugacagugcugccuccucugcugaccgaugagaugaucgcccaguacacaucugcccugcuggccggcacaaucacaagcggcuggacauuuggagcaggcgccgcucugcagauccccuuugcuaugcagauggccuaccgguucaacggcaucggagugacccagaaugugcuguacgagaaccagaagcugaucgccaaccaguucaacagcgccaucggcaagauccaggacagccugagcagcacagcaagcgcccugggaaagcugcaggacguggucaaccagaaugcccaggcacugaacacccuggucaagcagcuguccuccaacuucggcgccaucagcucugugcugaacgauauccugagcagacuggacccuccugaggccgaggugcagaucgacagacugaucacaggcagacugcagagccuccagacauacgugacccagcagcugaucagagccgccgagauuagagccucugccaaucuggccgccaccaagaugucugagugugugcugggccagagcaagagaguggacuuuugcggcaagggcuaccaccugaugagcuucccucagucugccccucacggcgugguguuucugcacgugacauaugugcccgcucaagagaagaauuucaccaccgcuccagccaucugccacgacggcaaagcccacuuuccuagagaaggcguguucguguccaacggcacccauugguucgugacacagcggaacuucuacgagccccagaucaucaccaccgacaacaccuucgugucuggcaacugcgacgucgugaucggcauugugaacaauaccguguacgacccucugcagcccgagcuggacagcuucaaagaggaacuggacaaguacuuuaagaaccacacaagccccgacguggaccugggcgauaucagcggaaucaaugccagcgucgugaacauccagaaagagaucgaccggcugaacgagguggccaagaaucugaacgagagccugaucgaccugcaagaacuggggaaguacgagcaguacaucaaguggcccugguacaucuggcugggcuuuaucgccggacugauugccaucgugauggucacaaucaugcuguguugcaugaccagcugcuguagcugccugaagggcuguuguagcuguggcagcugcugcaaguucgacgaggacgauucugagcccgugcugaagggcgugaaacugcacuacacaugaggacuaguuauaagacugacuagcccgaugggccucccaacgggcccuccuccccuccuugcaccgagauuaaucaaaggcucuuuucagagccaccaaaaaaaaaaaaaaaaaaaaaaaaaaaaaaaaaaaaaaaaaaaaaaaaaaaaaaaaaaaaaaaaaaaaaaaaaaaaaaaaaaaaaaaaaaaaaaaaaaaaa

SEQ ID NO: 24271 - RNA, 4035 nt, Artificial Sequence
  SARS-CoV-2/Wuhan/WIV05/2019__EPI_ISL_402128 spike protein mRNA gc mod (1-1273)(K986P_V987P_S477N_D614G)
aggagaaagcuuaccauguucguguuccuggugcugcugccucugguguccagccagugugugaaccugaccaccagaacacagcugccuccagccuacaccaacagcuuuaccagaggcguguacuaccccgacaagguguucagauccagcgugcugcacucuacccaggaccuguuccugccuuucuucagcaacgugaccugguuccacgccauccacguguccggcaccaauggcaccaagagauucgacaaccccgugcugcccuucaacgacgggguguacuuugccagcaccgagaaguccaacaucaucagaggcuggaucuucggcaccacacuggacagcaagacccagagccugcugaucgugaacaacgccaccaacguggucaucaaagugugcgaguuccaguucugcaacgaccccuuccugggcgucuacuaccacaagaacaacaagagcuggauggaaagcgaguuccggguguacagcagcgccaacaacugcaccuucgaguacgugucccagccuuuccugauggaccuggaaggcaagcagggcaacuucaagaaccugcgcgaguucguguuuaagaacaucgacggcuacuucaagaucuacagcaagcacaccccuaucaaccucgugcgggaucugccucagggcuucucugcucuggaaccccugguggaucugcccaucggcaucaacaucacccgguuucagacacugcuggcccugcacagaagcuaccugacaccuggcgauagcagcagcggauggacagcuggugccgccgcuuacuaugugggcuaccugcagccuagaaccuuccugcugaaguacaacgagaacggcaccaucaccgacgccguggauugugcucuggauccucugagcgagacaaagugcacccugaaguccuucaccguggaaaagggcaucuaccagaccagcaacuuccgggugcagcccaccgaauccaucgugcgguuccccaauaucaccaaucugugccccuucggcgagguguucaaugccaccagauucgccucuguguacgccuggaaccggaagcggaucagcaauugcguggccgacuacuccgugcuguacaacuccgccagcuucagcaccuucaagugcuacggcguguccccuaccaagcugaacgaccugugcuucacaaacguguacgccgacagcuucgugauccggggagaugaagugcggcagauugccccuggacagacaggcaagaucgccgacuacaacuacaagcugcccgacgacuucaccggcugugugauugccuggaacagcaacaaccuggacuccaaagucggcggcaacuacaauuaccuguaccggcuguuccggaaguccaaucugaagcccuucgagcgggacaucuccaccgagaucuaucaggccggcaacaccccuuguaacggcguggaaggcuucaacugcuacuucccacugcaguccuacggcuuucagcccacaaauggcgugggcuaucagcccuacagagugguggugcugagcuucgaacugcugcaugccccugccacagugugcggcccuaagaaaagcaccaaucucgugaagaacaaaugcgugaacuucaacuucaacggccugaccggcaccggcgugcugacagagagcaacaagaaguuccugccauuccagcaguuuggccgggauaucgccgauaccacagacgccguuagagauccccagacacuggaaauccuggacaucaccccuugcagcuucggcggagugucugugaucaccccuggcaccaacaccagcaaucagguggcagugcuguaccagggcgugaacuguaccgaagugcccguggccauucacgccgaucagcugacaccuacauggcggguguacuccaccggcagcaauguguuucagaccagagccggcugucugaucggagccgagcacgugaacaauagcuacgagugcgacauccccaucggcgcuggaaucugcgccagcuaccagacacagacaaacagcccucggagagccagaagcguggccagccagagcaucauugccuacacaaugucucugggcgccgagaacagcguggccuacuccaacaacucuaucgcuauccccaccaacuucaccaucagcgugaccacagagauccugccuguguccaugaccaagaccagcguggacugcaccauguacaucugcggcgauuccaccgagugcuccaaccugcugcugcaguacggcagcuucugcacccagcugaauagagcccugacagggaucgccguggaacaggacaagaacacccaagagguguucgcccaagugaagcagaucuacaagaccccuccuaucaaggacuucggcggcuucaauuucagccagauucugcccgauccuagcaagcccagcaagcggagcuucaucgaggaccugcuguucaacaaagugacacuggccgacgccggcuucaucaagcaguauggcgauugucugggcgacauugccgccagggaucugauuugcgcccagaaguuuaacggacugacagugcugccuccucugcugaccgaugagaugaucgcccaguacacaucugcccugcuggccggcacaaucacaagcggcuggacauuuggagcaggcgccgcucugcagauccccuuugcuaugcagauggccuaccgguucaacggcaucggagugacccagaaugugcuguacgagaaccagaagcugaucgccaaccaguucaacagcgccaucggcaagauccaggacagccugagcagcacagcaagcgcccugggaaagcugcaggacguggucaaccagaaugcccaggcacugaacacccuggucaagcagcuguccuccaacuucggcgccaucagcucugugcugaacgauauccugagcagacuggacccuccugaggccgaggugcagaucgacagacugaucacaggcagacugcagagccuccagacauacgugacccagcagcugaucagagccgccgagauuagagccucugccaaucuggccgccaccaagaugucugagugugugcugggccagagcaagagaguggacuuuugcggcaagggcuaccaccugaugagcuucccucagucugccccucacggcgugguguuucugcacgugacauaugugcccgcucaagagaagaauuucaccaccgcuccagccaucugccacgacggcaaagcccacuuuccuagagaaggcguguucguguccaacggcacccauugguucgugacacagcggaacuucuacgagccccagaucaucaccaccgacaacaccuucgugucuggcaacugcgacgucgugaucggcauugugaacaauaccguguacgacccucugcagcccgagcuggacagcuucaaagaggaacuggacaaguacuuuaagaaccacacaagccccgacguggaccugggcgauaucagcggaaucaaugccagcgucgugaacauccagaaagagaucgaccggcugaacgagguggccaagaaucugaacgagagccugaucgaccugcaagaacuggggaaguacgagcaguacaucaaguggcccugguacaucuggcugggcuuuaucgccggacugauugccaucgugauggucacaaucaugcuguguugcaugaccagcugcuguagcugccugaagggcuguuguagcuguggcagcugcugcaaguucgacgaggacgauucugagcccgugcugaagggcgugaaacugcacuacacaugaggacuaguuauaagacugacuagcccgaugggccucccaacgggcccuccuccccuccuugcaccgagauuaaucaaaggcucuuuucagagccaccaaaaaaaaaaaaaaaaaaaaaaaaaaaaaaaaaaaaaaaaaaaaaaaaaaaaaaaaaaaaaaaaaaaaaaaaaaaaaaaaaaaaaaaaaaaaaaaaaaaaa

SEQ ID NO: 24272 - RNA, 4035 nt, Artificial Sequence
  SARS-CoV-2/Wuhan/WIV05/2019__EPI_ISL_402128 spike protein mRNA gc mod (1-1273)(K986P_V987P_N501Y_D614G)
aggagaaagcuuaccauguucguguuccuggugcugcugccucugguguccagccagugugugaaccugaccaccagaacacagcugccuccagccuacaccaacagcuuuaccagaggcguguacuaccccgacaagguguucagauccagcgugcugcacucuacccaggaccuguuccugccuuucuucagcaacgugaccugguuccacgccauccacguguccggcaccaauggcaccaagagauucgacaaccccgugcugcccuucaacgacgggguguacuuugccagcaccgagaaguccaacaucaucagaggcuggaucuucggcaccacacuggacagcaagacccagagccugcugaucgugaacaacgccaccaacguggucaucaaagugugcgaguuccaguucugcaacgaccccuuccugggcgucuacuaccacaagaacaacaagagcuggauggaaagcgaguuccggguguacagcagcgccaacaacugcaccuucgaguacgugucccagccuuuccugauggaccuggaaggcaagcagggcaacuucaagaaccugcgcgaguucguguuuaagaacaucgacggcuacuucaagaucuacagcaagcacaccccuaucaaccucgugcgggaucugccucagggcuucucugcucuggaaccccugguggaucugcccaucggcaucaacaucacccgguuucagacacugcuggcccugcacagaagcuaccugacaccuggcgauagcagcagcggauggacagcuggugccgccgcuuacuaugugggcuaccugcagccuagaaccuuccugcugaaguacaacgagaacggcaccaucaccgacgccguggauugugcucuggauccucugagcgagacaaagugcacccugaaguccuucaccguggaaaagggcaucuaccagaccagcaacuuccgggugcagcccaccgaauccaucgugcgguuccccaauaucaccaaucugugccccuucggcgagguguucaaugccaccagauucgccucuguguacgccuggaaccggaagcggaucagcaauugcguggccgacuacuccgugcuguacaacuccgccagcuucagcaccuucaagugcuacggcguguccccuaccaagcugaacgaccugugcuucacaaacguguacgccgacagcuucgugauccggggagaugaagugcggcagauugccccuggacagacaggcaagaucgccgacuacaacuacaagcugcccgacgacuucaccggcugugugauugccuggaacagcaacaaccuggacuccaaagucggcggcaacuacaauuaccuguaccggcuguuccggaaguccaaucugaagcccuucgagcgggacaucuccaccgagaucuaucaggccggcagcaccccuuguaacggcguggaaggcuucaacugcuacuucccacugcaguccuacggcuuucagcccacauacggcgugggcuaucagcccuacagagugguggugcugagcuucgaacugcugcaugccccugccacagugugcggcccuaagaaaagcaccaaucucgugaagaacaaaugcgugaacuucaacuucaacggccugaccggcaccggcgugcugacagagagcaacaagaaguuccugccauuccagcaguuuggccgggauaucgccgauaccacagacgccguuagagauccccagacacuggaaauccuggacaucaccccuugcagcuucggcggagugucugugaucaccccuggcaccaacaccagcaaucagguggcagugcuguaccagggcgugaacuguaccgaagugcccguggccauucacgccgaucagcugacaccuacauggcggguguacuccaccggcagcaauguguuucagaccagagccggcugucugaucggagccgagcacgugaacaauagcuacgagugcgacauccccaucggcgcuggaaucugcgccagcuaccagacacagacaaacagcccucggagagccagaagcguggccagccagagcaucauugccuacacaaugucucugggcgccgagaacagcguggccuacuccaacaacucuaucgcuauccccaccaacuucaccaucagcgugaccacagagauccugccuguguccaugaccaagaccagcguggacugcaccauguacaucugcggcgauuccaccgagugcuccaaccugcugcugcaguacggcagcuucugcacccagcugaauagagcccugacagggaucgccguggaacaggacaagaacacccaagagguguucgcccaagugaagcagaucuacaagaccccuccuaucaaggacuucggcggcuucaauuucagccagauucugcccgauccuagcaagcccagcaagcggagcuucaucgaggaccugcuguucaacaaagugacacuggccgacgccggcuucaucaagcaguauggcgauugucugggcgacauugccgccagggaucugauuugcgcccagaaguuuaacggacugacagugcugccuccucugcugaccgaugagaugaucgcccaguacacaucugcccugcuggccggcacaaucacaagcggcuggacauuuggagcaggcgccgcucugcagauccccuuugcuaugcagauggccuaccgguucaacggcaucggagugacccagaaugugcuguacgagaaccagaagcugaucgccaaccaguucaacagcgccaucggcaagauccaggacagccugagcagcacagcaagcgcccugggaaagcugcaggacguggucaaccagaaugcccaggcacugaacacccuggucaagcagcuguccuccaacuucggcgccaucagcucugugcugaacgauauccugagcagacuggacccuccugaggccgaggugcagaucgacagacugaucacaggcagacugcagagccuccagacauacgugacccagcagcugaucagagccgccgagauuagagccucugccaaucuggccgccaccaagaugucugagugugugcugggccagagcaagagaguggacuuuugcggcaagggcuaccaccugaugagcuucccucagucugccccucacggcgugguguuucugcacgugacauaugugcccgcucaagagaagaauuucaccaccgcuccagccaucugccacgacggcaaagcccacuuuccuagagaaggcguguucguguccaacggcacccauugguucgugacacagcggaacuucuacgagccccagaucaucaccaccgacaacaccuucgugucuggcaacugcgacgucgugaucggcauugugaacaauaccguguacgacccucugcagcccgagcuggacagcuucaaagaggaacuggacaaguacuuuaagaaccacacaagccccgacguggaccugggcgauaucagcggaaucaaugccagcgucgugaacauccagaaagagaucgaccggcugaacgagguggccaagaaucugaacgagagccugaucgaccugcaagaacuggggaaguacgagcaguacaucaaguggcccugguacaucuggcugggcuuuaucgccggacugauugccaucgugauggucacaaucaugcuguguugcaugaccagcugcuguagcugccugaagggcuguuguagcuguggcagcugcugcaaguucgacgaggacgauucugagcccgugcugaagggcgugaaacugcacuacacaugaggacuaguuauaagacugacuagcccgaugggccucccaacgggcccuccuccccuccuugcaccgagauuaaucaaaggcucuuuucagagccaccaaaaaaaaaaaaaaaaaaaaaaaaaaaaaaaaaaaaaaaaaaaaaaaaaaaaaaaaaaaaaaaaaaaaaaaaaaaaaaaaaaaaaaaaaaaaaaaaaaaaa

SEQ ID NO: 24273 - RNA, 4029 nt, Artificial Sequence
  SARS-CoV-2/Wuhan/WIV05/2019__EPI_ISL_402128 spike protein mRNA gc mod (1-1273)(K986P_V987P_H69del_V70del_D614G)
aggagaaagcuuaccauguucguguuccuggugcugcugccucugguguccagccagugugugaaccugaccaccagaacacagcugccuccagccuacaccaacagcuuuaccagaggcguguacuaccccgacaagguguucagauccagcgugcugcacucuacccaggaccuguuccugccuuucuucagcaacgugaccugguuccacgccaucuccggcaccaauggcaccaagagauucgacaaccccgugcugcccuucaacgacgggguguacuuugccagcaccgagaaguccaacaucaucagaggcuggaucuucggcaccacacuggacagcaagacccagagccugcugaucgugaacaacgccaccaacguggucaucaaagugugcgaguuccaguucugcaacgaccccuuccugggcgucuacuaccacaagaacaacaagagcuggauggaaagcgaguuccggguguacagcagcgccaacaacugcaccuucgaguacgugucccagccuuuccugauggaccuggaaggcaagcagggcaacuucaagaaccugcgcgaguucguguuuaagaacaucgacggcuacuucaagaucuacagcaagcacaccccuaucaaccucgugcgggaucugccucagggcuucucugcucuggaaccccugguggaucugcccaucggcaucaacaucacccgguuucagacacugcuggcccugcacagaagcuaccugacaccuggcgauagcagcagcggauggacagcuggugccgccgcuuacuaugugggcuaccugcagccuagaaccuuccugcugaaguacaacgagaacggcaccaucaccgacgccguggauugugcucuggauccucugagcgagacaaagugcacccugaaguccuucaccguggaaaagggcaucuaccagaccagcaacuuccgggugcagcccaccgaauccaucgugcgguuccccaauaucaccaaucugugccccuucggcgagguguucaaugccaccagauucgccucuguguacgccuggaaccggaagcggaucagcaauugcguggccgacuacuccgugcuguacaacuccgccagcuucagcaccuucaagugcuacggcguguccccuaccaagcugaacgaccugugcuucacaaacguguacgccgacagcuucgugauccggggagaugaagugcggcagauugccccuggacagacaggcaagaucgccgacuacaacuacaagcugcccgacgacuucaccggcugugugauugccuggaacagcaacaaccuggacuccaaagucggcggcaacuacaauuaccuguaccggcuguuccggaaguccaaucugaagcccuucgagcgggacaucuccaccgagaucuaucaggccggcagcaccccuuguaacggcguggaaggcuucaacugcuacuucccacugcaguccuacggcuuucagcccacaaauggcgugggcuaucagcccuacagagugguggugcugagcuucgaacugcugcaugccccugccacagugugcggcccuaagaaaagcaccaaucucgugaagaacaaaugcgugaacuucaacuucaacggccugaccggcaccggcgugcugacagagagcaacaagaaguuccugccauuccagcaguuuggccgggauaucgccgauaccacagacgccguuagagauccccagacacuggaaauccuggacaucaccccuugcagcuucggcggagugucugugaucaccccuggcaccaacaccagcaaucagguggcagugcuguaccagggcgugaacuguaccgaagugcccguggccauucacgccgaucagcugacaccuacauggcggguguacuccaccggcagcaauguguuucagaccagagccggcugucugaucggagccgagcacgugaacaauagcuacgagugcgacauccccaucggcgcuggaaucugcgccagcuaccagacacagacaaacagcccucggagagccagaagcguggccagccagagcaucauugccuacacaaugucucugggcgccgagaacagcguggccuacuccaacaacucuaucgcuauccccaccaacuucaccaucagcgugaccacagagauccugccuguguccaugaccaagaccagcguggacugcaccauguacaucugcggcgauuccaccgagugcuccaaccugcugcugcaguacggcagcuucugcacccagcugaauagagcccugacagggaucgccguggaacaggacaagaacacccaagagguguucgcccaagugaagcagaucuacaagaccccuccuaucaaggacuucggcggcuucaauuucagccagauucugcccgauccuagcaagcccagcaagcggagcuucaucgaggaccugcuguucaacaaagugacacuggccgacgccggcuucaucaagcaguauggcgauugucugggcgacauugccgccagggaucugauuugcgcccagaaguuuaacggacugacagugcugccuccucugcugaccgaugagaugaucgcccaguacacaucugcccugcuggccggcacaaucacaagcggcuggacauuuggagcaggcgccgcucugcagauccccuuugcuaugcagauggccuaccgguucaacggcaucggagugacccagaaugugcuguacgagaaccagaagcugaucgccaaccaguucaacagcgccaucggcaagauccaggacagccugagcagcacagcaagcgcccugggaaagcugcaggacguggucaaccagaaugcccaggcacugaacacccuggucaagcagcuguccuccaacuucggcgccaucagcucugugcugaacgauauccugagcagacuggacccuccugaggccgaggugcagaucgacagacugaucacaggcagacugcagagccuccagacauacgugacccagcagcugaucagagccgccgagauuagagccucugccaaucuggccgccaccaagaugucugagugugugcugggccagagcaagagaguggacuuuugcggcaagggcuaccaccugaugagcuucccucagucugccccucacggcgugguguuucugcacgugacauaugugcccgcucaagagaagaauuucaccaccgcuccagccaucugccacgacggcaaagcccacuuuccuagagaaggcguguucguguccaacggcacccauugguucgugacacagcggaacuucuacgagccccagaucaucaccaccgacaacaccuucgugucuggcaacugcgacgucgugaucggcauugugaacaauaccguguacgacccucugcagcccgagcuggacagcuucaaagaggaacuggacaaguacuuuaagaaccacacaagccccgacguggaccugggcgauaucagcggaaucaaugccagcgucgugaacauccagaaagagaucgaccggcugaacgagguggccaagaaucugaacgagagccugaucgaccugcaagaacuggggaaguacgagcaguacaucaaguggcccugguacaucuggcugggcuuuaucgccggacugauugccaucgugauggucacaaucaugcuguguugcaugaccagcugcuguagcugccugaagggcuguuguagcuguggcagcugcugcaaguucgacgaggacgauucugagcccgugcugaagggcgugaaacugcacuacacaugaggacuaguuauaagacugacuagcccgaugggccucccaacgggcccuccuccccuccuugcaccgagauuaaucaaaggcucuuuucagagccaccaaaaaaaaaaaaaaaaaaaaaaaaaaaaaaaaaaaaaaaaaaaaaaaaaaaaaaaaaaaaaaaaaaaaaaaaaaaaaaaaaaaaaaaaaaaaaaaaaaaaa

SEQ ID NO: 24274 - RNA, 4035 nt, Artificial Sequence
  SARS-CoV-2/Wuhan/WIV05/2019__EPI_ISL_402128 spike protein mRNA gc mod (1-1273)(K986P_V987P_Y453F_D614G)
aggagaaagcuuaccauguucguguuccuggugcugcugccucugguguccagccagugugugaaccugaccaccagaacacagcugccuccagccuacaccaacagcuuuaccagaggcguguacuaccccgacaagguguucagauccagcgugcugcacucuacccaggaccuguuccugccuuucuucagcaacgugaccugguuccacgccauccacguguccggcaccaauggcaccaagagauucgacaaccccgugcugcccuucaacgacgggguguacuuugccagcaccgagaaguccaacaucaucagaggcuggaucuucggcaccacacuggacagcaagacccagagccugcugaucgugaacaacgccaccaacguggucaucaaagugugcgaguuccaguucugcaacgaccccuuccugggcgucuacuaccacaagaacaacaagagcuggauggaaagcgaguuccggguguacagcagcgccaacaacugcaccuucgaguacgugucccagccuuuccugauggaccuggaaggcaagcagggcaacuucaagaaccugcgcgaguucguguuuaagaacaucgacggcuacuucaagaucuacagcaagcacaccccuaucaaccucgugcgggaucugccucagggcuucucugcucuggaaccccugguggaucugcccaucggcaucaacaucacccgguuucagacacugcuggcccugcacagaagcuaccugacaccuggcgauagcagcagcggauggacagcuggugccgccgcuuacuaugugggcuaccugcagccuagaaccuuccugcugaaguacaacgagaacggcaccaucaccgacgccguggauugugcucuggauccucugagcgagacaaagugcacccugaaguccuucaccguggaaaagggcaucuaccagaccagcaacuuccgggugcagcccaccgaauccaucgugcgguuccccaauaucaccaaucugugccccuucggcgagguguucaaugccaccagauucgccucuguguacgccuggaaccggaagcggaucagcaauugcguggccgacuacuccgugcuguacaacuccgccagcuucagcaccuucaagugcuacggcguguccccuaccaagcugaacgaccugugcuucacaaacguguacgccgacagcuucgugauccggggagaugaagugcggcagauugccccuggacagacaggcaagaucgccgacuacaacuacaagcugcccgacgacuucaccggcugugugauugccuggaacagcaacaaccuggacuccaaagucggcggcaacuacaauuaccuguuccggcuguuccggaaguccaaucugaagcccuucgagcgggacaucuccaccgagaucuaucaggccggcagcaccccuuguaacggcguggaaggcuucaacugcuacuucccacugcaguccuacggcuuucagcccacaaauggcgugggcuaucagcccuacagagugguggugcugagcuucgaacugcugcaugccccugccacagugugcggcccuaagaaaagcaccaaucucgugaagaacaaaugcgugaacuucaacuucaacggccugaccggcaccggcgugcugacagagagcaacaagaaguuccugccauuccagcaguuuggccgggauaucgccgauaccacagacgccguuagagauccccagacacuggaaauccuggacaucaccccuugcagcuucggcggagugucugugaucaccccuggcaccaacaccagcaaucagguggcagugcuguaccagggcgugaacuguaccgaagugcccguggccauucacgccgaucagcugacaccuacauggcggguguacuccaccggcagcaauguguuucagaccagagccggcugucugaucggagccgagcacgugaacaauagcuacgagugcgacauccccaucggcgcuggaaucugcgccagcuaccagacacagacaaacagcccucggagagccagaagcguggccagccagagcaucauugccuacacaaugucucugggcgccgagaacagcguggccuacuccaacaacucuaucgcuauccccaccaacuucaccaucagcgugaccacagagauccugccuguguccaugaccaagaccagcguggacugcaccauguacaucugcggcgauuccaccgagugcuccaaccugcugcugcaguacggcagcuucugcacccagcugaauagagcccugacagggaucgccguggaacaggacaagaacacccaagagguguucgcccaagugaagcagaucuacaagaccccuccuaucaaggacuucggcggcuucaauuucagccagauucugcccgauccuagcaagcccagcaagcggagcuucaucgaggaccugcuguucaacaaagugacacuggccgacgccggcuucaucaagcaguauggcgauugucugggcgacauugccgccagggaucugauuugcgcccagaaguuuaacggacugacagugcugccuccucugcugaccgaugagaugaucgcccaguacacaucugcccugcuggccggcacaaucacaagcggcuggacauuuggagcaggcgccgcucugcagauccccuuugcuaugcagauggccuaccgguucaacggcaucggagugacccagaaugugcuguacgagaaccagaagcugaucgccaaccaguucaacagcgccaucggcaagauccaggacagccugagcagcacagcaagcgcccugggaaagcugcaggacguggucaaccagaaugcccaggcacugaacacccuggucaagcagcuguccuccaacuucggcgccaucagcucugugcugaacgauauccugagcagacuggacccuccugaggccgaggugcagaucgacagacugaucacaggcagacugcagagccuccagacauacgugacccagcagcugaucagagccgccgagauuagagccucugccaaucuggccgccaccaagaugucugagugugugcugggccagagcaagagaguggacuuuugcggcaagggcuaccaccugaugagcuucccucagucugccccucacggcgugguguuucugcacgugacauaugugcccgcucaagagaagaauuucaccaccgcuccagccaucugccacgacggcaaagcccacuuuccuagagaaggcguguucguguccaacggcacccauugguucgugacacagcggaacuucuacgagccccagaucaucaccaccgacaacaccuucgugucuggcaacugcgacgucgugaucggcauugugaacaauaccguguacgacccucugcagcccgagcuggacagcuucaaagaggaacuggacaaguacuuuaagaaccacacaagccccgacguggaccugggcgauaucagcggaaucaaugccagcgucgugaacauccagaaagagaucgaccggcugaacgagguggccaagaaucugaacgagagccugaucgaccugcaagaacuggggaaguacgagcaguacaucaaguggcccugguacaucuggcugggcuuuaucgccggacugauugccaucgugauggucacaaucaugcuguguugcaugaccagcugcuguagcugccugaagggcuguuguagcuguggcagcugcugcaaguucgacgaggacgauucugagcccgugcugaagggcgugaaacugcacuacacaugaggacuaguuauaagacugacuagcccgaugggccucccaacgggcccuccuccccuccuugcaccgagauuaaucaaaggcucuuuucagagccaccaaaaaaaaaaaaaaaaaaaaaaaaaaaaaaaaaaaaaaaaaaaaaaaaaaaaaaaaaaaaaaaaaaaaaaaaaaaaaaaaaaaaaaaaaaaaaaaaaaaaa

SEQ ID NO: 24275 - RNA, 4035 nt, Artificial Sequence
  SARS-CoV-2/Wuhan/WIV05/2019__EPI_ISL_402128 spike protein mRNA gc mod (1-1273)(K986P_V987P_D614G_I692V)
aggagaaagcuuaccauguucguguuccuggugcugcugccucugguguccagccagugugugaaccugaccaccagaacacagcugccuccagccuacaccaacagcuuuaccagaggcguguacuaccccgacaagguguucagauccagcgugcugcacucuacccaggaccuguuccugccuuucuucagcaacgugaccugguuccacgccauccacguguccggcaccaauggcaccaagagauucgacaaccccgugcugcccuucaacgacgggguguacuuugccagcaccgagaaguccaacaucaucagaggcuggaucuucggcaccacacuggacagcaagacccagagccugcugaucgugaacaacgccaccaacguggucaucaaagugugcgaguuccaguucugcaacgaccccuuccugggcgucuacuaccacaagaacaacaagagcuggauggaaagcgaguuccggguguacagcagcgccaacaacugcaccuucgaguacgugucccagccuuuccugauggaccuggaaggcaagcagggcaacuucaagaaccugcgcgaguucguguuuaagaacaucgacggcuacuucaagaucuacagcaagcacaccccuaucaaccucgugcgggaucugccucagggcuucucugcucuggaaccccugguggaucugcccaucggcaucaacaucacccgguuucagacacugcuggcccugcacagaagcuaccugacaccuggcgauagcagcagcggauggacagcuggugccgccgcuuacuaugugggcuaccugcagccuagaaccuuccugcugaaguacaacgagaacggcaccaucaccgacgccguggauugugcucuggauccucugagcgagacaaagugcacccugaaguccuucaccguggaaaagggcaucuaccagaccagcaacuuccgggugcagcccaccgaauccaucgugcgguuccccaauaucaccaaucugugccccuucggcgagguguucaaugccaccagauucgccucuguguacgccuggaaccggaagcggaucagcaauugcguggccgacuacuccgugcuguacaacuccgccagcuucagcaccuucaagugcuacggcguguccccuaccaagcugaacgaccugugcuucacaaacguguacgccgacagcuucgugauccggggagaugaagugcggcagauugccccuggacagacaggcaagaucgccgacuacaacuacaagcugcccgacgacuucaccggcugugugauugccuggaacagcaacaaccuggacuccaaagucggcggcaacuacaauuaccuguaccggcuguuccggaaguccaaucugaagcccuucgagcgggacaucuccaccgagaucuaucaggccggcagcaccccuuguaacggcguggaaggcuucaacugcuacuucccacugcaguccuacggcuuucagcccacaaauggcgugggcuaucagcccuacagagugguggugcugagcuucgaacugcugcaugccccugccacagugugcggcccuaagaaaagcaccaaucucgugaagaacaaaugcgugaacuucaacuucaacggccugaccggcaccggcgugcugacagagagcaacaagaaguuccugccauuccagcaguuuggccgggauaucgccgauaccacagacgccguuagagauccccagacacuggaaauccuggacaucaccccuugcagcuucggcggagugucugugaucaccccuggcaccaacaccagcaaucagguggcagugcuguaccagggcgugaacuguaccgaagugcccguggccauucacgccgaucagcugacaccuacauggcggguguacuccaccggcagcaauguguuucagaccagagccggcugucugaucggagccgagcacgugaacaauagcuacgagugcgacauccccaucggcgcuggaaucugcgccagcuaccagacacagacaaacagcccucggagagccagaagcguggccagccagagcgugauugccuacacaaugucucugggcgccgagaacagcguggccuacuccaacaacucuaucgcuauccccaccaacuucaccaucagcgugaccacagagauccugccuguguccaugaccaagaccagcguggacugcaccauguacaucugcggcgauuccaccgagugcuccaaccugcugcugcaguacggcagcuucugcacccagcugaauagagcccugacagggaucgccguggaacaggacaagaacacccaagagguguucgcccaagugaagcagaucuacaagaccccuccuaucaaggacuucggcggcuucaauuucagccagauucugcccgauccuagcaagcccagcaagcggagcuucaucgaggaccugcuguucaacaaagugacacuggccgacgccggcuucaucaagcaguauggcgauugucugggcgacauugccgccagggaucugauuugcgcccagaaguuuaacggacugacagugcugccuccucugcugaccgaugagaugaucgcccaguacacaucugcccugcuggccggcacaaucacaagcggcuggacauuuggagcaggcgccgcucugcagauccccuuugcuaugcagauggccuaccgguucaacggcaucggagugacccagaaugugcuguacgagaaccagaagcugaucgccaaccaguucaacagcgccaucggcaagauccaggacagccugagcagcacagcaagcgcccugggaaagcugcaggacguggucaaccagaaugcccaggcacugaacacccuggucaagcagcuguccuccaacuucggcgccaucagcucugugcugaacgauauccugagcagacuggacccuccugaggccgaggugcagaucgacagacugaucacaggcagacugcagagccuccagacauacgugacccagcagcugaucagagccgccgagauuagagccucugccaaucuggccgccaccaagaugucugagugugugcugggccagagcaagagaguggacuuuugcggcaagggcuaccaccugaugagcuucccucagucugccccucacggcgugguguuucugcacgugacauaugugcccgcucaagagaagaauuucaccaccgcuccagccaucugccacgacggcaaagcccacuuuccuagagaaggcguguucguguccaacggcacccauugguucgugacacagcggaacuucuacgagccccagaucaucaccaccgacaacaccuucgugucuggcaacugcgacgucgugaucggcauugugaacaauaccguguacgacccucugcagcccgagcuggacagcuucaaagaggaacuggacaaguacuuuaagaaccacacaagccccgacguggaccugggcgauaucagcggaaucaaugccagcgucgugaacauccagaaagagaucgaccggcugaacgagguggccaagaaucugaacgagagccugaucgaccugcaagaacuggggaaguacgagcaguacaucaaguggcccugguacaucuggcugggcuuuaucgccggacugauugccaucgugauggucacaaucaugcuguguugcaugaccagcugcuguagcugccugaagggcuguuguagcuguggcagcugcugcaaguucgacgaggacgauucugagcccgugcugaagggcgugaaacugcacuacacaugaggacuaguuauaagacugacuagcccgaugggccucccaacgggcccuccuccccuccuugcaccgagauuaaucaaaggcucuuuucagagccaccaaaaaaaaaaaaaaaaaaaaaaaaaaaaaaaaaaaaaaaaaaaaaaaaaaaaaaaaaaaaaaaaaaaaaaaaaaaaaaaaaaaaaaaaaaaaaaaaaaaaa

SEQ ID NO: 24276 - RNA, 4035 nt, Artificial Sequence
  SARS-CoV-2/Wuhan/WIV05/2019__EPI_ISL_402128 spike protein mRNA gc mod (1-1273)(K986P_V987P_D614G_M1229I)
aggagaaagcuuaccauguucguguuccuggugcugcugccucugguguccagccagugugugaaccugaccaccagaacacagcugccuccagccuacaccaacagcuuuaccagaggcguguacuaccccgacaagguguucagauccagcgugcugcacucuacccaggaccuguuccugccuuucuucagcaacgugaccugguuccacgccauccacguguccggcaccaauggcaccaagagauucgacaaccccgugcugcccuucaacgacgggguguacuuugccagcaccgagaaguccaacaucaucagaggcuggaucuucggcaccacacuggacagcaagacccagagccugcugaucgugaacaacgccaccaacguggucaucaaagugugcgaguuccaguucugcaacgaccccuuccugggcgucuacuaccacaagaacaacaagagcuggauggaaagcgaguuccggguguacagcagcgccaacaacugcaccuucgaguacgugucccagccuuuccugauggaccuggaaggcaagcagggcaacuucaagaaccugcgcgaguucguguuuaagaacaucgacggcuacuucaagaucuacagcaagcacaccccuaucaaccucgugcgggaucugccucagggcuucucugcucuggaaccccugguggaucugcccaucggcaucaacaucacccgguuucagacacugcuggcccugcacagaagcuaccugacaccuggcgauagcagcagcggauggacagcuggugccgccgcuuacuaugugggcuaccugcagccuagaaccuuccugcugaaguacaacgagaacggcaccaucaccgacgccguggauugugcucuggauccucugagcgagacaaagugcacccugaaguccuucaccguggaaaagggcaucuaccagaccagcaacuuccgggugcagcccaccgaauccaucgugcgguuccccaauaucaccaaucugugccccuucggcgagguguucaaugccaccagauucgccucuguguacgccuggaaccggaagcggaucagcaauugcguggccgacuacuccgugcuguacaacuccgccagcuucagcaccuucaagugcuacggcguguccccuaccaagcugaacgaccugugcuucacaaacguguacgccgacagcuucgugauccggggagaugaagugcggcagauugccccuggacagacaggcaagaucgccgacuacaacuacaagcugcccgacgacuucaccggcugugugauugccuggaacagcaacaaccuggacuccaaagucggcggcaacuacaauuaccuguaccggcuguuccggaaguccaaucugaagcccuucgagcgggacaucuccaccgagaucuaucaggccggcagcaccccuuguaacggcguggaaggcuucaacugcuacuucccacugcaguccuacggcuuucagcccacaaauggcgugggcuaucagcccuacagagugguggugcugagcuucgaacugcugcaugccccugccacagugugcggcccuaagaaaagcaccaaucucgugaagaacaaaugcgugaacuucaacuucaacggccugaccggcaccggcgugcugacagagagcaacaagaaguuccugccauuccagcaguuuggccgggauaucgccgauaccacagacgccguuagagauccccagacacuggaaauccuggacaucaccccuugcagcuucggcggagugucugugaucaccccuggcaccaacaccagcaaucagguggcagugcuguaccagggcgugaacuguaccgaagugcccguggccauucacgccgaucagcugacaccuacauggcggguguacuccaccggcagcaauguguuucagaccagagccggcugucugaucggagccgagcacgugaacaauagcuacgagugcgacauccccaucggcgcuggaaucugcgccagcuaccagacacagacaaacagcccucggagagccagaagcguggccagccagagcaucauugccuacacaaugucucugggcgccgagaacagcguggccuacuccaacaacucuaucgcuauccccaccaacuucaccaucagcgugaccacagagauccugccuguguccaugaccaagaccagcguggacugcaccauguacaucugcggcgauuccaccgagugcuccaaccugcugcugcaguacggcagcuucugcacccagcugaauagagcccugacagggaucgccguggaacaggacaagaacacccaagagguguucgcccaagugaagcagaucuacaagaccccuccuaucaaggacuucggcggcuucaauuucagccagauucugcccgauccuagcaagcccagcaagcggagcuucaucgaggaccugcuguucaacaaagugacacuggccgacgccggcuucaucaagcaguauggcgauugucugggcgacauugccgccagggaucugauuugcgcccagaaguuuaacggacugacagugcugccuccucugcugaccgaugagaugaucgcccaguacacaucugcccugcuggccggcacaaucacaagcggcuggacauuuggagcaggcgccgcucugcagauccccuuugcuaugcagauggccuaccgguucaacggcaucggagugacccagaaugugcuguacgagaaccagaagcugaucgccaaccaguucaacagcgccaucggcaagauccaggacagccugagcagcacagcaagcgcccugggaaagcugcaggacguggucaaccagaaugcccaggcacugaacacccuggucaagcagcuguccuccaacuucggcgccaucagcucugugcugaacgauauccugagcagacuggacccuccugaggccgaggugcagaucgacagacugaucacaggcagacugcagagccuccagacauacgugacccagcagcugaucagagccgccgagauuagagccucugccaaucuggccgccaccaagaugucugagugugugcugggccagagcaagagaguggacuuuugcggcaagggcuaccaccugaugagcuucccucagucugccccucacggcgugguguuucugcacgugacauaugugcccgcucaagagaagaauuucaccaccgcuccagccaucugccacgacggcaaagcccacuuuccuagagaaggcguguucguguccaacggcacccauugguucgugacacagcggaacuucuacgagccccagaucaucaccaccgacaacaccuucgugucuggcaacugcgacgucgugaucggcauugugaacaauaccguguacgacccucugcagcccgagcuggacagcuucaaagaggaacuggacaaguacuuuaagaaccacacaagccccgacguggaccugggcgauaucagcggaaucaaugccagcgucgugaacauccagaaagagaucgaccggcugaacgagguggccaagaaucugaacgagagccugaucgaccugcaagaacuggggaaguacgagcaguacaucaaguggcccugguacaucuggcugggcuuuaucgccggacugauugccaucgugaucgucacaaucaugcuguguugcaugaccagcugcuguagcugccugaagggcuguuguagcuguggcagcugcugcaaguucgacgaggacgauucugagcccgugcugaagggcgugaaacugcacuacacaugaggacuaguuauaagacugacuagcccgaugggccucccaacgggcccuccuccccuccuugcaccgagauuaaucaaaggcucuuuucagagccaccaaaaaaaaaaaaaaaaaaaaaaaaaaaaaaaaaaaaaaaaaaaaaaaaaaaaaaaaaaaaaaaaaaaaaaaaaaaaaaaaaaaaaaaaaaaaaaaaaaaaa

SEQ ID NO: 24277 - RNA, 4029 nt, Artificial Sequence
  SARS-CoV-2/Wuhan/WIV05/2019__EPI_ISL_402128 spike protein mRNA gc mod (1-1273)(K986P_V987P_H69del_V70del_A222V_Y453F_S477N_D614G_I692V)
aggagaaagcuuaccauguucguguuccuggugcugcugccucugguguccagccagugugugaaccugaccaccagaacacagcugccuccagccuacaccaacagcuuuaccagaggcguguacuaccccgacaagguguucagauccagcgugcugcacucuacccaggaccuguuccugccuuucuucagcaacgugaccugguuccacgccaucuccggcaccaauggcaccaagagauucgacaaccccgugcugcccuucaacgacgggguguacuuugccagcaccgagaaguccaacaucaucagaggcuggaucuucggcaccacacuggacagcaagacccagagccugcugaucgugaacaacgccaccaacguggucaucaaagugugcgaguuccaguucugcaacgaccccuuccugggcgucuacuaccacaagaacaacaagagcuggauggaaagcgaguuccggguguacagcagcgccaacaacugcaccuucgaguacgugucccagccuuuccugauggaccuggaaggcaagcagggcaacuucaagaaccugcgcgaguucguguuuaagaacaucgacggcuacuucaagaucuacagcaagcacaccccuaucaaccucgugcgggaucugccucagggcuucucugugcuggaaccccugguggaucugcccaucggcaucaacaucacccgguuucagacacugcuggcccugcacagaagcuaccugacaccuggcgauagcagcagcggauggacagcuggugccgccgcuuacuaugugggcuaccugcagccuagaaccuuccugcugaaguacaacgagaacggcaccaucaccgacgccguggauugugcucuggauccucugagcgagacaaagugcacccugaaguccuucaccguggaaaagggcaucuaccagaccagcaacuuccgggugcagcccaccgaauccaucgugcgguuccccaauaucaccaaucugugccccuucggcgagguguucaaugccaccagauucgccucuguguacgccuggaaccggaagcggaucagcaauugcguggccgacuacuccgugcuguacaacuccgccagcuucagcaccuucaagugcuacggcguguccccuaccaagcugaacgaccugugcuucacaaacguguacgccgacagcuucgugauccggggagaugaagugcggcagauugccccuggacagacaggcaagaucgccgacuacaacuacaagcugcccgacgacuucaccggcugugugauugccuggaacagcaacaaccuggacuccaaagucggcggcaacuacaauuaccuguuccggcuguuccggaaguccaaucugaagcccuucgagcgggacaucuccaccgagaucuaucaggccggcaacaccccuuguaacggcguggaaggcuucaacugcuacuucccacugcaguccuacggcuuucagcccacaaauggcgugggcuaucagcccuacagagugguggugcugagcuucgaacugcugcaugccccugccacagugugcggcccuaagaaaagcaccaaucucgugaagaacaaaugcgugaacuucaacuucaacggccugaccggcaccggcgugcugacagagagcaacaagaaguuccugccauuccagcaguuuggccgggauaucgccgauaccacagacgccguuagagauccccagacacuggaaauccuggacaucaccccuugcagcuucggcggagugucugugaucaccccuggcaccaacaccagcaaucagguggcagugcuguaccagggcgugaacuguaccgaagugcccguggccauucacgccgaucagcugacaccuacauggcggguguacuccaccggcagcaauguguuucagaccagagccggcugucugaucggagccgagcacgugaacaauagcuacgagugcgacauccccaucggcgcuggaaucugcgccagcuaccagacacagacaaacagcccucggagagccagaagcguggccagccagagcgugauugccuacacaaugucucugggcgccgagaacagcguggccuacuccaacaacucuaucgcuauccccaccaacuucaccaucagcgugaccacagagauccugccuguguccaugaccaagaccagcguggacugcaccauguacaucugcggcgauuccaccgagugcuccaaccugcugcugcaguacggcagcuucugcacccagcugaauagagcccugacagggaucgccguggaacaggacaagaacacccaagagguguucgcccaagugaagcagaucuacaagaccccuccuaucaaggacuucggcggcuucaauuucagccagauucugcccgauccuagcaagcccagcaagcggagcuucaucgaggaccugcuguucaacaaagugacacuggccgacgccggcuucaucaagcaguauggcgauugucugggcgacauugccgccagggaucugauuugcgcccagaaguuuaacggacugacagugcugccuccucugcugaccgaugagaugaucgcccaguacacaucugcccugcuggccggcacaaucacaagcggcuggacauuuggagcaggcgccgcucugcagauccccuuugcuaugcagauggccuaccgguucaacggcaucggagugacccagaaugugcuguacgagaaccagaagcugaucgccaaccaguucaacagcgccaucggcaagauccaggacagccugagcagcacagcaagcgcccugggaaagcugcaggacguggucaaccagaaugcccaggcacugaacacccuggucaagcagcuguccuccaacuucggcgccaucagcucugugcugaacgauauccugagcagacuggacccuccugaggccgaggugcagaucgacagacugaucacaggcagacugcagagccuccagacauacgugacccagcagcugaucagagccgccgagauuagagccucugccaaucuggccgccaccaagaugucugagugugugcugggccagagcaagagaguggacuuuugcggcaagggcuaccaccugaugagcuucccucagucugccccucacggcgugguguuucugcacgugacauaugugcccgcucaagagaagaauuucaccaccgcuccagccaucugccacgacggcaaagcccacuuuccuagagaaggcguguucguguccaacggcacccauugguucgugacacagcggaacuucuacgagccccagaucaucaccaccgacaacaccuucgugucuggcaacugcgacgucgugaucggcauugugaacaauaccguguacgacccucugcagcccgagcuggacagcuucaaagaggaacuggacaaguacuuuaagaaccacacaagccccgacguggaccugggcgauaucagcggaaucaaugccagcgucgugaacauccagaaagagaucgaccggcugaacgagguggccaagaaucugaacgagagccugaucgaccugcaagaacuggggaaguacgagcaguacaucaaguggcccugguacaucuggcugggcuuuaucgccggacugauugccaucgugauggucacaaucaugcuguguugcaugaccagcugcuguagcugccugaagggcuguuguagcuguggcagcugcugcaaguucgacgaggacgauucugagcccgugcugaagggcgugaaacugcacuacacaugaggacuaguuauaagacugacuagcccgaugggccucccaacgggcccuccuccccuccuugcaccgagauuaaucaaaggcucuuuucagagccaccaaaaaaaaaaaaaaaaaaaaaaaaaaaaaaaaaaaaaaaaaaaaaaaaaaaaaaaaaaaaaaaaaaaaaaaaaaaaaaaaaaaaaaaaaaaaaaaaaaaaa

SEQ ID NO: 24278 - RNA, 4029 nt, Artificial Sequence
  SARS-CoV-2/Wuhan/WIV05/2019__EPI_ISL_402128 spike protein mRNA gc mod (1-1273)(K986P_V987P_H69del_V70del_Y453F_D614G_I692V_M1229I)
aggagaaagcuuaccauguucguguuccuggugcugcugccucugguguccagccagugugugaaccugaccaccagaacacagcugccuccagccuacaccaacagcuuuaccagaggcguguacuaccccgacaagguguucagauccagcgugcugcacucuacccaggaccuguuccugccuuucuucagcaacgugaccugguuccacgccaucuccggcaccaauggcaccaagagauucgacaaccccgugcugcccuucaacgacgggguguacuuugccagcaccgagaaguccaacaucaucagaggcuggaucuucggcaccacacuggacagcaagacccagagccugcugaucgugaacaacgccaccaacguggucaucaaagugugcgaguuccaguucugcaacgaccccuuccugggcgucuacuaccacaagaacaacaagagcuggauggaaagcgaguuccggguguacagcagcgccaacaacugcaccuucgaguacgugucccagccuuuccugauggaccuggaaggcaagcagggcaacuucaagaaccugcgcgaguucguguuuaagaacaucgacggcuacuucaagaucuacagcaagcacaccccuaucaaccucgugcgggaucugccucagggcuucucugcucuggaaccccugguggaucugcccaucggcaucaacaucacccgguuucagacacugcuggcccugcacagaagcuaccugacaccuggcgauagcagcagcggauggacagcuggugccgccgcuuacuaugugggcuaccugcagccuagaaccuuccugcugaaguacaacgagaacggcaccaucaccgacgccguggauugugcucuggauccucugagcgagacaaagugcacccugaaguccuucaccguggaaaagggcaucuaccagaccagcaacuuccgggugcagcccaccgaauccaucgugcgguuccccaauaucaccaaucugugccccuucggcgagguguucaaugccaccagauucgccucuguguacgccuggaaccggaagcggaucagcaauugcguggccgacuacuccgugcuguacaacuccgccagcuucagcaccuucaagugcuacggcguguccccuaccaagcugaacgaccugugcuucacaaacguguacgccgacagcuucgugauccggggagaugaagugcggcagauugccccuggacagacaggcaagaucgccgacuacaacuacaagcugcccgacgacuucaccggcugugugauugccuggaacagcaacaaccuggacuccaaagucggcggcaacuacaauuaccuguuccggcuguuccggaaguccaaucugaagcccuucgagcgggacaucuccaccgagaucuaucaggccggcagcaccccuuguaacggcguggaaggcuucaacugcuacuucccacugcaguccuacggcuuucagcccacaaauggcgugggcuaucagcccuacagagugguggugcugagcuucgaacugcugcaugccccugccacagugugcggcccuaagaaaagcaccaaucucgugaagaacaaaugcgugaacuucaacuucaacggccugaccggcaccggcgugcugacagagagcaacaagaaguuccugccauuccagcaguuuggccgggauaucgccgauaccacagacgccguuagagauccccagacacuggaaauccuggacaucaccccuugcagcuucggcggagugucugugaucaccccuggcaccaacaccagcaaucagguggcagugcuguaccagggcgugaacuguaccgaagugcccguggccauucacgccgaucagcugacaccuacauggcggguguacuccaccggcagcaauguguuucagaccagagccggcugucugaucggagccgagcacgugaacaauagcuacgagugcgacauccccaucggcgcuggaaucugcgccagcuaccagacacagacaaacagcccucggagagccagaagcguggccagccagagcgugauugccuacacaaugucucugggcgccgagaacagcguggccuacuccaacaacucuaucgcuauccccaccaacuucaccaucagcgugaccacagagauccugccuguguccaugaccaagaccagcguggacugcaccauguacaucugcggcgauuccaccgagugcuccaaccugcugcugcaguacggcagcuucugcacccagcugaauagagcccugacagggaucgccguggaacaggacaagaacacccaagagguguucgcccaagugaagcagaucuacaagaccccuccuaucaaggacuucggcggcuucaauuucagccagauucugcccgauccuagcaagcccagcaagcggagcuucaucgaggaccugcuguucaacaaagugacacuggccgacgccggcuucaucaagcaguauggcgauugucugggcgacauugccgccagggaucugauuugcgcccagaaguuuaacggacugacagugcugccuccucugcugaccgaugagaugaucgcccaguacacaucugcccugcuggccggcacaaucacaagcggcuggacauuuggagcaggcgccgcucugcagauccccuuugcuaugcagauggccuaccgguucaacggcaucggagugacccagaaugugcuguacgagaaccagaagcugaucgccaaccaguucaacagcgccaucggcaagauccaggacagccugagcagcacagcaagcgcccugggaaagcugcaggacguggucaaccagaaugcccaggcacugaacacccuggucaagcagcuguccuccaacuucggcgccaucagcucugugcugaacgauauccugagcagacuggacccuccugaggccgaggugcagaucgacagacugaucacaggcagacugcagagccuccagacauacgugacccagcagcugaucagagccgccgagauuagagccucugccaaucuggccgccaccaagaugucugagugugugcugggccagagcaagagaguggacuuuugcggcaagggcuaccaccugaugagcuucccucagucugccccucacggcgugguguuucugcacgugacauaugugcccgcucaagagaagaauuucaccaccgcuccagccaucugccacgacggcaaagcccacuuuccuagagaaggcguguucguguccaacggcacccauugguucgugacacagcggaacuucuacgagccccagaucaucaccaccgacaacaccuucgugucuggcaacugcgacgucgugaucggcauugugaacaauaccguguacgacccucugcagcccgagcuggacagcuucaaagaggaacuggacaaguacuuuaagaaccacacaagccccgacguggaccugggcgauaucagcggaaucaaugccagcgucgugaacauccagaaagagaucgaccggcugaacgagguggccaagaaucugaacgagagccugaucgaccugcaagaacuggggaaguacgagcaguacaucaaguggcccugguacaucuggcugggcuuuaucgccggacugauugccaucgugaucgucacaaucaugcuguguugcaugaccagcugcuguagcugccugaagggcuguuguagcuguggcagcugcugcaaguucgacgaggacgauucugagcccgugcugaagggcgugaaacugcacuacacaugaggacuaguuauaagacugacuagcccgaugggccucccaacgggcccuccuccccuccuugcaccgagauuaaucaaaggcucuuuucagagccaccaaaaaaaaaaaaaaaaaaaaaaaaaaaaaaaaaaaaaaaaaaaaaaaaaaaaaaaaaaaaaaaaaaaaaaaaaaaaaaaaaaaaaaaaaaaaaaaaaaaaa

SEQ ID NO: 24279 - RNA, 4026 nt, Artificial Sequence
  SARS-CoV-2/Wuhan/WIV05/2019__EPI_ISL_402128 spike protein mRNA gc mod (1-1273)(K986P_V987P_K986P_V987P_H69del_V70del_Y144del_N501Y_A570 D_D614G_P681H_T716I_S982A_D1118H)
aggagaaagcuuaccauguucguguuccuggugcugcugccucugguguccagccagugugugaaccugaccaccagaacacagcugccuccagccuacaccaacagcuuuaccagaggcguguacuaccccgacaagguguucagauccagcgugcugcacucuacccaggaccuguuccugccuuucuucagcaacgugaccugguuccacgccaucuccggcaccaauggcaccaagagauucgacaaccccgugcugcccuucaacgacgggguguacuuugccagcaccgagaaguccaacaucaucagaggcuggaucuucggcaccacacuggacagcaagacccagagccugcugaucgugaacaacgccaccaacguggucaucaaagugugcgaguuccaguucugcaacgaccccuuccugggcgucuaccacaagaacaacaagagcuggauggaaagcgaguuccggguguacagcagcgccaacaacugcaccuucgaguacgugucccagccuuuccugauggaccuggaaggcaagcagggcaacuucaagaaccugcgcgaguucguguuuaagaacaucgacggcuacuucaagaucuacagcaagcacaccccuaucaaccucgugcgggaucugccucagggcuucucugcucuggaaccccugguggaucugcccaucggcaucaacaucacccgguuucagacacugcuggcccugcacagaagcuaccugacaccuggcgauagcagcagcggauggacagcuggugccgccgcuuacuaugugggcuaccugcagccuagaaccuuccugcugaaguacaacgagaacggcaccaucaccgacgccguggauugugcucuggauccucugagcgagacaaagugcacccugaaguccuucaccguggaaaagggcaucuaccagaccagcaacuuccgggugcagcccaccgaauccaucgugcgguuccccaauaucaccaaucugugccccuucggcgagguguucaaugccaccagauucgccucuguguacgccuggaaccggaagcggaucagcaauugcguggccgacuacuccgugcuguacaacuccgccagcuucagcaccuucaagugcuacggcguguccccuaccaagcugaacgaccugugcuucacaaacguguacgccgacagcuucgugauccggggagaugaagugcggcagauugccccuggacagacaggcaagaucgccgacuacaacuacaagcugcccgacgacuucaccggcugugugauugccuggaacagcaacaaccuggacuccaaagucggcggcaacuacaauuaccuguaccggcuguuccggaaguccaaucugaagcccuucgagcgggacaucuccaccgagaucuaucaggccggcagcaccccuuguaacggcguggaaggcuucaacugcuacuucccacugcaguccuacggcuuucagcccacauacggcgugggcuaucagcccuacagagugguggugcugagcuucgaacugcugcaugccccugccacagugugcggcccuaagaaaagcaccaaucucgugaagaacaaaugcgugaacuucaacuucaacggccugaccggcaccggcgugcugacagagagcaacaagaaguuccugccauuccagcaguuuggccgggauaucgacgauaccacagacgccguuagagauccccagacacuggaaauccuggacaucaccccuugcagcuucggcggagugucugugaucaccccuggcaccaacaccagcaaucagguggcagugcuguaccagggcgugaacuguaccgaagugcccguggccauucacgccgaucagcugacaccuacauggcggguguacuccaccggcagcaauguguuucagaccagagccggcugucugaucggagccgagcacgugaacaauagcuacgagugcgacauccccaucggcgcuggaaucugcgccagcuaccagacacagacaaacagccaccggagagccagaagcguggccagccagagcaucauugccuacacaaugucucugggcgccgagaacagcguggccuacuccaacaacucuaucgcuauccccaucaacuucaccaucagcgugaccacagagauccugccuguguccaugaccaagaccagcguggacugcaccauguacaucugcggcgauuccaccgagugcuccaaccugcugcugcaguacggcagcuucugcacccagcugaauagagcccugacagggaucgccguggaacaggacaagaacacccaagagguguucgcccaagugaagcagaucuacaagaccccuccuaucaaggacuucggcggcuucaauuucagccagauucugcccgauccuagcaagcccagcaagcggagcuucaucgaggaccugcuguucaacaaagugacacuggccgacgccggcuucaucaagcaguauggcgauugucugggcgacauugccgccagggaucugauuugcgcccagaaguuuaacggacugacagugcugccuccucugcugaccgaugagaugaucgcccaguacacaucugcccugcuggccggcacaaucacaagcggcuggacauuuggagcaggcgccgcucugcagauccccuuugcuaugcagauggccuaccgguucaacggcaucggagugacccagaaugugcuguacgagaaccagaagcugaucgccaaccaguucaacagcgccaucggcaagauccaggacagccugagcagcacagcaagcgcccugggaaagcugcaggacguggucaaccagaaugcccaggcacugaacacccuggucaagcagcuguccuccaacuucggcgccaucagcucugugcugaacgauauccuggccagacuggacccuccugaggccgaggugcagaucgacagacugaucacaggcagacugcagagccuccagacauacgugacccagcagcugaucagagccgccgagauuagagccucugccaaucuggccgccaccaagaugucugagugugugcugggccagagcaagagaguggacuuuugcggcaagggcuaccaccugaugagcuucccucagucugccccucacggcgugguguuucugcacgugacauaugugcccgcucaagagaagaauuucaccaccgcuccagccaucugccacgacggcaaagcccacuuuccuagagaaggcguguucguguccaacggcacccauugguucgugacacagcggaacuucuacgagccccagaucaucaccacccacaacaccuucgugucuggcaacugcgacgucgugaucggcauugugaacaauaccguguacgacccucugcagcccgagcuggacagcuucaaagaggaacuggacaaguacuuuaagaaccacacaagccccgacguggaccugggcgauaucagcggaaucaaugccagcgucgugaacauccagaaagagaucgaccggcugaacgagguggccaagaaucugaacgagagccugaucgaccugcaagaacuggggaaguacgagcaguacaucaaguggcccugguacaucuggcugggcuuuaucgccggacugauugccaucgugauggucacaaucaugcuguguugcaugaccagcugcuguagcugccugaagggcuguuguagcuguggcagcugcugcaaguucgacgaggacgauucugagcccgugcugaagggcgugaaacugcacuacacaugaggacuaguuauaagacugacuagcccgaugggccucccaacgggcccuccuccccuccuugcaccgagauuaaucaaaggcucuuuucagagccaccaaaaaaaaaaaaaaaaaaaaaaaaaaaaaaaaaaaaaaaaaaaaaaaaaaaaaaaaaaaaaaaaaaaaaaaaaaaaaaaaaaaaaaaaaaaaaaaaaaaaa

SEQ ID NO: 24280 - RNA, 4035 nt, Artificial Sequence
  SARS-CoV-2/Wuhan/WIV05/2019__EPI_ISL_402128 spike protein mRNA gc mod (1-1273)(K986P_V987P_K986P_V987P_K417N_E484K_N501Y_D614G)
aggagaaagcuuaccauguucguguuccuggugcugcugccucugguguccagccagugugugaaccugaccaccagaacacagcugccuccagccuacaccaacagcuuuaccagaggcguguacuaccccgacaagguguucagauccagcgugcugcacucuacccaggaccuguuccugccuuucuucagcaacgugaccugguuccacgccauccacguguccggcaccaauggcaccaagagauucgacaaccccgugcugcccuucaacgacgggguguacuuugccagcaccgagaaguccaacaucaucagaggcuggaucuucggcaccacacuggacagcaagacccagagccugcugaucgugaacaacgccaccaacguggucaucaaagugugcgaguuccaguucugcaacgaccccuuccugggcgucuacuaccacaagaacaacaagagcuggauggaaagcgaguuccggguguacagcagcgccaacaacugcaccuucgaguacgugucccagccuuuccugauggaccuggaaggcaagcagggcaacuucaagaaccugcgcgaguucguguuuaagaacaucgacggcuacuucaagaucuacagcaagcacaccccuaucaaccucgugcgggaucugccucagggcuucucugcucuggaaccccugguggaucugcccaucggcaucaacaucacccgguuucagacacugcuggcccugcacagaagcuaccugacaccuggcgauagcagcagcggauggacagcuggugccgccgcuuacuaugugggcuaccugcagccuagaaccuuccugcugaaguacaacgagaacggcaccaucaccgacgccguggauugugcucuggauccucugagcgagacaaagugcacccugaaguccuucaccguggaaaagggcaucuaccagaccagcaacuuccgggugcagcccaccgaauccaucgugcgguuccccaauaucaccaaucugugccccuucggcgagguguucaaugccaccagauucgccucuguguacgccuggaaccggaagcggaucagcaauugcguggccgacuacuccgugcuguacaacuccgccagcuucagcaccuucaagugcuacggcguguccccuaccaagcugaacgaccugugcuucacaaacguguacgccgacagcuucgugauccggggagaugaagugcggcagauugccccuggacagacaggcaacaucgccgacuacaacuacaagcugcccgacgacuucaccggcugugugauugccuggaacagcaacaaccuggacuccaaagucggcggcaacuacaauuaccuguaccggcuguuccggaaguccaaucugaagcccuucgagcgggacaucuccaccgagaucuaucaggccggcagcaccccuuguaacggcgugaagggcuucaacugcuacuucccacugcaguccuacggcuuucagcccacauacggcgugggcuaucagcccuacagagugguggugcugagcuucgaacugcugcaugccccugccacagugugcggcccuaagaaaagcaccaaucucgugaagaacaaaugcgugaacuucaacuucaacggccugaccggcaccggcgugcugacagagagcaacaagaaguuccugccauuccagcaguuuggccgggauaucgccgauaccacagacgccguuagagauccccagacacuggaaauccuggacaucaccccuugcagcuucggcggagugucugugaucaccccuggcaccaacaccagcaaucagguggcagugcuguaccagggcgugaacuguaccgaagugcccguggccauucacgccgaucagcugacaccuacauggcggguguacuccaccggcagcaauguguuucagaccagagccggcugucugaucggagccgagcacgugaacaauagcuacgagugcgacauccccaucggcgcuggaaucugcgccagcuaccagacacagacaaacagcccucggagagccagaagcguggccagccagagcaucauugccuacacaaugucucugggcgccgagaacagcguggccuacuccaacaacucuaucgcuauccccaccaacuucaccaucagcgugaccacagagauccugccuguguccaugaccaagaccagcguggacugcaccauguacaucugcggcgauuccaccgagugcuccaaccugcugcugcaguacggcagcuucugcacccagcugaauagagcccugacagggaucgccguggaacaggacaagaacacccaagagguguucgcccaagugaagcagaucuacaagaccccuccuaucaaggacuucggcggcuucaauuucagccagauucugcccgauccuagcaagcccagcaagcggagcuucaucgaggaccugcuguucaacaaagugacacuggccgacgccggcuucaucaagcaguauggcgauugucugggcgacauugccgccagggaucugauuugcgcccagaaguuuaacggacugacagugcugccuccucugcugaccgaugagaugaucgcccaguacacaucugcccugcuggccggcacaaucacaagcggcuggacauuuggagcaggcgccgcucugcagauccccuuugcuaugcagauggccuaccgguucaacggcaucggagugacccagaaugugcuguacgagaaccagaagcugaucgccaaccaguucaacagcgccaucggcaagauccaggacagccugagcagcacagcaagcgcccugggaaagcugcaggacguggucaaccagaaugcccaggcacugaacacccuggucaagcagcuguccuccaacuucggcgccaucagcucugugcugaacgauauccugagcagacuggacccuccugaggccgaggugcagaucgacagacugaucacaggcagacugcagagccuccagacauacgugacccagcagcugaucagagccgccgagauuagagccucugccaaucuggccgccaccaagaugucugagugugugcugggccagagcaagagaguggacuuuugcggcaagggcuaccaccugaugagcuucccucagucugccccucacggcgugguguuucugcacgugacauaugugcccgcucaagagaagaauuucaccaccgcuccagccaucugccacgacggcaaagcccacuuuccuagagaaggcguguucguguccaacggcacccauugguucgugacacagcggaacuucuacgagccccagaucaucaccaccgacaacaccuucgugucuggcaacugcgacgucgugaucggcauugugaacaauaccguguacgacccucugcagcccgagcuggacagcuucaaagaggaacuggacaaguacuuuaagaaccacacaagccccgacguggaccugggcgauaucagcggaaucaaugccagcgucgugaacauccagaaagagaucgaccggcugaacgagguggccaagaaucugaacgagagccugaucgaccugcaagaacuggggaaguacgagcaguacaucaaguggcccugguacaucuggcugggcuuuaucgccggacugauugccaucgugauggucacaaucaugcuguguugcaugaccagcugcuguagcugccugaagggcuguuguagcuguggcagcugcugcaaguucgacgaggacgauucugagcccgugcugaagggcgugaaacugcacuacacaugaggacuaguuauaagacugacuagcccgaugggccucccaacgggcccuccuccccuccuugcaccgagauuaaucaaaggcucuuuucagagccaccaaaaaaaaaaaaaaaaaaaaaaaaaaaaaaaaaaaaaaaaaaaaaaaaaaaaaaaaaaaaaaaaaaaaaaaaaaaaaaaaaaaaaaaaaaaaaaaaaaaaa

SEQ ID NO: 24281 - RNA, 4026 nt, Artificial Sequence
  SARS-CoV-2/Wuhan/WIV05/2019__EPI_ISL_402128 spike protein mRNA gc mod (1-1273)(K986P_V987P_K986P_V987P_L18F_D80A_D215G_L242del_A243del_ L244del_R246I_K417N_E484K_N501Y_D614G_A701V)
aggagaaagcuuaccauguucguguuccuggugcugcugccucugguguccagccagugugugaacuucaccaccagaacacagcugccuccagccuacaccaacagcuuuaccagaggcguguacuaccccgacaagguguucagauccagcgugcugcacucuacccaggaccuguuccugccuuucuucagcaacgugaccugguuccacgccauccacguguccggcaccaauggcaccaagagauucgccaaccccgugcugcccuucaacgacgggguguacuuugccagcaccgagaaguccaacaucaucagaggcuggaucuucggcaccacacuggacagcaagacccagagccugcugaucgugaacaacgccaccaacguggucaucaaagugugcgaguuccaguucugcaacgaccccuuccugggcgucuacuaccacaagaacaacaagagcuggauggaaagcgaguuccggguguacagcagcgccaacaacugcaccuucgaguacgugucccagccuuuccugauggaccuggaaggcaagcagggcaacuucaagaaccugcgcgaguucguguuuaagaacaucgacggcuacuucaagaucuacagcaagcacaccccuaucaaccucgugcggggccugccucagggcuucucugcucuggaaccccugguggaucugcccaucggcaucaacaucacccgguuucagacacugcacaucagcuaccugacaccuggcgauagcagcagcggauggacagcuggugccgccgcuuacuaugugggcuaccugcagccuagaaccuuccugcugaaguacaacgagaacggcaccaucaccgacgccguggauugugcucuggauccucugagcgagacaaagugcacccugaaguccuucaccguggaaaagggcaucuaccagaccagcaacuuccgggugcagcccaccgaauccaucgugcgguuccccaauaucaccaaucugugccccuucggcgagguguucaaugccaccagauucgccucuguguacgccuggaaccggaagcggaucagcaauugcguggccgacuacuccgugcuguacaacuccgccagcuucagcaccuucaagugcuacggcguguccccuaccaagcugaacgaccugugcuucacaaacguguacgccgacagcuucgugauccggggagaugaagugcggcagauugccccuggacagacaggcaacaucgccgacuacaacuacaagcugcccgacgacuucaccggcugugugauugccuggaacagcaacaaccuggacuccaaagucggcggcaacuacaauuaccuguaccggcuguuccggaaguccaaucugaagcccuucgagcgggacaucuccaccgagaucuaucaggccggcagcaccccuuguaacggcgugaagggcuucaacugcuacuucccacugcaguccuacggcuuucagcccacauacggcgugggcuaucagcccuacagagugguggugcugagcuucgaacugcugcaugccccugccacagugugcggcccuaagaaaagcaccaaucucgugaagaacaaaugcgugaacuucaacuucaacggccugaccggcaccggcgugcugacagagagcaacaagaaguuccugccauuccagcaguuuggccgggauaucgccgauaccacagacgccguuagagauccccagacacuggaaauccuggacaucaccccuugcagcuucggcggagugucugugaucaccccuggcaccaacaccagcaaucagguggcagugcuguaccagggcgugaacuguaccgaagugcccguggccauucacgccgaucagcugacaccuacauggcggguguacuccaccggcagcaauguguuucagaccagagccggcugucugaucggagccgagcacgugaacaauagcuacgagugcgacauccccaucggcgcuggaaucugcgccagcuaccagacacagacaaacagcccucggagagccagaagcguggccagccagagcaucauugccuacacaaugucucugggcguggagaacagcguggccuacuccaacaacucuaucgcuauccccaccaacuucaccaucagcgugaccacagagauccugccuguguccaugaccaagaccagcguggacugcaccauguacaucugcggcgauuccaccgagugcuccaaccugcugcugcaguacggcagcuucugcacccagcugaauagagcccugacagggaucgccguggaacaggacaagaacacccaagagguguucgcccaagugaagcagaucuacaagaccccuccuaucaaggacuucggcggcuucaauuucagccagauucugcccgauccuagcaagcccagcaagcggagcuucaucgaggaccugcuguucaacaaagugacacuggccgacgccggcuucaucaagcaguauggcgauugucugggcgacauugccgccagggaucugauuugcgcccagaaguuuaacggacugacagugcugccuccucugcugaccgaugagaugaucgcccaguacacaucugcccugcuggccggcacaaucacaagcggcuggacauuuggagcaggcgccgcucugcagauccccuuugcuaugcagauggccuaccgguucaacggcaucggagugacccagaaugugcuguacgagaaccagaagcugaucgccaaccaguucaacagcgccaucggcaagauccaggacagccugagcagcacagcaagcgcccugggaaagcugcaggacguggucaaccagaaugcccaggcacugaacacccuggucaagcagcuguccuccaacuucggcgccaucagcucugugcugaacgauauccugagcagacuggacccuccugaggccgaggugcagaucgacagacugaucacaggcagacugcagagccuccagacauacgugacccagcagcugaucagagccgccgagauuagagccucugccaaucuggccgccaccaagaugucugagugugugcugggccagagcaagagaguggacuuuugcggcaagggcuaccaccugaugagcuucccucagucugccccucacggcgugguguuucugcacgugacauaugugcccgcucaagagaagaauuucaccaccgcuccagccaucugccacgacggcaaagcccacuuuccuagagaaggcguguucguguccaacggcacccauugguucgugacacagcggaacuucuacgagccccagaucaucaccaccgacaacaccuucgugucuggcaacugcgacgucgugaucggcauugugaacaauaccguguacgacccucugcagcccgagcuggacagcuucaaagaggaacuggacaaguacuuuaagaaccacacaagccccgacguggaccugggcgauaucagcggaaucaaugccagcgucgugaacauccagaaagagaucgaccggcugaacgagguggccaagaaucugaacgagagccugaucgaccugcaagaacuggggaaguacgagcaguacaucaaguggcccugguacaucuggcugggcuuuaucgccggacugauugccaucgugauggucacaaucaugcuguguugcaugaccagcugcuguagcugccugaagggcuguuguagcuguggcagcugcugcaaguucgacgaggacgauucugagcccgugcugaagggcgugaaacugcacuacacaugaggacuaguuauaagacugacuagcccgaugggccucccaacgggcccuccuccccuccuugcaccgagauuaaucaaaggcucuuuucagagccaccaaaaaaaaaaaaaaaaaaaaaaaaaaaaaaaaaaaaaaaaaaaaaaaaaaaaaaaaaaaaaaaaaaaaaaaaaaaaaaaaaaaaaaaaaaaaaaaaaaaaa

SEQ ID NO: 24282 - RNA, 4035 nt, Artificial Sequence
  SARS-CoV-2/Wuhan/WIV05/2019__EPI_ISL_402128 spike protein mRNA gc mod (1-1273)(K986P_V987P_K986P_V987P_E484K_D614G)
aggagaaagcuuaccauguucguguuccuggugcugcugccucugguguccagccagugugugaaccugaccaccagaacacagcugccuccagccuacaccaacagcuuuaccagaggcguguacuaccccgacaagguguucagauccagcgugcugcacucuacccaggaccuguuccugccuuucuucagcaacgugaccugguuccacgccauccacguguccggcaccaauggcaccaagagauucgacaaccccgugcugcccuucaacgacgggguguacuuugccagcaccgagaaguccaacaucaucagaggcuggaucuucggcaccacacuggacagcaagacccagagccugcugaucgugaacaacgccaccaacguggucaucaaagugugcgaguuccaguucugcaacgaccccuuccugggcgucuacuaccacaagaacaacaagagcuggauggaaagcgaguuccggguguacagcagcgccaacaacugcaccuucgaguacgugucccagccuuuccugauggaccuggaaggcaagcagggcaacuucaagaaccugcgcgaguucguguuuaagaacaucgacggcuacuucaagaucuacagcaagcacaccccuaucaaccucgugcgggaucugccucagggcuucucugcucuggaaccccugguggaucugcccaucggcaucaacaucacccgguuucagacacugcuggcccugcacagaagcuaccugacaccuggcgauagcagcagcggauggacagcuggugccgccgcuuacuaugugggcuaccugcagccuagaaccuuccugcugaaguacaacgagaacggcaccaucaccgacgccguggauugugcucuggauccucugagcgagacaaagugcacccugaaguccuucaccguggaaaagggcaucuaccagaccagcaacuuccgggugcagcccaccgaauccaucgugcgguuccccaauaucaccaaucugugccccuucggcgagguguucaaugccaccagauucgccucuguguacgccuggaaccggaagcggaucagcaauugcguggccgacuacuccgugcuguacaacuccgccagcuucagcaccuucaagugcuacggcguguccccuaccaagcugaacgaccugugcuucacaaacguguacgccgacagcuucgugauccggggagaugaagugcggcagauugccccuggacagacaggcaagaucgccgacuacaacuacaagcugcccgacgacuucaccggcugugugauugccuggaacagcaacaaccuggacuccaaagucggcggcaacuacaauuaccuguaccggcuguuccggaaguccaaucugaagcccuucgagcgggacaucuccaccgagaucuaucaggccggcagcaccccuuguaacggcgugaagggcuucaacugcuacuucccacugcaguccuacggcuuucagcccacaaauggcgugggcuaucagcccuacagagugguggugcugagcuucgaacugcugcaugccccugccacagugugcggcccuaagaaaagcaccaaucucgugaagaacaaaugcgugaacuucaacuucaacggccugaccggcaccggcgugcugacagagagcaacaagaaguuccugccauuccagcaguuuggccgggauaucgccgauaccacagacgccguuagagauccccagacacuggaaauccuggacaucaccccuugcagcuucggcggagugucugugaucaccccuggcaccaacaccagcaaucagguggcagugcuguaccagggcgugaacuguaccgaagugcccguggccauucacgccgaucagcugacaccuacauggcggguguacuccaccggcagcaauguguuucagaccagagccggcugucugaucggagccgagcacgugaacaauagcuacgagugcgacauccccaucggcgcuggaaucugcgccagcuaccagacacagacaaacagcccucggagagccagaagcguggccagccagagcaucauugccuacacaaugucucugggcgccgagaacagcguggccuacuccaacaacucuaucgcuauccccaccaacuucaccaucagcgugaccacagagauccugccuguguccaugaccaagaccagcguggacugcaccauguacaucugcggcgauuccaccgagugcuccaaccugcugcugcaguacggcagcuucugcacccagcugaauagagcccugacagggaucgccguggaacaggacaagaacacccaagagguguucgcccaagugaagcagaucuacaagaccccuccuaucaaggacuucggcggcuucaauuucagccagauucugcccgauccuagcaagcccagcaagcggagcuucaucgaggaccugcuguucaacaaagugacacuggccgacgccggcuucaucaagcaguauggcgauugucugggcgacauugccgccagggaucugauuugcgcccagaaguuuaacggacugacagugcugccuccucugcugaccgaugagaugaucgcccaguacacaucugcccugcuggccggcacaaucacaagcggcuggacauuuggagcaggcgccgcucugcagauccccuuugcuaugcagauggccuaccgguucaacggcaucggagugacccagaaugugcuguacgagaaccagaagcugaucgccaaccaguucaacagcgccaucggcaagauccaggacagccugagcagcacagcaagcgcccugggaaagcugcaggacguggucaaccagaaugcccaggcacugaacacccuggucaagcagcuguccuccaacuucggcgccaucagcucugugcugaacgauauccugagcagacuggacccuccugaggccgaggugcagaucgacagacugaucacaggcagacugcagagccuccagacauacgugacccagcagcugaucagagccgccgagauuagagccucugccaaucuggccgccaccaagaugucugagugugugcugggccagagcaagagaguggacuuuugcggcaagggcuaccaccugaugagcuucccucagucugccccucacggcgugguguuucugcacgugacauaugugcccgcucaagagaagaauuucaccaccgcuccagccaucugccacgacggcaaagcccacuuuccuagagaaggcguguucguguccaacggcacccauugguucgugacacagcggaacuucuacgagccccagaucaucaccaccgacaacaccuucgugucuggcaacugcgacgucgugaucggcauugugaacaauaccguguacgacccucugcagcccgagcuggacagcuucaaagaggaacuggacaaguacuuuaagaaccacacaagccccgacguggaccugggcgauaucagcggaaucaaugccagcgucgugaacauccagaaagagaucgaccggcugaacgagguggccaagaaucugaacgagagccugaucgaccugcaagaacuggggaaguacgagcaguacaucaaguggcccugguacaucuggcugggcuuuaucgccggacugauugccaucgugauggucacaaucaugcuguguugcaugaccagcugcuguagcugccugaagggcuguuguagcuguggcagcugcugcaaguucgacgaggacgauucugagcccgugcugaagggcgugaaacugcacuacacaugaggacuaguuauaagacugacuagcccgaugggccucccaacgggcccuccuccccuccuugcaccgagauuaaucaaaggcucuuuucagagccaccaaaaaaaaaaaaaaaaaaaaaaaaaaaaaaaaaaaaaaaaaaaaaaaaaaaaaaaaaaaaaaaaaaaaaaaaaaaaaaaaaaaaaaaaaaaaaaaaaaaaa

SEQ ID NO: 24283 - RNA, 4035 nt, Artificial Sequence
  SARS-CoV-2/Wuhan/WIV05/2019__EPI_ISL_402128 spike protein mRNA gc mod (1-1273)(K986P_V987P_K986P_V987P_L18F_T20N_P26S_D138Y_R190S_K417T _E484K_N501Y_D614G_H655Y_T1027I)
aggagaaagcuuaccauguucguguuccuggugcugcugccucugguguccagccagugugugaacuucaccaacagaacacagcugccuagcgccuacaccaacagcuuuaccagaggcguguacuaccccgacaagguguucagauccagcgugcugcacucuacccaggaccuguuccugccuuucuucagcaacgugaccugguuccacgccauccacguguccggcaccaauggcaccaagagauucgacaaccccgugcugcccuucaacgacgggguguacuuugccagcaccgagaaguccaacaucaucagaggcuggaucuucggcaccacacuggacagcaagacccagagccugcugaucgugaacaacgccaccaacguggucaucaaagugugcgaguuccaguucugcaacuaccccuuccugggcgucuacuaccacaagaacaacaagagcuggauggaaagcgaguuccggguguacagcagcgccaacaacugcaccuucgaguacgugucccagccuuuccugauggaccuggaaggcaagcagggcaacuucaagaaccugagcgaguucguguuuaagaacaucgacggcuacuucaagaucuacagcaagcacaccccuaucaaccucgugcgggaucugccucagggcuucucugcucuggaaccccugguggaucugcccaucggcaucaacaucacccgguuucagacacugcuggcccugcacagaagcuaccugacaccuggcgauagcagcagcggauggacagcuggugccgccgcuuacuaugugggcuaccugcagccuagaaccuuccugcugaaguacaacgagaacggcaccaucaccgacgccguggauugugcucuggauccucugagcgagacaaagugcacccugaaguccuucaccguggaaaagggcaucuaccagaccagcaacuuccgggugcagcccaccgaauccaucgugcgguuccccaauaucaccaaucugugccccuucggcgagguguucaaugccaccagauucgccucuguguacgccuggaaccggaagcggaucagcaauugcguggccgacuacuccgugcuguacaacuccgccagcuucagcaccuucaagugcuacggcguguccccuaccaagcugaacgaccugugcuucacaaacguguacgccgacagcuucgugauccggggagaugaagugcggcagauugccccuggacagacaggcaccaucgccgacuacaacuacaagcugcccgacgacuucaccggcugugugauugccuggaacagcaacaaccuggacuccaaagucggcggcaacuacaauuaccuguaccggcuguuccggaaguccaaucugaagcccuucgagcgggacaucuccaccgagaucuaucaggccggcagcaccccuuguaacggcgugaagggcuucaacugcuacuucccacugcaguccuacggcuuucagcccacauacggcgugggcuaucagcccuacagagugguggugcugagcuucgaacugcugcaugccccugccacagugugcggcccuaagaaaagcaccaaucucgugaagaacaaaugcgugaacuucaacuucaacggccugaccggcaccggcgugcugacagagagcaacaagaaguuccugccauuccagcaguuuggccgggauaucgccgauaccacagacgccguuagagauccccagacacuggaaauccuggacaucaccccuugcagcuucggcggagugucugugaucaccccuggcaccaacaccagcaaucagguggcagugcuguaccagggcgugaacuguaccgaagugcccguggccauucacgccgaucagcugacaccuacauggcggguguacuccaccggcagcaauguguuucagaccagagccggcugucugaucggagccgaguacgugaacaauagcuacgagugcgacauccccaucggcgcuggaaucugcgccagcuaccagacacagacaaacagcccucggagagccagaagcguggccagccagagcaucauugccuacacaaugucucugggcgccgagaacagcguggccuacuccaacaacucuaucgcuauccccaccaacuucaccaucagcgugaccacagagauccugccuguguccaugaccaagaccagcguggacugcaccauguacaucugcggcgauuccaccgagugcuccaaccugcugcugcaguacggcagcuucugcacccagcugaauagagcccugacagggaucgccguggaacaggacaagaacacccaagagguguucgcccaagugaagcagaucuacaagaccccuccuaucaaggacuucggcggcuucaauuucagccagauucugcccgauccuagcaagcccagcaagcggagcuucaucgaggaccugcuguucaacaaagugacacuggccgacgccggcuucaucaagcaguauggcgauugucugggcgacauugccgccagggaucugauuugcgcccagaaguuuaacggacugacagugcugccuccucugcugaccgaugagaugaucgcccaguacacaucugcccugcuggccggcacaaucacaagcggcuggacauuuggagcaggcgccgcucugcagauccccuuugcuaugcagauggccuaccgguucaacggcaucggagugacccagaaugugcuguacgagaaccagaagcugaucgccaaccaguucaacagcgccaucggcaagauccaggacagccugagcagcacagcaagcgcccugggaaagcugcaggacguggucaaccagaaugcccaggcacugaacacccuggucaagcagcuguccuccaacuucggcgccaucagcucugugcugaacgauauccugagcagacuggacccuccugaggccgaggugcagaucgacagacugaucacaggcagacugcagagccuccagacauacgugacccagcagcugaucagagccgccgagauuagagccucugccaaucuggccgccaucaagaugucugagugugugcugggccagagcaagagaguggacuuuugcggcaagggcuaccaccugaugagcuucccucagucugccccucacggcgugguguuucugcacgugacauaugugcccgcucaagagaagaauuucaccaccgcuccagccaucugccacgacggcaaagcccacuuuccuagagaaggcguguucguguccaacggcacccauugguucgugacacagcggaacuucuacgagccccagaucaucaccaccgacaacaccuucgugucuggcaacugcgacgucgugaucggcauugugaacaauaccguguacgacccucugcagcccgagcuggacagcuucaaagaggaacuggacaaguacuuuaagaaccacacaagccccgacguggaccugggcgauaucagcggaaucaaugccagcgucgugaacauccagaaagagaucgaccggcugaacgagguggccaagaaucugaacgagagccugaucgaccugcaagaacuggggaaguacgagcaguacaucaaguggcccugguacaucuggcugggcuuuaucgccggacugauugccaucgugauggucacaaucaugcuguguugcaugaccagcugcuguagcugccugaagggcuguuguagcuguggcagcugcugcaaguucgacgaggacgauucugagcccgugcugaagggcgugaaacugcacuacacaugaggacuaguuauaagacugacuagcccgaugggccucccaacgggcccuccuccccuccuugcaccgagauuaaucaaaggcucuuuucagagccaccaaaaaaaaaaaaaaaaaaaaaaaaaaaaaaaaaaaaaaaaaaaaaaaaaaaaaaaaaaaaaaaaaaaaaaaaaaaaaaaaaaaaaaaaaaaaaaaaaaaaa

SEQ ID NO: 24284 - RNA, 4035 nt, Artificial Sequence
  SARS-CoV-2/Wuhan/WIV05/2019__EPI_ISL_402128 spike protein mRNA gc mod (1-1273)(K986P_V987P_K986P_V987P_S13I_W152C_L452R_D614G)
aggagaaagcuuaccauguucguguuccuggugcugcugccucugguguccauccagugugugaaccugaccaccagaacacagcugccuccagccuacaccaacagcuuuaccagaggcguguacuaccccgacaagguguucagauccagcgugcugcacucuacccaggaccuguuccugccuuucuucagcaacgugaccugguuccacgccauccacguguccggcaccaauggcaccaagagauucgacaaccccgugcugcccuucaacgacgggguguacuuugccagcaccgagaaguccaacaucaucagaggcuggaucuucggcaccacacuggacagcaagacccagagccugcugaucgugaacaacgccaccaacguggucaucaaagugugcgaguuccaguucugcaacgaccccuuccugggcgucuacuaccacaagaacaacaagagcugcauggaaagcgaguuccggguguacagcagcgccaacaacugcaccuucgaguacgugucccagccuuuccugauggaccuggaaggcaagcagggcaacuucaagaaccugcgcgaguucguguuuaagaacaucgacggcuacuucaagaucuacagcaagcacaccccuaucaaccucgugcgggaucugccucagggcuucucugcucuggaaccccugguggaucugcccaucggcaucaacaucacccgguuucagacacugcuggcccugcacagaagcuaccugacaccuggcgauagcagcagcggauggacagcuggugccgccgcuuacuaugugggcuaccugcagccuagaaccuuccugcugaaguacaacgagaacggcaccaucaccgacgccguggauugugcucuggauccucugagcgagacaaagugcacccugaaguccuucaccguggaaaagggcaucuaccagaccagcaacuuccgggugcagcccaccgaauccaucgugcgguuccccaauaucaccaaucugugccccuucggcgagguguucaaugccaccagauucgccucuguguacgccuggaaccggaagcggaucagcaauugcguggccgacuacuccgugcuguacaacuccgccagcuucagcaccuucaagugcuacggcguguccccuaccaagcugaacgaccugugcuucacaaacguguacgccgacagcuucgugauccggggagaugaagugcggcagauugccccuggacagacaggcaagaucgccgacuacaacuacaagcugcccgacgacuucaccggcugugugauugccuggaacagcaacaaccuggacuccaaagucggcggcaacuacaauuaccgcuaccggcuguuccggaaguccaaucugaagcccuucgagcgggacaucuccaccgagaucuaucaggccggcagcaccccuuguaacggcguggaaggcuucaacugcuacuucccacugcaguccuacggcuuucagcccacaaauggcgugggcuaucagcccuacagagugguggugcugagcuucgaacugcugcaugccccugccacagugugcggcccuaagaaaagcaccaaucucgugaagaacaaaugcgugaacuucaacuucaacggccugaccggcaccggcgugcugacagagagcaacaagaaguuccugccauuccagcaguuuggccgggauaucgccgauaccacagacgccguuagagauccccagacacuggaaauccuggacaucaccccuugcagcuucggcggagugucugugaucaccccuggcaccaacaccagcaaucagguggcagugcuguaccagggcgugaacuguaccgaagugcccguggccauucacgccgaucagcugacaccuacauggcggguguacuccaccggcagcaauguguuucagaccagagccggcugucugaucggagccgagcacgugaacaauagcuacgagugcgacauccccaucggcgcuggaaucugcgccagcuaccagacacagacaaacagcccucggagagccagaagcguggccagccagagcaucauugccuacacaaugucucugggcgccgagaacagcguggccuacuccaacaacucuaucgcuauccccaccaacuucaccaucagcgugaccacagagauccugccuguguccaugaccaagaccagcguggacugcaccauguacaucugcggcgauuccaccgagugcuccaaccugcugcugcaguacggcagcuucugcacccagcugaauagagcccugacagggaucgccguggaacaggacaagaacacccaagagguguucgcccaagugaagcagaucuacaagaccccuccuaucaaggacuucggcggcuucaauuucagccagauucugcccgauccuagcaagcccagcaagcggagcuucaucgaggaccugcuguucaacaaagugacacuggccgacgccggcuucaucaagcaguauggcgauugucugggcgacauugccgccagggaucugauuugcgcccagaaguuuaacggacugacagugcugccuccucugcugaccgaugagaugaucgcccaguacacaucugcccugcuggccggcacaaucacaagcggcuggacauuuggagcaggcgccgcucugcagauccccuuugcuaugcagauggccuaccgguucaacggcaucggagugacccagaaugugcuguacgagaaccagaagcugaucgccaaccaguucaacagcgccaucggcaagauccaggacagccugagcagcacagcaagcgcccugggaaagcugcaggacguggucaaccagaaugcccaggcacugaacacccuggucaagcagcuguccuccaacuucggcgccaucagcucugugcugaacgauauccugagcagacuggacccuccugaggccgaggugcagaucgacagacugaucacaggcagacugcagagccuccagacauacgugacccagcagcugaucagagccgccgagauuagagccucugccaaucuggccgccaccaagaugucugagugugugcugggccagagcaagagaguggacuuuugcggcaagggcuaccaccugaugagcuucccucagucugccccucacggcgugguguuucugcacgugacauaugugcccgcucaagagaagaauuucaccaccgcuccagccaucugccacgacggcaaagcccacuuuccuagagaaggcguguucguguccaacggcacccauugguucgugacacagcggaacuucuacgagccccagaucaucaccaccgacaacaccuucgugucuggcaacugcgacgucgugaucggcauugugaacaauaccguguacgacccucugcagcccgagcuggacagcuucaaagaggaacuggacaaguacuuuaagaaccacacaagccccgacguggaccugggcgauaucagcggaaucaaugccagcgucgugaacauccagaaagagaucgaccggcugaacgagguggccaagaaucugaacgagagccugaucgaccugcaagaacuggggaaguacgagcaguacaucaaguggcccugguacaucuggcugggcuuuaucgccggacugauugccaucgugauggucacaaucaugcuguguugcaugaccagcugcuguagcugccugaagggcuguuguagcuguggcagcugcugcaaguucgacgaggacgauucugagcccgugcugaagggcgugaaacugcacuacacaugaggacuaguuauaagacugacuagcccgaugggccucccaacgggcccuccuccccuccuugcaccgagauuaaucaaaggcucuuuucagagccaccaaaaaaaaaaaaaaaaaaaaaaaaaaaaaaaaaaaaaaaaaaaaaaaaaaaaaaaaaaaaaaaaaaaaaaaaaaaaaaaaaaaaaaaaaaaaaaaaaaaaa

SEQ ID NO: 24285 - RNA, 1371 nt, Artificial Sequence
  SARS-CoV-2/Wuhan/WIV05/2019__EPI_ISL_402128 spike protein mRNA gc (1-15,334-528) Ferritin construct
aggagaaagcuuaccauguucguguuccugguccuccugccccuggugagcucccagugcaaccugugccccuucggcgagguguucaacgccacccgguucgccagcgucuacgccuggaaccgcaagcggaucuccaacugcguggcggacuacagcgugcuguacaacuccgccagcuucuccacguucaagugcuacggcgucagccccaccaagcucaacgaccugugcuucaccaacguguacgccgacuccuucgugauccgcggggacgagguccggcagaucgcccccggccagaccgggaagaucgccgacuacaacuacaagcugccggacgacuucacgggcugcgugaucgcguggaacagcaacaaccucgacuccaaggucgggggcaacuacaacuaccuguaccgccuguuccgcaagagcaaccucaagcccuucgagcgggacaucuccaccgagaucuaccaggccggcagcacccccugcaacgggguggagggcuucaacugcuacuucccccugcaguccuacggguuccagccgaccaacggcgugggguaccagcccuaccggguggucgugcugagcuucgagcuccugcacgcccccgccacggugugcggccccaagggcggggguggaagcggcggggguggaagugacaucaucaagcuccugaacgagcaggucaacaaggagaugcaguccagcaaccuguacauguccaugagcuccuggugcuacacccacagccucgacggcgccgggcuguuccuguucgaccacgccgcggaggaguacgagcacgccaagaagcucaucaucuuccugaacgagaacaacgugcccgugcagcugaccuccaucagcgccccggagcacaaguucgagggccucacgcagaucuuccagaaggccuacgagcacgagcagcacaucuccgagagcaucaacaacaucguggaccacgccaucaaguccaaggaccacgcgaccuucaacuuccugcagugguacgucgccgagcagcacgaggaggaggugcuguucaaggacauccucgacaagaucgagcugaucgggaacgagaaccacggccuguaccucgccgaccaguacgugaaggggaucgccaagagccgcaaguccugaggacuaguuauaagacugacuagcccgaugggccucccaacgggcccuccuccccuccuugcaccgagauuaauagaucucaaaggcucuuuucagagccaccaaaaaaaaaaaaaaaaaaaaaaaaaaaaaaaaaaaaaaaaaaaaaaaaaaaaaaaaaaaaaaaaaaaaaaaaaaaaaaaaaaaaaaaaaaaaaaaaaaaaa

SEQ ID NO: 24286 - RNA, 969 nt, Artificial Sequence
  SARS-CoV-2/Wuhan/WIV05/2019__EPI_ISL_402128 spike protein mRNA gc (334-528) Foldon construct
aggagaaagcuuaccaugcccaugggcagccugcagccgcucgccacccuguaccugcucgggaugcugguggccuccguccuggcgaaccugugccccuucggcgagguguucaacgccacccgguucgccagcgucuacgccuggaaccgcaagcggaucuccaacugcguggcggacuacagcgugcuguacaacuccgccagcuucuccacguucaagugcuacggcgucagccccaccaagcucaacgaccugugcuucaccaacguguacgccgacuccuucgugauccgcggggacgagguccggcagaucgcccccggccagaccgggaagaucgccgacuacaacuacaagcugccggacgacuucacgggcugcgugaucgcguggaacagcaacaaccucgacuccaaggucgggggcaacuacaacuaccuguaccgccuguuccgcaagagcaaccucaagcccuucgagcgggacaucuccaccgagaucuaccaggccggcagcacccccugcaacgggguggagggcuucaacugcuacuucccccugcaguccuacggguuccagccgaccaacggcgugggguaccagcccuaccggguggucgugcugagcuucgagcuccugcacgcccccgccacggugugcggccccaagggcagcggcggguacauccccgaggccccgcgcgacggccaggccuacgugcggaaggacggcgaguggguccugcugagcaccuuccucugaggacuaguuauaagacugacuagcccgaugggccucccaacgggcccuccuccccuccuugcaccgagauuaauagaucucaaaggcucuuuucagagccaccaaaaaaaaaaaaaaaaaaaaaaaaaaaaaaaaaaaaaaaaaaaaaaaaaaaaaaaaaaaaaaaaaaaaaaaaaaaaaaaaaaaaaaaaaaaaaaaaaaaaa

SEQ ID NO: 24287 - RNA, 1347 nt, Artificial Sequence
  SARS-CoV-2/Wuhan/WIV05/2019__EPI_ISL_402128 spike protein mRNA gc (1-15,334-528) LumSynth construct
aggagaaagcuuaccauguucguguuccugguccuccugccccuggugagcucccagugcaaccugugccccuucggcgagguguucaacgccacccgguucgccagcgucuacgccuggaaccgcaagcggaucuccaacugcguggcggacuacagcgugcuguacaacuccgccagcuucuccacguucaagugcuacggcgucagccccaccaagcucaacgaccugugcuucaccaacguguacgccgacuccuucgugauccgcggggacgagguccggcagaucgcccccggccagaccgggaagaucgccgacuacaacuacaagcugccggacgacuucacgggcugcgugaucgcguggaacagcaacaaccucgacuccaaggucgggggcaacuacaacuaccuguaccgccuguuccgcaagagcaaccucaagcccuucgagcgggacaucuccaccgagaucuaccaggccggcagcacccccugcaacgggguggagggcuucaacugcuacuucccccugcaguccuacggguuccagccgaccaacggcgugggguaccagcccuaccggguggucgugcugagcuucgagcuccugcacgcccccgccacggugugcggccccaagggcggcggcggcuccggaggcggagguagcgggggacagaucuacgagggcaagcugaccgccgaggggcuccgcuucggcaucguggccagccgguucaaccacgcgcuggucgaccgccugguggagggggccaucgacgccaucgugcggcacggcgggcgcgaggaggacaucacccucguccgggugcccggcuccugggagaucccgguggccgccggcgagcuggcccgcaaggaggacaucgacgcggucaucgccaucggggugcugauccggggcgccacgccccacuucgacuacaucgccagcgagguguccaaggggcucgcggaccugagccuggagcuccgcaagcccaucaccuucggcgucaucaccgccgacacccuggagcaggccaucgagcgggccgggacgaagcacggcaacaagggcugggaggccgcgcuguccgccaucgagauggccaaccucuucaagagccugcgcugaggacuaguuauaagacugacuagcccgaugggccucccaacgggcccuccuccccuccuugcaccgagauuaauagaucucaaaggcucuuuucagagccaccaaaaaaaaaaaaaaaaaaaaaaaaaaaaaaaaaaaaaaaaaaaaaaaaaaaaaaaaaaaaaaaaaaaaaaaaaaaaaaaaaaaaaaaaaaaaaaaaaaaaa

SEQ ID NO: 24288 - RNA, 1308 nt, Artificial Sequence
  SARS-CoV-2/Wuhan/WIV05/2019__EPI_ISL_402128 spike protein mRNA gc (334-528) LumSynth construct
aggagaaagcuuaccaugcagaucuacgagggcaagcugaccgccgaggggcuccgcuucggcaucguggccagccgguucaaccacgcgcuggucgaccgccugguggagggggccaucgacgccaucgugcggcacggcgggcgcgaggaggacaucacccucguccgggugcccggcuccugggagaucccgguggccgccggcgagcuggcccgcaaggaggacaucgacgcggucaucgccaucggggugcugauccggggcgccacgccccacuucgacuacaucgccagcgagguguccaaggggcucgcggaccugagccuggagcuccgcaagcccaucaccuucggcgucaucaccgccgacacccuggagcaggccaucgagcgggccgggacgaagcacggcaacaagggcugggaggccgcgcuguccgccaucgagauggccaaccucuucaagagccugcgcggcgggggcgggagcggcgggggcggcuccgggggcgggaaccugugccccuucggcgagguguucaacgccacccgguucgccagcgucuacgccuggaaccgcaagcggaucuccaacugcguggcggacuacagcgugcuguacaacuccgccagcuucuccacguucaagugcuacggcgucagccccaccaagcucaacgaccugugcuucaccaacguguacgccgacuccuucgugauccgcggggacgagguccggcagaucgcccccggccagaccgggaagaucgccgacuacaacuacaagcugccggacgacuucacgggcugcgugaucgcguggaacagcaacaaccucgacuccaaggucgggggcaacuacaacuaccuguaccgccuguuccgcaagagcaaccucaagcccuucgagcgggacaucuccaccgagaucuaccaggccggcagcacccccugcaacgggguggagggcuucaacugcuacuucccccugcaguccuacggguuccagccgaccaacggcgugggguaccagcccuaccggguggucgugcugagcuucgagcuccugcacgcccccgccacggugugcggccccaagugaggacuaguuauaagacugacuagcccgaugggccucccaacgggcccuccuccccuccuugcaccgagauuaauagaucucaaaggcucuuuucagagccaccaaaaaaaaaaaaaaaaaaaaaaaaaaaaaaaaaaaaaaaaaaaaaaaaaaaaaaaaaaaaaaaaaaaaaaaaaaaaaaaaaaaaaaaaaaaaaaaaaaaaa

SEQ ID NO: 24289 - RNA, 4041 nt, Artificial Sequence
  SARS-CoV-2/Wuhan/WIV05/2019__EPI_ISL_402128 spike protein mRNA gc (1-1273)
aggagaaagcuuaccauguucguguuccugguccuccugccccuggugagcucccagugcgugaaccucaccacccgcacgcagcugccgcccgccuacaccaacagcuucacccggggcgucuacuaccccgacaagguguuccgcuccagcgugcugcacuccacccaggaccucuuccugcccuucuucagcaacgucacgugguuccacgccauccacguguccgggaccaacggcaccaagcgguucgacaacccggugcugcccuucaacgacggggucuacuucgcgagcaccgagaaguccaacaucauccgcggcuggaucuucgggacgacccucgacagcaagacccagucccugcugaucgugaacaacgccaccaacguggucaucaaggugugcgaguuccaguucugcaacgaccccuuccucggcguguacuaccacaagaacaacaagagcuggauggaguccgaguuccgggucuacagcuccgccaacaacugcacguucgaguacgugagccagcccuuccugauggaccuggagggcaagcaggggaacuucaagaaccuccgcgaguucguguucaagaacaucgacggcuacuucaagaucuacuccaagcacaccccgaucaaccugguccgggaccugccccagggguucagcgcccucgagccccugguggaccugcccaucggcaucaacaucacccgcuuccagacccuccuggcccugcaccgguccuaccucacgccgggggacagcagcuccggcuggaccgcgggcgccgccgccuacuacgugggguaccugcagccccgcaccuuccugcucaaguacaacgagaacggcaccaucacggacgcggucgacugcgcccuggacccccugagcgagaccaagugcacccucaaguccuucaccguggagaaggggaucuaccagacgagcaacuuccgggugcagcccaccgaguccaucguccgcuucccgaacaucaccaaccugugccccuucggcgagguguucaacgccacccgguucgccagcgucuacgccuggaaccgcaagcggaucuccaacugcguggcggacuacagcgugcuguacaacuccgccagcuucuccacguucaagugcuacggcgucagccccaccaagcucaacgaccugugcuucaccaacguguacgccgacuccuucgugauccgcggggacgagguccggcagaucgcccccggccagaccgggaagaucgccgacuacaacuacaagcugccggacgacuucacgggcugcgugaucgcguggaacagcaacaaccucgacuccaaggucgggggcaacuacaacuaccuguaccgccuguuccgcaagagcaaccucaagcccuucgagcgggacaucuccaccgagaucuaccaggccggcagcacccccugcaacgggguggagggcuucaacugcuacuucccccugcaguccuacggguuccagccgaccaacggcgugggguaccagcccuaccggguggucgugcugagcuucgagcuccugcacgcccccgccacggugugcggccccaagaaguccaccaaccuggucaagaacaagugcgugaacuucaacuucaacggccucaccgggaccggcgugcugaccgagagcaacaagaaguuccugccguuccagcaguucgggcgcgacaucgccgacacgaccgacgcgguccgcgacccccagacccuggagauccucgacaucacccccugcagcuucggcgggguguccgugaucacgccgggcaccaacaccagcaaccaggucgccgugcuguaccaggacgugaacugcaccgagguccccguggccauccacgccgaccagcugacgcccaccuggcggguguacuccaccggcagcaacgucuuccagacccgcgccgggugccucaucggcgcggagcacgugaacaacuccuacgagugcgacauccccaucggggccggcaucugcgccagcuaccagacgcagaccaacuccccgcggcgcgcccggagcguggcgucccagagcaucaucgccuacaccaugucccugggcgccgagaacagcgucgccuacuccaacaacagcaucgccauccccaccaacuucacgaucuccgugaccaccgagauccugcccgugagcaugaccaagacgagcgucgacugcaccauguacaucugcggggacuccaccgagugcagcaaccuccugcugcaguacggcuccuucugcacccagcucaaccgcgcgcugacggggaucgccguggagcaggacaagaacacccaggagguguucgcccaggucaagcagaucuacaagacgcccccgaucaaggacuucggcggguucaacuucagccagauccugcccgaccccuccaagcccagcaagcgguccuucaucgaggaccuccuguucaacaaggugacccuggccgacgccggcuucaucaagcaguacggcgacugccucggggacaucgcggcccgcgaccugaucugcgcccagaaguucaacggccugaccgugcucccgccccugcugaccgacgagaugaucgcccaguacaccagcgcccuccuggcggggaccaucacguccggcuggaccuucggggccggcgccgcccugcagauccccuucgcgaugcagauggccuaccgguucaacggcaucggggucacccagaacgugcucuacgagaaccagaagcugaucgccaaccaguucaacagcgccaucggcaagauccaggacucccugagcuccaccgccagcgcgcucgggaagcugcaggacguggucaaccagaacgcccaggcccugaacacgcucgugaagcagcuguccagcaacuucggcgccaucuccagcgugcugaacgacauccucucccgccuggacaaggucgaggccgaggugcagaucgaccggcugaucaccgggcgccuccagagccugcagaccuacgugacccagcagcugauccgggcggccgagauccgcgccagcgccaaccucgccgcgaccaagauguccgagugcguccugggccagagcaagcggguggacuucugcggcaagggguaccaccugauguccuucccccagagcgccccgcacggcguggucuuccuccacgugacguacguccccgcccaggagaagaacuucaccaccgcccccgcgaucugccacgacgggaaggcccacuucccccgcgagggcguguucguguccaacgggacccacugguucgucacgcagcggaacuucuacgagccgcagaucaucaccaccgacaacaccuucgugagcggcaacugcgacguggucaucggcaucgugaacaacacgguguacgacccccugcagcccgagcuggacuccuucaaggaggagcucgacaaguacuucaagaaccacaccagccccgacgucgaccugggggacaucuccggcaucaacgccagcguggugaacauccagaaggagaucgaccgccugaacgaggucgccaagaaccucaacgagucccugaucgaccugcaggagcucgggaaguacgagcaguacaucaaguggccgugguacaucuggcugggcuucaucgccggccugaucgcgaucgugauggugaccaucaugcucugcugcaugaccagcugcugcuccugccugaaggggugcugcagcugcggcuccugcugcaaguucgacgaggacgacagcgagcccguccugaagggggugaagcuccacuacacgugaggacuaguuauaagacugacuagcccgaugggccucccaacgggcccuccuccccuccuugcaccgagauuaauagaucucaaaggcucuuuucagagccaccaaaaaaaaaaaaaaaaaaaaaaaaaaaaaaaaaaaaaaaaaaaaaaaaaaaaaaaaaaaaaaaaaaaaaaaaaaaaaaaaaaaaaaaaaaaaaaaaaaaaa

SEQ ID NO: 24290 - RNA, 4041 nt, Artificial Sequence
  SARS-CoV-2/Wuhan/WIV05/2019__EPI_ISL_402128 spike protein mRNA gc (1-1273)(D614G)
aggagaaagcuuaccauguucguguuccugguccuccugccccuggugagcucccagugcgugaaccucaccacccgcacgcagcugccgcccgccuacaccaacagcuucacccggggcgucuacuaccccgacaagguguuccgcuccagcgugcugcacuccacccaggaccucuuccugcccuucuucagcaacgucacgugguuccacgccauccacguguccgggaccaacggcaccaagcgguucgacaacccggugcugcccuucaacgacggggucuacuucgcgagcaccgagaaguccaacaucauccgcggcuggaucuucgggacgacccucgacagcaagacccagucccugcugaucgugaacaacgccaccaacguggucaucaaggugugcgaguuccaguucugcaacgaccccuuccucggcguguacuaccacaagaacaacaagagcuggauggaguccgaguuccgggucuacagcuccgccaacaacugcacguucgaguacgugagccagcccuuccugauggaccuggagggcaagcaggggaacuucaagaaccuccgcgaguucguguucaagaacaucgacggcuacuucaagaucuacuccaagcacaccccgaucaaccugguccgggaccugccccagggguucagcgcccucgagccccugguggaccugcccaucggcaucaacaucacccgcuuccagacccuccuggcccugcaccgguccuaccucacgccgggggacagcagcuccggcuggaccgcgggcgccgccgccuacuacgugggguaccugcagccccgcaccuuccugcucaaguacaacgagaacggcaccaucacggacgcggucgacugcgcccuggacccccugagcgagaccaagugcacccucaaguccuucaccguggagaaggggaucuaccagacgagcaacuuccgggugcagcccaccgaguccaucguccgcuucccgaacaucaccaaccugugccccuucggcgagguguucaacgccacccgguucgccagcgucuacgccuggaaccgcaagcggaucuccaacugcguggcggacuacagcgugcuguacaacuccgccagcuucuccacguucaagugcuacggcgucagccccaccaagcucaacgaccugugcuucaccaacguguacgccgacuccuucgugauccgcggggacgagguccggcagaucgcccccggccagaccgggaagaucgccgacuacaacuacaagcugccggacgacuucacgggcugcgugaucgcguggaacagcaacaaccucgacuccaaggucgggggcaacuacaacuaccuguaccgccuguuccgcaagagcaaccucaagcccuucgagcgggacaucuccaccgagaucuaccaggccggcagcacccccugcaacgggguggagggcuucaacugcuacuucccccugcaguccuacggguuccagccgaccaacggcgugggguaccagcccuaccggguggucgugcugagcuucgagcuccugcacgcccccgccacggugugcggccccaagaaguccaccaaccuggucaagaacaagugcgugaacuucaacuucaacggccucaccgggaccggcgugcugaccgagagcaacaagaaguuccugccguuccagcaguucgggcgcgacaucgccgacacgaccgacgcgguccgcgacccccagacccuggagauccucgacaucacccccugcagcuucggcgggguguccgugaucacgccgggcaccaacaccagcaaccaggucgccgugcuguaccagggcgugaacugcaccgagguccccguggccauccacgccgaccagcugacgcccaccuggcggguguacuccaccggcagcaacgucuuccagacccgcgccgggugccucaucggcgcggagcacgugaacaacuccuacgagugcgacauccccaucggggccggcaucugcgccagcuaccagacgcagaccaacuccccgcggcgcgcccggagcguggcgucccagagcaucaucgccuacaccaugucccugggcgccgagaacagcgucgccuacuccaacaacagcaucgccauccccaccaacuucacgaucuccgugaccaccgagauccugcccgugagcaugaccaagacgagcgucgacugcaccauguacaucugcggggacuccaccgagugcagcaaccuccugcugcaguacggcuccuucugcacccagcucaaccgcgcgcugacggggaucgccguggagcaggacaagaacacccaggagguguucgcccaggucaagcagaucuacaagacgcccccgaucaaggacuucggcggguucaacuucagccagauccugcccgaccccuccaagcccagcaagcgguccuucaucgaggaccuccuguucaacaaggugacccuggccgacgccggcuucaucaagcaguacggcgacugccucggggacaucgcggcccgcgaccugaucugcgcccagaaguucaacggccugaccgugcucccgccccugcugaccgacgagaugaucgcccaguacaccagcgcccuccuggcggggaccaucacguccggcuggaccuucggggccggcgccgcccugcagauccccuucgcgaugcagauggccuaccgguucaacggcaucggggucacccagaacgugcucuacgagaaccagaagcugaucgccaaccaguucaacagcgccaucggcaagauccaggacucccugagcuccaccgccagcgcgcucgggaagcugcaggacguggucaaccagaacgcccaggcccugaacacgcucgugaagcagcuguccagcaacuucggcgccaucuccagcgugcugaacgacauccucucccgccuggacaaggucgaggccgaggugcagaucgaccggcugaucaccgggcgccuccagagccugcagaccuacgugacccagcagcugauccgggcggccgagauccgcgccagcgccaaccucgccgcgaccaagauguccgagugcguccugggccagagcaagcggguggacuucugcggcaagggguaccaccugauguccuucccccagagcgccccgcacggcguggucuuccuccacgugacguacguccccgcccaggagaagaacuucaccaccgcccccgcgaucugccacgacgggaaggcccacuucccccgcgagggcguguucguguccaacgggacccacugguucgucacgcagcggaacuucuacgagccgcagaucaucaccaccgacaacaccuucgugagcggcaacugcgacguggucaucggcaucgugaacaacacgguguacgacccccugcagcccgagcuggacuccuucaaggaggagcucgacaaguacuucaagaaccacaccagccccgacgucgaccugggggacaucuccggcaucaacgccagcguggugaacauccagaaggagaucgaccgccugaacgaggucgccaagaaccucaacgagucccugaucgaccugcaggagcucgggaaguacgagcaguacaucaaguggccgugguacaucuggcugggcuucaucgccggccugaucgcgaucgugauggugaccaucaugcucugcugcaugaccagcugcugcuccugccugaaggggugcugcagcugcggcuccugcugcaaguucgacgaggacgacagcgagcccguccugaagggggugaagcuccacuacacgugaggacuaguuauaagacugacuagcccgaugggccucccaacgggcccuccuccccuccuugcaccgagauuaauagaucucaaaggcucuuuucagagccaccaaaaaaaaaaaaaaaaaaaaaaaaaaaaaaaaaaaaaaaaaaaaaaaaaaaaaaaaaaaaaaaaaaaaaaaaaaaaaaaaaaaaaaaaaaaaaaaaaaaaa

SEQ ID NO: 24291 - RNA, 4041 nt, Artificial Sequence
  SARS-CoV-2/Wuhan/WIV05/2019__EPI_ISL_402128 spike protein mRNA gc (1-1273)(A222V_D614G)
aggagaaagcuuaccauguucguguuccugguccuccugccccuggugagcucccagugcgugaaccucaccacccgcacgcagcugccgcccgccuacaccaacagcuucacccggggcgucuacuaccccgacaagguguuccgcuccagcgugcugcacuccacccaggaccucuuccugcccuucuucagcaacgucacgugguuccacgccauccacguguccgggaccaacggcaccaagcgguucgacaacccggugcugcccuucaacgacggggucuacuucgcgagcaccgagaaguccaacaucauccgcggcuggaucuucgggacgacccucgacagcaagacccagucccugcugaucgugaacaacgccaccaacguggucaucaaggugugcgaguuccaguucugcaacgaccccuuccucggcguguacuaccacaagaacaacaagagcuggauggaguccgaguuccgggucuacagcuccgccaacaacugcacguucgaguacgugagccagcccuuccugauggaccuggagggcaagcaggggaacuucaagaaccuccgcgaguucguguucaagaacaucgacggcuacuucaagaucuacuccaagcacaccccgaucaaccugguccgggaccugccccagggguucagcguccucgagccccugguggaccugcccaucggcaucaacaucacccgcuuccagacccuccuggcccugcaccgguccuaccucacgccgggggacagcagcuccggcuggaccgcgggcgccgccgccuacuacgugggguaccugcagccccgcaccuuccugcucaaguacaacgagaacggcaccaucacggacgcggucgacugcgcccuggacccccugagcgagaccaagugcacccucaaguccuucaccguggagaaggggaucuaccagacgagcaacuuccgggugcagcccaccgaguccaucguccgcuucccgaacaucaccaaccugugccccuucggcgagguguucaacgccacccgguucgccagcgucuacgccuggaaccgcaagcggaucuccaacugcguggcggacuacagcgugcuguacaacuccgccagcuucuccacguucaagugcuacggcgucagccccaccaagcucaacgaccugugcuucaccaacguguacgccgacuccuucgugauccgcggggacgagguccggcagaucgcccccggccagaccgggaagaucgccgacuacaacuacaagcugccggacgacuucacgggcugcgugaucgcguggaacagcaacaaccucgacuccaaggucgggggcaacuacaacuaccuguaccgccuguuccgcaagagcaaccucaagcccuucgagcgggacaucuccaccgagaucuaccaggccggcagcacccccugcaacgggguggagggcuucaacugcuacuucccccugcaguccuacggguuccagccgaccaacggcgugggguaccagcccuaccggguggucgugcugagcuucgagcuccugcacgcccccgccacggugugcggccccaagaaguccaccaaccuggucaagaacaagugcgugaacuucaacuucaacggccucaccgggaccggcgugcugaccgagagcaacaagaaguuccugccguuccagcaguucgggcgcgacaucgccgacacgaccgacgcgguccgcgacccccagacccuggagauccucgacaucacccccugcagcuucggcgggguguccgugaucacgccgggcaccaacaccagcaaccaggucgccgugcuguaccagggcgugaacugcaccgagguccccguggccauccacgccgaccagcugacgcccaccuggcggguguacuccaccggcagcaacgucuuccagacccgcgccgggugccucaucggcgcggagcacgugaacaacuccuacgagugcgacauccccaucggggccggcaucugcgccagcuaccagacgcagaccaacuccccgcggcgcgcccggagcguggcgucccagagcaucaucgccuacaccaugucccugggcgccgagaacagcgucgccuacuccaacaacagcaucgccauccccaccaacuucacgaucuccgugaccaccgagauccugcccgugagcaugaccaagacgagcgucgacugcaccauguacaucugcggggacuccaccgagugcagcaaccuccugcugcaguacggcuccuucugcacccagcucaaccgcgcgcugacggggaucgccguggagcaggacaagaacacccaggagguguucgcccaggucaagcagaucuacaagacgcccccgaucaaggacuucggcggguucaacuucagccagauccugcccgaccccuccaagcccagcaagcgguccuucaucgaggaccuccuguucaacaaggugacccuggccgacgccggcuucaucaagcaguacggcgacugccucggggacaucgcggcccgcgaccugaucugcgcccagaaguucaacggccugaccgugcucccgccccugcugaccgacgagaugaucgcccaguacaccagcgcccuccuggcggggaccaucacguccggcuggaccuucggggccggcgccgcccugcagauccccuucgcgaugcagauggccuaccgguucaacggcaucggggucacccagaacgugcucuacgagaaccagaagcugaucgccaaccaguucaacagcgccaucggcaagauccaggacucccugagcuccaccgccagcgcgcucgggaagcugcaggacguggucaaccagaacgcccaggcccugaacacgcucgugaagcagcuguccagcaacuucggcgccaucuccagcgugcugaacgacauccucucccgccuggacaaggucgaggccgaggugcagaucgaccggcugaucaccgggcgccuccagagccugcagaccuacgugacccagcagcugauccgggcggccgagauccgcgccagcgccaaccucgccgcgaccaagauguccgagugcguccugggccagagcaagcggguggacuucugcggcaagggguaccaccugauguccuucccccagagcgccccgcacggcguggucuuccuccacgugacguacguccccgcccaggagaagaacuucaccaccgcccccgcgaucugccacgacgggaaggcccacuucccccgcgagggcguguucguguccaacgggacccacugguucgucacgcagcggaacuucuacgagccgcagaucaucaccaccgacaacaccuucgugagcggcaacugcgacguggucaucggcaucgugaacaacacgguguacgacccccugcagcccgagcuggacuccuucaaggaggagcucgacaaguacuucaagaaccacaccagccccgacgucgaccugggggacaucuccggcaucaacgccagcguggugaacauccagaaggagaucgaccgccugaacgaggucgccaagaaccucaacgagucccugaucgaccugcaggagcucgggaaguacgagcaguacaucaaguggccgugguacaucuggcugggcuucaucgccggccugaucgcgaucgugauggugaccaucaugcucugcugcaugaccagcugcugcuccugccugaaggggugcugcagcugcggcuccugcugcaaguucgacgaggacgacagcgagcccguccugaagggggugaagcuccacuacacgugaggacuaguuauaagacugacuagcccgaugggccucccaacgggcccuccuccccuccuugcaccgagauuaauagaucucaaaggcucuuuucagagccaccaaaaaaaaaaaaaaaaaaaaaaaaaaaaaaaaaaaaaaaaaaaaaaaaaaaaaaaaaaaaaaaaaaaaaaaaaaaaaaaaaaaaaaaaaaaaaaaaaaaaa

SEQ ID NO: 24292 - RNA, 4041 nt, Artificial Sequence
  SARS-CoV-2/Wuhan/WIV05/2019__EPI_ISL_402128 spike protein mRNA gc (1-1273)(N439K_D614G)
aggagaaagcuuaccauguucguguuccugguccuccugccccuggugagcucccagugcgugaaccucaccacccgcacgcagcugccgcccgccuacaccaacagcuucacccggggcgucuacuaccccgacaagguguuccgcuccagcgugcugcacuccacccaggaccucuuccugcccuucuucagcaacgucacgugguuccacgccauccacguguccgggaccaacggcaccaagcgguucgacaacccggugcugcccuucaacgacggggucuacuucgcgagcaccgagaaguccaacaucauccgcggcuggaucuucgggacgacccucgacagcaagacccagucccugcugaucgugaacaacgccaccaacguggucaucaaggugugcgaguuccaguucugcaacgaccccuuccucggcguguacuaccacaagaacaacaagagcuggauggaguccgaguuccgggucuacagcuccgccaacaacugcacguucgaguacgugagccagcccuuccugauggaccuggagggcaagcaggggaacuucaagaaccuccgcgaguucguguucaagaacaucgacggcuacuucaagaucuacuccaagcacaccccgaucaaccugguccgggaccugccccagggguucagcgcccucgagccccugguggaccugcccaucggcaucaacaucacccgcuuccagacccuccuggcccugcaccgguccuaccucacgccgggggacagcagcuccggcuggaccgcgggcgccgccgccuacuacgugggguaccugcagccccgcaccuuccugcucaaguacaacgagaacggcaccaucacggacgcggucgacugcgcccuggacccccugagcgagaccaagugcacccucaaguccuucaccguggagaaggggaucuaccagacgagcaacuuccgggugcagcccaccgaguccaucguccgcuucccgaacaucaccaaccugugccccuucggcgagguguucaacgccacccgguucgccagcgucuacgccuggaaccgcaagcggaucuccaacugcguggcggacuacagcgugcuguacaacuccgccagcuucuccacguucaagugcuacggcgucagccccaccaagcucaacgaccugugcuucaccaacguguacgccgacuccuucgugauccgcggggacgagguccggcagaucgcccccggccagaccgggaagaucgccgacuacaacuacaagcugccggacgacuucacgggcugcgugaucgcguggaacagcaagaaccucgacuccaaggucgggggcaacuacaacuaccuguaccgccuguuccgcaagagcaaccucaagcccuucgagcgggacaucuccaccgagaucuaccaggccggcagcacccccugcaacgggguggagggcuucaacugcuacuucccccugcaguccuacggguuccagccgaccaacggcgugggguaccagcccuaccggguggucgugcugagcuucgagcuccugcacgcccccgccacggugugcggccccaagaaguccaccaaccuggucaagaacaagugcgugaacuucaacuucaacggccucaccgggaccggcgugcugaccgagagcaacaagaaguuccugccguuccagcaguucgggcgcgacaucgccgacacgaccgacgcgguccgcgacccccagacccuggagauccucgacaucacccccugcagcuucggcgggguguccgugaucacgccgggcaccaacaccagcaaccaggucgccgugcuguaccagggcgugaacugcaccgagguccccguggccauccacgccgaccagcugacgcccaccuggcggguguacuccaccggcagcaacgucuuccagacccgcgccgggugccucaucggcgcggagcacgugaacaacuccuacgagugcgacauccccaucggggccggcaucugcgccagcuaccagacgcagaccaacuccccgcggcgcgcccggagcguggcgucccagagcaucaucgccuacaccaugucccugggcgccgagaacagcgucgccuacuccaacaacagcaucgccauccccaccaacuucacgaucuccgugaccaccgagauccugcccgugagcaugaccaagacgagcgucgacugcaccauguacaucugcggggacuccaccgagugcagcaaccuccugcugcaguacggcuccuucugcacccagcucaaccgcgcgcugacggggaucgccguggagcaggacaagaacacccaggagguguucgcccaggucaagcagaucuacaagacgcccccgaucaaggacuucggcggguucaacuucagccagauccugcccgaccccuccaagcccagcaagcgguccuucaucgaggaccuccuguucaacaaggugacccuggccgacgccggcuucaucaagcaguacggcgacugccucggggacaucgcggcccgcgaccugaucugcgcccagaaguucaacggccugaccgugcucccgccccugcugaccgacgagaugaucgcccaguacaccagcgcccuccuggcggggaccaucacguccggcuggaccuucggggccggcgccgcccugcagauccccuucgcgaugcagauggccuaccgguucaacggcaucggggucacccagaacgugcucuacgagaaccagaagcugaucgccaaccaguucaacagcgccaucggcaagauccaggacucccugagcuccaccgccagcgcgcucgggaagcugcaggacguggucaaccagaacgcccaggcccugaacacgcucgugaagcagcuguccagcaacuucggcgccaucuccagcgugcugaacgacauccucucccgccuggacaaggucgaggccgaggugcagaucgaccggcugaucaccgggcgccuccagagccugcagaccuacgugacccagcagcugauccgggcggccgagauccgcgccagcgccaaccucgccgcgaccaagauguccgagugcguccugggccagagcaagcggguggacuucugcggcaagggguaccaccugauguccuucccccagagcgccccgcacggcguggucuuccuccacgugacguacguccccgcccaggagaagaacuucaccaccgcccccgcgaucugccacgacgggaaggcccacuucccccgcgagggcguguucguguccaacgggacccacugguucgucacgcagcggaacuucuacgagccgcagaucaucaccaccgacaacaccuucgugagcggcaacugcgacguggucaucggcaucgugaacaacacgguguacgacccccugcagcccgagcuggacuccuucaaggaggagcucgacaaguacuucaagaaccacaccagccccgacgucgaccugggggacaucuccggcaucaacgccagcguggugaacauccagaaggagaucgaccgccugaacgaggucgccaagaaccucaacgagucccugaucgaccugcaggagcucgggaaguacgagcaguacaucaaguggccgugguacaucuggcugggcuucaucgccggccugaucgcgaucgugauggugaccaucaugcucugcugcaugaccagcugcugcuccugccugaaggggugcugcagcugcggcuccugcugcaaguucgacgaggacgacagcgagcccguccugaagggggugaagcuccacuacacgugaggacuaguuauaagacugacuagcccgaugggccucccaacgggcccuccuccccuccuugcaccgagauuaauagaucucaaaggcucuuuucagagccaccaaaaaaaaaaaaaaaaaaaaaaaaaaaaaaaaaaaaaaaaaaaaaaaaaaaaaaaaaaaaaaaaaaaaaaaaaaaaaaaaaaaaaaaaaaaaaaaaaaaaa

SEQ ID NO: 24293 - RNA, 4041 nt, Artificial Sequence
  SARS-CoV-2/Wuhan/WIV05/2019__EPI_ISL_402128 spike protein mRNA gc (1-1273)(S477N_D614G)
aggagaaagcuuaccauguucguguuccugguccuccugccccuggugagcucccagugcgugaaccucaccacccgcacgcagcugccgcccgccuacaccaacagcuucacccggggcgucuacuaccccgacaagguguuccgcuccagcgugcugcacuccacccaggaccucuuccugcccuucuucagcaacgucacgugguuccacgccauccacguguccgggaccaacggcaccaagcgguucgacaacccggugcugcccuucaacgacggggucuacuucgcgagcaccgagaaguccaacaucauccgcggcuggaucuucgggacgacccucgacagcaagacccagucccugcugaucgugaacaacgccaccaacguggucaucaaggugugcgaguuccaguucugcaacgaccccuuccucggcguguacuaccacaagaacaacaagagcuggauggaguccgaguuccgggucuacagcuccgccaacaacugcacguucgaguacgugagccagcccuuccugauggaccuggagggcaagcaggggaacuucaagaaccuccgcgaguucguguucaagaacaucgacggcuacuucaagaucuacuccaagcacaccccgaucaaccugguccgggaccugccccagggguucagcgcccucgagccccugguggaccugcccaucggcaucaacaucacccgcuuccagacccuccuggcccugcaccgguccuaccucacgccgggggacagcagcuccggcuggaccgcgggcgccgccgccuacuacgugggguaccugcagccccgcaccuuccugcucaaguacaacgagaacggcaccaucacggacgcggucgacugcgcccuggacccccugagcgagaccaagugcacccucaaguccuucaccguggagaaggggaucuaccagacgagcaacuuccgggugcagcccaccgaguccaucguccgcuucccgaacaucaccaaccugugccccuucggcgagguguucaacgccacccgguucgccagcgucuacgccuggaaccgcaagcggaucuccaacugcguggcggacuacagcgugcuguacaacuccgccagcuucuccacguucaagugcuacggcgucagccccaccaagcucaacgaccugugcuucaccaacguguacgccgacuccuucgugauccgcggggacgagguccggcagaucgcccccggccagaccgggaagaucgccgacuacaacuacaagcugccggacgacuucacgggcugcgugaucgcguggaacagcaacaaccucgacuccaaggucgggggcaacuacaacuaccuguaccgccuguuccgcaagagcaaccucaagcccuucgagcgggacaucuccaccgagaucuaccaggccggcaacacccccugcaacgggguggagggcuucaacugcuacuucccccugcaguccuacggguuccagccgaccaacggcgugggguaccagcccuaccggguggucgugcugagcuucgagcuccugcacgcccccgccacggugugcggccccaagaaguccaccaaccuggucaagaacaagugcgugaacuucaacuucaacggccucaccgggaccggcgugcugaccgagagcaacaagaaguuccugccguuccagcaguucgggcgcgacaucgccgacacgaccgacgcgguccgcgacccccagacccuggagauccucgacaucacccccugcagcuucggcgggguguccgugaucacgccgggcaccaacaccagcaaccaggucgccgugcuguaccagggcgugaacugcaccgagguccccguggccauccacgccgaccagcugacgcccaccuggcggguguacuccaccggcagcaacgucuuccagacccgcgccgggugccucaucggcgcggagcacgugaacaacuccuacgagugcgacauccccaucggggccggcaucugcgccagcuaccagacgcagaccaacuccccgcggcgcgcccggagcguggcgucccagagcaucaucgccuacaccaugucccugggcgccgagaacagcgucgccuacuccaacaacagcaucgccauccccaccaacuucacgaucuccgugaccaccgagauccugcccgugagcaugaccaagacgagcgucgacugcaccauguacaucugcggggacuccaccgagugcagcaaccuccugcugcaguacggcuccuucugcacccagcucaaccgcgcgcugacggggaucgccguggagcaggacaagaacacccaggagguguucgcccaggucaagcagaucuacaagacgcccccgaucaaggacuucggcggguucaacuucagccagauccugcccgaccccuccaagcccagcaagcgguccuucaucgaggaccuccuguucaacaaggugacccuggccgacgccggcuucaucaagcaguacggcgacugccucggggacaucgcggcccgcgaccugaucugcgcccagaaguucaacggccugaccgugcucccgccccugcugaccgacgagaugaucgcccaguacaccagcgcccuccuggcggggaccaucacguccggcuggaccuucggggccggcgccgcccugcagauccccuucgcgaugcagauggccuaccgguucaacggcaucggggucacccagaacgugcucuacgagaaccagaagcugaucgccaaccaguucaacagcgccaucggcaagauccaggacucccugagcuccaccgccagcgcgcucgggaagcugcaggacguggucaaccagaacgcccaggcccugaacacgcucgugaagcagcuguccagcaacuucggcgccaucuccagcgugcugaacgacauccucucccgccuggacaaggucgaggccgaggugcagaucgaccggcugaucaccgggcgccuccagagccugcagaccuacgugacccagcagcugauccgggcggccgagauccgcgccagcgccaaccucgccgcgaccaagauguccgagugcguccugggccagagcaagcggguggacuucugcggcaagggguaccaccugauguccuucccccagagcgccccgcacggcguggucuuccuccacgugacguacguccccgcccaggagaagaacuucaccaccgcccccgcgaucugccacgacgggaaggcccacuucccccgcgagggcguguucguguccaacgggacccacugguucgucacgcagcggaacuucuacgagccgcagaucaucaccaccgacaacaccuucgugagcggcaacugcgacguggucaucggcaucgugaacaacacgguguacgacccccugcagcccgagcuggacuccuucaaggaggagcucgacaaguacuucaagaaccacaccagccccgacgucgaccugggggacaucuccggcaucaacgccagcguggugaacauccagaaggagaucgaccgccugaacgaggucgccaagaaccucaacgagucccugaucgaccugcaggagcucgggaaguacgagcaguacaucaaguggccgugguacaucuggcugggcuucaucgccggccugaucgcgaucgugauggugaccaucaugcucugcugcaugaccagcugcugcuccugccugaaggggugcugcagcugcggcuccugcugcaaguucgacgaggacgacagcgagcccguccugaagggggugaagcuccacuacacgugaggacuaguuauaagacugacuagcccgaugggccucccaacgggcccuccuccccuccuugcaccgagauuaauagaucucaaaggcucuuuucagagccaccaaaaaaaaaaaaaaaaaaaaaaaaaaaaaaaaaaaaaaaaaaaaaaaaaaaaaaaaaaaaaaaaaaaaaaaaaaaaaaaaaaaaaaaaaaaaaaaaaaaaa

SEQ ID NO: 24294 - RNA, 4041 nt, Artificial Sequence
  SARS-CoV-2/Wuhan/WIV05/2019__EPI_ISL_402128 spike protein mRNA gc (1-1273)(N501Y_D614G)
aggagaaagcuuaccauguucguguuccugguccuccugccccuggugagcucccagugcgugaaccucaccacccgcacgcagcugccgcccgccuacaccaacagcuucacccggggcgucuacuaccccgacaagguguuccgcuccagcgugcugcacuccacccaggaccucuuccugcccuucuucagcaacgucacgugguuccacgccauccacguguccgggaccaacggcaccaagcgguucgacaacccggugcugcccuucaacgacggggucuacuucgcgagcaccgagaaguccaacaucauccgcggcuggaucuucgggacgacccucgacagcaagacccagucccugcugaucgugaacaacgccaccaacguggucaucaaggugugcgaguuccaguucugcaacgaccccuuccucggcguguacuaccacaagaacaacaagagcuggauggaguccgaguuccgggucuacagcuccgccaacaacugcacguucgaguacgugagccagcccuuccugauggaccuggagggcaagcaggggaacuucaagaaccuccgcgaguucguguucaagaacaucgacggcuacuucaagaucuacuccaagcacaccccgaucaaccugguccgggaccugccccagggguucagcgcccucgagccccugguggaccugcccaucggcaucaacaucacccgcuuccagacccuccuggcccugcaccgguccuaccucacgccgggggacagcagcuccggcuggaccgcgggcgccgccgccuacuacgugggguaccugcagccccgcaccuuccugcucaaguacaacgagaacggcaccaucacggacgcggucgacugcgcccuggacccccugagcgagaccaagugcacccucaaguccuucaccguggagaaggggaucuaccagacgagcaacuuccgggugcagcccaccgaguccaucguccgcuucccgaacaucaccaaccugugccccuucggcgagguguucaacgccacccgguucgccagcgucuacgccuggaaccgcaagcggaucuccaacugcguggcggacuacagcgugcuguacaacuccgccagcuucuccacguucaagugcuacggcgucagccccaccaagcucaacgaccugugcuucaccaacguguacgccgacuccuucgugauccgcggggacgagguccggcagaucgcccccggccagaccgggaagaucgccgacuacaacuacaagcugccggacgacuucacgggcugcgugaucgcguggaacagcaacaaccucgacuccaaggucgggggcaacuacaacuaccuguaccgccuguuccgcaagagcaaccucaagcccuucgagcgggacaucuccaccgagaucuaccaggccggcagcacccccugcaacgggguggagggcuucaacugcuacuucccccugcaguccuacggguuccagccgaccuacggcgugggguaccagcccuaccggguggucgugcugagcuucgagcuccugcacgcccccgccacggugugcggccccaagaaguccaccaaccuggucaagaacaagugcgugaacuucaacuucaacggccucaccgggaccggcgugcugaccgagagcaacaagaaguuccugccguuccagcaguucgggcgcgacaucgccgacacgaccgacgcgguccgcgacccccagacccuggagauccucgacaucacccccugcagcuucggcgggguguccgugaucacgccgggcaccaacaccagcaaccaggucgccgugcuguaccagggcgugaacugcaccgagguccccguggccauccacgccgaccagcugacgcccaccuggcggguguacuccaccggcagcaacgucuuccagacccgcgccgggugccucaucggcgcggagcacgugaacaacuccuacgagugcgacauccccaucggggccggcaucugcgccagcuaccagacgcagaccaacuccccgcggcgcgcccggagcguggcgucccagagcaucaucgccuacaccaugucccugggcgccgagaacagcgucgccuacuccaacaacagcaucgccauccccaccaacuucacgaucuccgugaccaccgagauccugcccgugagcaugaccaagacgagcgucgacugcaccauguacaucugcggggacuccaccgagugcagcaaccuccugcugcaguacggcuccuucugcacccagcucaaccgcgcgcugacggggaucgccguggagcaggacaagaacacccaggagguguucgcccaggucaagcagaucuacaagacgcccccgaucaaggacuucggcggguucaacuucagccagauccugcccgaccccuccaagcccagcaagcgguccuucaucgaggaccuccuguucaacaaggugacccuggccgacgccggcuucaucaagcaguacggcgacugccucggggacaucgcggcccgcgaccugaucugcgcccagaaguucaacggccugaccgugcucccgccccugcugaccgacgagaugaucgcccaguacaccagcgcccuccuggcggggaccaucacguccggcuggaccuucggggccggcgccgcccugcagauccccuucgcgaugcagauggccuaccgguucaacggcaucggggucacccagaacgugcucuacgagaaccagaagcugaucgccaaccaguucaacagcgccaucggcaagauccaggacucccugagcuccaccgccagcgcgcucgggaagcugcaggacguggucaaccagaacgcccaggcccugaacacgcucgugaagcagcuguccagcaacuucggcgccaucuccagcgugcugaacgacauccucucccgccuggacaaggucgaggccgaggugcagaucgaccggcugaucaccgggcgccuccagagccugcagaccuacgugacccagcagcugauccgggcggccgagauccgcgccagcgccaaccucgccgcgaccaagauguccgagugcguccugggccagagcaagcggguggacuucugcggcaagggguaccaccugauguccuucccccagagcgccccgcacggcguggucuuccuccacgugacguacguccccgcccaggagaagaacuucaccaccgcccccgcgaucugccacgacgggaaggcccacuucccccgcgagggcguguucguguccaacgggacccacugguucgucacgcagcggaacuucuacgagccgcagaucaucaccaccgacaacaccuucgugagcggcaacugcgacguggucaucggcaucgugaacaacacgguguacgacccccugcagcccgagcuggacuccuucaaggaggagcucgacaaguacuucaagaaccacaccagccccgacgucgaccugggggacaucuccggcaucaacgccagcguggugaacauccagaaggagaucgaccgccugaacgaggucgccaagaaccucaacgagucccugaucgaccugcaggagcucgggaaguacgagcaguacaucaaguggccgugguacaucuggcugggcuucaucgccggccugaucgcgaucgugauggugaccaucaugcucugcugcaugaccagcugcugcuccugccugaaggggugcugcagcugcggcuccugcugcaaguucgacgaggacgacagcgagcccguccugaagggggugaagcuccacuacacgugaggacuaguuauaagacugacuagcccgaugggccucccaacgggcccuccuccccuccuugcaccgagauuaauagaucucaaaggcucuuuucagagccaccaaaaaaaaaaaaaaaaaaaaaaaaaaaaaaaaaaaaaaaaaaaaaaaaaaaaaaaaaaaaaaaaaaaaaaaaaaaaaaaaaaaaaaaaaaaaaaaaaaaaa

SEQ ID NO: 24295 - RNA, 4035 nt, Artificial Sequence
  SARS-CoV-2/Wuhan/WIV05/2019__EPI_ISL_402128 spike protein mRNA gc (1-1273)(H69del_V70del_D614G)
aggagaaagcuuaccauguucguguuccugguccuccugccccuggugagcucccagugcgugaaccucaccacccgcacgcagcugccgcccgccuacaccaacagcuucacccggggcgucuacuaccccgacaagguguuccgcuccagcgugcugcacuccacccaggaccucuuccugcccuucuucagcaacgucacgugguuccacgccaucuccgggaccaacggcaccaagcgguucgacaacccggugcugcccuucaacgacggggucuacuucgcgagcaccgagaaguccaacaucauccgcggcuggaucuucgggacgacccucgacagcaagacccagucccugcugaucgugaacaacgccaccaacguggucaucaaggugugcgaguuccaguucugcaacgaccccuuccucggcguguacuaccacaagaacaacaagagcuggauggaguccgaguuccgggucuacagcuccgccaacaacugcacguucgaguacgugagccagcccuuccugauggaccuggagggcaagcaggggaacuucaagaaccuccgcgaguucguguucaagaacaucgacggcuacuucaagaucuacuccaagcacaccccgaucaaccugguccgggaccugccccagggguucagcgcccucgagccccugguggaccugcccaucggcaucaacaucacccgcuuccagacccuccuggcccugcaccgguccuaccucacgccgggggacagcagcuccggcuggaccgcgggcgccgccgccuacuacgugggguaccugcagccccgcaccuuccugcucaaguacaacgagaacggcaccaucacggacgcggucgacugcgcccuggacccccugagcgagaccaagugcacccucaaguccuucaccguggagaaggggaucuaccagacgagcaacuuccgggugcagcccaccgaguccaucguccgcuucccgaacaucaccaaccugugccccuucggcgagguguucaacgccacccgguucgccagcgucuacgccuggaaccgcaagcggaucuccaacugcguggcggacuacagcgugcuguacaacuccgccagcuucuccacguucaagugcuacggcgucagccccaccaagcucaacgaccugugcuucaccaacguguacgccgacuccuucgugauccgcggggacgagguccggcagaucgcccccggccagaccgggaagaucgccgacuacaacuacaagcugccggacgacuucacgggcugcgugaucgcguggaacagcaacaaccucgacuccaaggucgggggcaacuacaacuaccuguaccgccuguuccgcaagagcaaccucaagcccuucgagcgggacaucuccaccgagaucuaccaggccggcagcacccccugcaacgggguggagggcuucaacugcuacuucccccugcaguccuacggguuccagccgaccaacggcgugggguaccagcccuaccggguggucgugcugagcuucgagcuccugcacgcccccgccacggugugcggccccaagaaguccaccaaccuggucaagaacaagugcgugaacuucaacuucaacggccucaccgggaccggcgugcugaccgagagcaacaagaaguuccugccguuccagcaguucgggcgcgacaucgccgacacgaccgacgcgguccgcgacccccagacccuggagauccucgacaucacccccugcagcuucggcgggguguccgugaucacgccgggcaccaacaccagcaaccaggucgccgugcuguaccagggcgugaacugcaccgagguccccguggccauccacgccgaccagcugacgcccaccuggcggguguacuccaccggcagcaacgucuuccagacccgcgccgggugccucaucggcgcggagcacgugaacaacuccuacgagugcgacauccccaucggggccggcaucugcgccagcuaccagacgcagaccaacuccccgcggcgcgcccggagcguggcgucccagagcaucaucgccuacaccaugucccugggcgccgagaacagcgucgccuacuccaacaacagcaucgccauccccaccaacuucacgaucuccgugaccaccgagauccugcccgugagcaugaccaagacgagcgucgacugcaccauguacaucugcggggacuccaccgagugcagcaaccuccugcugcaguacggcuccuucugcacccagcucaaccgcgcgcugacggggaucgccguggagcaggacaagaacacccaggagguguucgcccaggucaagcagaucuacaagacgcccccgaucaaggacuucggcggguucaacuucagccagauccugcccgaccccuccaagcccagcaagcgguccuucaucgaggaccuccuguucaacaaggugacccuggccgacgccggcuucaucaagcaguacggcgacugccucggggacaucgcggcccgcgaccugaucugcgcccagaaguucaacggccugaccgugcucccgccccugcugaccgacgagaugaucgcccaguacaccagcgcccuccuggcggggaccaucacguccggcuggaccuucggggccggcgccgcccugcagauccccuucgcgaugcagauggccuaccgguucaacggcaucggggucacccagaacgugcucuacgagaaccagaagcugaucgccaaccaguucaacagcgccaucggcaagauccaggacucccugagcuccaccgccagcgcgcucgggaagcugcaggacguggucaaccagaacgcccaggcccugaacacgcucgugaagcagcuguccagcaacuucggcgccaucuccagcgugcugaacgacauccucucccgccuggacaaggucgaggccgaggugcagaucgaccggcugaucaccgggcgccuccagagccugcagaccuacgugacccagcagcugauccgggcggccgagauccgcgccagcgccaaccucgccgcgaccaagauguccgagugcguccugggccagagcaagcggguggacuucugcggcaagggguaccaccugauguccuucccccagagcgccccgcacggcguggucuuccuccacgugacguacguccccgcccaggagaagaacuucaccaccgcccccgcgaucugccacgacgggaaggcccacuucccccgcgagggcguguucguguccaacgggacccacugguucgucacgcagcggaacuucuacgagccgcagaucaucaccaccgacaacaccuucgugagcggcaacugcgacguggucaucggcaucgugaacaacacgguguacgacccccugcagcccgagcuggacuccuucaaggaggagcucgacaaguacuucaagaaccacaccagccccgacgucgaccugggggacaucuccggcaucaacgccagcguggugaacauccagaaggagaucgaccgccugaacgaggucgccaagaaccucaacgagucccugaucgaccugcaggagcucgggaaguacgagcaguacaucaaguggccgugguacaucuggcugggcuucaucgccggccugaucgcgaucgugauggugaccaucaugcucugcugcaugaccagcugcugcuccugccugaaggggugcugcagcugcggcuccugcugcaaguucgacgaggacgacagcgagcccguccugaagggggugaagcuccacuacacgugaggacuaguuauaagacugacuagcccgaugggccucccaacgggcccuccuccccuccuugcaccgagauuaauagaucucaaaggcucuuuucagagccaccaaaaaaaaaaaaaaaaaaaaaaaaaaaaaaaaaaaaaaaaaaaaaaaaaaaaaaaaaaaaaaaaaaaaaaaaaaaaaaaaaaaaaaaaaaaaaaaaaaaaa

SEQ ID NO: 24296 - RNA, 4041 nt, Artificial Sequence
  SARS-CoV-2/Wuhan/WIV05/2019__EPI_ISL_402128 spike protein mRNA gc (1-1273)(Y453F_D614G)
aggagaaagcuuaccauguucguguuccugguccuccugccccuggugagcucccagugcgugaaccucaccacccgcacgcagcugccgcccgccuacaccaacagcuucacccggggcgucuacuaccccgacaagguguuccgcuccagcgugcugcacuccacccaggaccucuuccugcccuucuucagcaacgucacgugguuccacgccauccacguguccgggaccaacggcaccaagcgguucgacaacccggugcugcccuucaacgacggggucuacuucgcgagcaccgagaaguccaacaucauccgcggcuggaucuucgggacgacccucgacagcaagacccagucccugcugaucgugaacaacgccaccaacguggucaucaaggugugcgaguuccaguucugcaacgaccccuuccucggcguguacuaccacaagaacaacaagagcuggauggaguccgaguuccgggucuacagcuccgccaacaacugcacguucgaguacgugagccagcccuuccugauggaccuggagggcaagcaggggaacuucaagaaccuccgcgaguucguguucaagaacaucgacggcuacuucaagaucuacuccaagcacaccccgaucaaccugguccgggaccugccccagggguucagcgcccucgagccccugguggaccugcccaucggcaucaacaucacccgcuuccagacccuccuggcccugcaccgguccuaccucacgccgggggacagcagcuccggcuggaccgcgggcgccgccgccuacuacgugggguaccugcagccccgcaccuuccugcucaaguacaacgagaacggcaccaucacggacgcggucgacugcgcccuggacccccugagcgagaccaagugcacccucaaguccuucaccguggagaaggggaucuaccagacgagcaacuuccgggugcagcccaccgaguccaucguccgcuucccgaacaucaccaaccugugccccuucggcgagguguucaacgccacccgguucgccagcgucuacgccuggaaccgcaagcggaucuccaacugcguggcggacuacagcgugcuguacaacuccgccagcuucuccacguucaagugcuacggcgucagccccaccaagcucaacgaccugugcuucaccaacguguacgccgacuccuucgugauccgcggggacgagguccggcagaucgcccccggccagaccgggaagaucgccgacuacaacuacaagcugccggacgacuucacgggcugcgugaucgcguggaacagcaacaaccucgacuccaaggucgggggcaacuacaacuaccuguuccgccuguuccgcaagagcaaccucaagcccuucgagcgggacaucuccaccgagaucuaccaggccggcagcacccccugcaacgggguggagggcuucaacugcuacuucccccugcaguccuacggguuccagccgaccaacggcgugggguaccagcccuaccggguggucgugcugagcuucgagcuccugcacgcccccgccacggugugcggccccaagaaguccaccaaccuggucaagaacaagugcgugaacuucaacuucaacggccucaccgggaccggcgugcugaccgagagcaacaagaaguuccugccguuccagcaguucgggcgcgacaucgccgacacgaccgacgcgguccgcgacccccagacccuggagauccucgacaucacccccugcagcuucggcgggguguccgugaucacgccgggcaccaacaccagcaaccaggucgccgugcuguaccagggcgugaacugcaccgagguccccguggccauccacgccgaccagcugacgcccaccuggcggguguacuccaccggcagcaacgucuuccagacccgcgccgggugccucaucggcgcggagcacgugaacaacuccuacgagugcgacauccccaucggggccggcaucugcgccagcuaccagacgcagaccaacuccccgcggcgcgcccggagcguggcgucccagagcaucaucgccuacaccaugucccugggcgccgagaacagcgucgccuacuccaacaacagcaucgccauccccaccaacuucacgaucuccgugaccaccgagauccugcccgugagcaugaccaagacgagcgucgacugcaccauguacaucugcggggacuccaccgagugcagcaaccuccugcugcaguacggcuccuucugcacccagcucaaccgcgcgcugacggggaucgccguggagcaggacaagaacacccaggagguguucgcccaggucaagcagaucuacaagacgcccccgaucaaggacuucggcggguucaacuucagccagauccugcccgaccccuccaagcccagcaagcgguccuucaucgaggaccuccuguucaacaaggugacccuggccgacgccggcuucaucaagcaguacggcgacugccucggggacaucgcggcccgcgaccugaucugcgcccagaaguucaacggccugaccgugcucccgccccugcugaccgacgagaugaucgcccaguacaccagcgcccuccuggcggggaccaucacguccggcuggaccuucggggccggcgccgcccugcagauccccuucgcgaugcagauggccuaccgguucaacggcaucggggucacccagaacgugcucuacgagaaccagaagcugaucgccaaccaguucaacagcgccaucggcaagauccaggacucccugagcuccaccgccagcgcgcucgggaagcugcaggacguggucaaccagaacgcccaggcccugaacacgcucgugaagcagcuguccagcaacuucggcgccaucuccagcgugcugaacgacauccucucccgccuggacaaggucgaggccgaggugcagaucgaccggcugaucaccgggcgccuccagagccugcagaccuacgugacccagcagcugauccgggcggccgagauccgcgccagcgccaaccucgccgcgaccaagauguccgagugcguccugggccagagcaagcggguggacuucugcggcaagggguaccaccugauguccuucccccagagcgccccgcacggcguggucuuccuccacgugacguacguccccgcccaggagaagaacuucaccaccgcccccgcgaucugccacgacgggaaggcccacuucccccgcgagggcguguucguguccaacgggacccacugguucgucacgcagcggaacuucuacgagccgcagaucaucaccaccgacaacaccuucgugagcggcaacugcgacguggucaucggcaucgugaacaacacgguguacgacccccugcagcccgagcuggacuccuucaaggaggagcucgacaaguacuucaagaaccacaccagccccgacgucgaccugggggacaucuccggcaucaacgccagcguggugaacauccagaaggagaucgaccgccugaacgaggucgccaagaaccucaacgagucccugaucgaccugcaggagcucgggaaguacgagcaguacaucaaguggccgugguacaucuggcugggcuucaucgccggccugaucgcgaucgugauggugaccaucaugcucugcugcaugaccagcugcugcuccugccugaaggggugcugcagcugcggcuccugcugcaaguucgacgaggacgacagcgagcccguccugaagggggugaagcuccacuacacgugaggacuaguuauaagacugacuagcccgaugggccucccaacgggcccuccuccccuccuugcaccgagauuaauagaucucaaaggcucuuuucagagccaccaaaaaaaaaaaaaaaaaaaaaaaaaaaaaaaaaaaaaaaaaaaaaaaaaaaaaaaaaaaaaaaaaaaaaaaaaaaaaaaaaaaaaaaaaaaaaaaaaaaaa

SEQ ID NO: 24297 - RNA, 4041 nt, Artificial Sequence
  SARS-CoV-2/Wuhan/WIV05/2019__EPI_ISL_402128 spike protein mRNA gc (1-1273)(D614G_I692V)
aggagaaagcuuaccauguucguguuccugguccuccugccccuggugagcucccagugcgugaaccucaccacccgcacgcagcugccgcccgccuacaccaacagcuucacccggggcgucuacuaccccgacaagguguuccgcuccagcgugcugcacuccacccaggaccucuuccugcccuucuucagcaacgucacgugguuccacgccauccacguguccgggaccaacggcaccaagcgguucgacaacccggugcugcccuucaacgacggggucuacuucgcgagcaccgagaaguccaacaucauccgcggcuggaucuucgggacgacccucgacagcaagacccagucccugcugaucgugaacaacgccaccaacguggucaucaaggugugcgaguuccaguucugcaacgaccccuuccucggcguguacuaccacaagaacaacaagagcuggauggaguccgaguuccgggucuacagcuccgccaacaacugcacguucgaguacgugagccagcccuuccugauggaccuggagggcaagcaggggaacuucaagaaccuccgcgaguucguguucaagaacaucgacggcuacuucaagaucuacuccaagcacaccccgaucaaccugguccgggaccugccccagggguucagcgcccucgagccccugguggaccugcccaucggcaucaacaucacccgcuuccagacccuccuggcccugcaccgguccuaccucacgccgggggacagcagcuccggcuggaccgcgggcgccgccgccuacuacgugggguaccugcagccccgcaccuuccugcucaaguacaacgagaacggcaccaucacggacgcggucgacugcgcccuggacccccugagcgagaccaagugcacccucaaguccuucaccguggagaaggggaucuaccagacgagcaacuuccgggugcagcccaccgaguccaucguccgcuucccgaacaucaccaaccugugccccuucggcgagguguucaacgccacccgguucgccagcgucuacgccuggaaccgcaagcggaucuccaacugcguggcggacuacagcgugcuguacaacuccgccagcuucuccacguucaagugcuacggcgucagccccaccaagcucaacgaccugugcuucaccaacguguacgccgacuccuucgugauccgcggggacgagguccggcagaucgcccccggccagaccgggaagaucgccgacuacaacuacaagcugccggacgacuucacgggcugcgugaucgcguggaacagcaacaaccucgacuccaaggucgggggcaacuacaacuaccuguaccgccuguuccgcaagagcaaccucaagcccuucgagcgggacaucuccaccgagaucuaccaggccggcagcacccccugcaacgggguggagggcuucaacugcuacuucccccugcaguccuacggguuccagccgaccaacggcgugggguaccagcccuaccggguggucgugcugagcuucgagcuccugcacgcccccgccacggugugcggccccaagaaguccaccaaccuggucaagaacaagugcgugaacuucaacuucaacggccucaccgggaccggcgugcugaccgagagcaacaagaaguuccugccguuccagcaguucgggcgcgacaucgccgacacgaccgacgcgguccgcgacccccagacccuggagauccucgacaucacccccugcagcuucggcgggguguccgugaucacgccgggcaccaacaccagcaaccaggucgccgugcuguaccagggcgugaacugcaccgagguccccguggccauccacgccgaccagcugacgcccaccuggcggguguacuccaccggcagcaacgucuuccagacccgcgccgggugccucaucggcgcggagcacgugaacaacuccuacgagugcgacauccccaucggggccggcaucugcgccagcuaccagacgcagaccaacuccccgcggcgcgcccggagcguggcgucccagagcgucaucgccuacaccaugucccugggcgccgagaacagcgucgccuacuccaacaacagcaucgccauccccaccaacuucacgaucuccgugaccaccgagauccugcccgugagcaugaccaagacgagcgucgacugcaccauguacaucugcggggacuccaccgagugcagcaaccuccugcugcaguacggcuccuucugcacccagcucaaccgcgcgcugacggggaucgccguggagcaggacaagaacacccaggagguguucgcccaggucaagcagaucuacaagacgcccccgaucaaggacuucggcggguucaacuucagccagauccugcccgaccccuccaagcccagcaagcgguccuucaucgaggaccuccuguucaacaaggugacccuggccgacgccggcuucaucaagcaguacggcgacugccucggggacaucgcggcccgcgaccugaucugcgcccagaaguucaacggccugaccgugcucccgccccugcugaccgacgagaugaucgcccaguacaccagcgcccuccuggcggggaccaucacguccggcuggaccuucggggccggcgccgcccugcagauccccuucgcgaugcagauggccuaccgguucaacggcaucggggucacccagaacgugcucuacgagaaccagaagcugaucgccaaccaguucaacagcgccaucggcaagauccaggacucccugagcuccaccgccagcgcgcucgggaagcugcaggacguggucaaccagaacgcccaggcccugaacacgcucgugaagcagcuguccagcaacuucggcgccaucuccagcgugcugaacgacauccucucccgccuggacaaggucgaggccgaggugcagaucgaccggcugaucaccgggcgccuccagagccugcagaccuacgugacccagcagcugauccgggcggccgagauccgcgccagcgccaaccucgccgcgaccaagauguccgagugcguccugggccagagcaagcggguggacuucugcggcaagggguaccaccugauguccuucccccagagcgccccgcacggcguggucuuccuccacgugacguacguccccgcccaggagaagaacuucaccaccgcccccgcgaucugccacgacgggaaggcccacuucccccgcgagggcguguucguguccaacgggacccacugguucgucacgcagcggaacuucuacgagccgcagaucaucaccaccgacaacaccuucgugagcggcaacugcgacguggucaucggcaucgugaacaacacgguguacgacccccugcagcccgagcuggacuccuucaaggaggagcucgacaaguacuucaagaaccacaccagccccgacgucgaccugggggacaucuccggcaucaacgccagcguggugaacauccagaaggagaucgaccgccugaacgaggucgccaagaaccucaacgagucccugaucgaccugcaggagcucgggaaguacgagcaguacaucaaguggccgugguacaucuggcugggcuucaucgccggccugaucgcgaucgugauggugaccaucaugcucugcugcaugaccagcugcugcuccugccugaaggggugcugcagcugcggcuccugcugcaaguucgacgaggacgacagcgagcccguccugaagggggugaagcuccacuacacgugaggacuaguuauaagacugacuagcccgaugggccucccaacgggcccuccuccccuccuugcaccgagauuaauagaucucaaaggcucuuuucagagccaccaaaaaaaaaaaaaaaaaaaaaaaaaaaaaaaaaaaaaaaaaaaaaaaaaaaaaaaaaaaaaaaaaaaaaaaaaaaaaaaaaaaaaaaaaaaaaaaaaaaaa

SEQ ID NO: 24298 - RNA, 4041 nt, Artificial Sequence
  SARS-CoV-2/Wuhan/WIV05/2019__EPI_ISL_402128 spike protein mRNA gc (1-1273)(D614G_M1229I)
aggagaaagcuuaccauguucguguuccugguccuccugccccuggugagcucccagugcgugaaccucaccacccgcacgcagcugccgcccgccuacaccaacagcuucacccggggcgucuacuaccccgacaagguguuccgcuccagcgugcugcacuccacccaggaccucuuccugcccuucuucagcaacgucacgugguuccacgccauccacguguccgggaccaacggcaccaagcgguucgacaacccggugcugcccuucaacgacggggucuacuucgcgagcaccgagaaguccaacaucauccgcggcuggaucuucgggacgacccucgacagcaagacccagucccugcugaucgugaacaacgccaccaacguggucaucaaggugugcgaguuccaguucugcaacgaccccuuccucggcguguacuaccacaagaacaacaagagcuggauggaguccgaguuccgggucuacagcuccgccaacaacugcacguucgaguacgugagccagcccuuccugauggaccuggagggcaagcaggggaacuucaagaaccuccgcgaguucguguucaagaacaucgacggcuacuucaagaucuacuccaagcacaccccgaucaaccugguccgggaccugccccagggguucagcgcccucgagccccugguggaccugcccaucggcaucaacaucacccgcuuccagacccuccuggcccugcaccgguccuaccucacgccgggggacagcagcuccggcuggaccgcgggcgccgccgccuacuacgugggguaccugcagccccgcaccuuccugcucaaguacaacgagaacggcaccaucacggacgcggucgacugcgcccuggacccccugagcgagaccaagugcacccucaaguccuucaccguggagaaggggaucuaccagacgagcaacuuccgggugcagcccaccgaguccaucguccgcuucccgaacaucaccaaccugugccccuucggcgagguguucaacgccacccgguucgccagcgucuacgccuggaaccgcaagcggaucuccaacugcguggcggacuacagcgugcuguacaacuccgccagcuucuccacguucaagugcuacggcgucagccccaccaagcucaacgaccugugcuucaccaacguguacgccgacuccuucgugauccgcggggacgagguccggcagaucgcccccggccagaccgggaagaucgccgacuacaacuacaagcugccggacgacuucacgggcugcgugaucgcguggaacagcaacaaccucgacuccaaggucgggggcaacuacaacuaccuguaccgccuguuccgcaagagcaaccucaagcccuucgagcgggacaucuccaccgagaucuaccaggccggcagcacccccugcaacgggguggagggcuucaacugcuacuucccccugcaguccuacggguuccagccgaccaacggcgugggguaccagcccuaccggguggucgugcugagcuucgagcuccugcacgcccccgccacggugugcggccccaagaaguccaccaaccuggucaagaacaagugcgugaacuucaacuucaacggccucaccgggaccggcgugcugaccgagagcaacaagaaguuccugccguuccagcaguucgggcgcgacaucgccgacacgaccgacgcgguccgcgacccccagacccuggagauccucgacaucacccccugcagcuucggcgggguguccgugaucacgccgggcaccaacaccagcaaccaggucgccgugcuguaccagggcgugaacugcaccgagguccccguggccauccacgccgaccagcugacgcccaccuggcggguguacuccaccggcagcaacgucuuccagacccgcgccgggugccucaucggcgcggagcacgugaacaacuccuacgagugcgacauccccaucggggccggcaucugcgccagcuaccagacgcagaccaacuccccgcggcgcgcccggagcguggcgucccagagcaucaucgccuacaccaugucccugggcgccgagaacagcgucgccuacuccaacaacagcaucgccauccccaccaacuucacgaucuccgugaccaccgagauccugcccgugagcaugaccaagacgagcgucgacugcaccauguacaucugcggggacuccaccgagugcagcaaccuccugcugcaguacggcuccuucugcacccagcucaaccgcgcgcugacggggaucgccguggagcaggacaagaacacccaggagguguucgcccaggucaagcagaucuacaagacgcccccgaucaaggacuucggcggguucaacuucagccagauccugcccgaccccuccaagcccagcaagcgguccuucaucgaggaccuccuguucaacaaggugacccuggccgacgccggcuucaucaagcaguacggcgacugccucggggacaucgcggcccgcgaccugaucugcgcccagaaguucaacggccugaccgugcucccgccccugcugaccgacgagaugaucgcccaguacaccagcgcccuccuggcggggaccaucacguccggcuggaccuucggggccggcgccgcccugcagauccccuucgcgaugcagauggccuaccgguucaacggcaucggggucacccagaacgugcucuacgagaaccagaagcugaucgccaaccaguucaacagcgccaucggcaagauccaggacucccugagcuccaccgccagcgcgcucgggaagcugcaggacguggucaaccagaacgcccaggcccugaacacgcucgugaagcagcuguccagcaacuucggcgccaucuccagcgugcugaacgacauccucucccgccuggacaaggucgaggccgaggugcagaucgaccggcugaucaccgggcgccuccagagccugcagaccuacgugacccagcagcugauccgggcggccgagauccgcgccagcgccaaccucgccgcgaccaagauguccgagugcguccugggccagagcaagcggguggacuucugcggcaagggguaccaccugauguccuucccccagagcgccccgcacggcguggucuuccuccacgugacguacguccccgcccaggagaagaacuucaccaccgcccccgcgaucugccacgacgggaaggcccacuucccccgcgagggcguguucguguccaacgggacccacugguucgucacgcagcggaacuucuacgagccgcagaucaucaccaccgacaacaccuucgugagcggcaacugcgacguggucaucggcaucgugaacaacacgguguacgacccccugcagcccgagcuggacuccuucaaggaggagcucgacaaguacuucaagaaccacaccagccccgacgucgaccugggggacaucuccggcaucaacgccagcguggugaacauccagaaggagaucgaccgccugaacgaggucgccaagaaccucaacgagucccugaucgaccugcaggagcucgggaaguacgagcaguacaucaaguggccgugguacaucuggcugggcuucaucgccggccugaucgcgaucgugaucgugaccaucaugcucugcugcaugaccagcugcugcuccugccugaaggggugcugcagcugcggcuccugcugcaaguucgacgaggacgacagcgagcccguccugaagggggugaagcuccacuacacgugaggacuaguuauaagacugacuagcccgaugggccucccaacgggcccuccuccccuccuugcaccgagauuaauagaucucaaaggcucuuuucagagccaccaaaaaaaaaaaaaaaaaaaaaaaaaaaaaaaaaaaaaaaaaaaaaaaaaaaaaaaaaaaaaaaaaaaaaaaaaaaaaaaaaaaaaaaaaaaaaaaaaaaaa

SEQ ID NO: 24299 - RNA, 4035 nt, Artificial Sequence
  SARS-CoV-2/Wuhan/WIV05/2019__EPI_ISL_402128 spike protein mRNA gc (1-1273)(H69del_V70del_A222V_Y453F_S477N_D614G_I692V)
aggagaaagcuuaccauguucguguuccugguccuccugccccuggugagcucccagugcgugaaccucaccacccgcacgcagcugccgcccgccuacaccaacagcuucacccggggcgucuacuaccccgacaagguguuccgcuccagcgugcugcacuccacccaggaccucuuccugcccuucuucagcaacgucacgugguuccacgccaucuccgggaccaacggcaccaagcgguucgacaacccggugcugcccuucaacgacggggucuacuucgcgagcaccgagaaguccaacaucauccgcggcuggaucuucgggacgacccucgacagcaagacccagucccugcugaucgugaacaacgccaccaacguggucaucaaggugugcgaguuccaguucugcaacgaccccuuccucggcguguacuaccacaagaacaacaagagcuggauggaguccgaguuccgggucuacagcuccgccaacaacugcacguucgaguacgugagccagcccuuccugauggaccuggagggcaagcaggggaacuucaagaaccuccgcgaguucguguucaagaacaucgacggcuacuucaagaucuacuccaagcacaccccgaucaaccugguccgggaccugccccagggguucagcguccucgagccccugguggaccugcccaucggcaucaacaucacccgcuuccagacccuccuggcccugcaccgguccuaccucacgccgggggacagcagcuccggcuggaccgcgggcgccgccgccuacuacgugggguaccugcagccccgcaccuuccugcucaaguacaacgagaacggcaccaucacggacgcggucgacugcgcccuggacccccugagcgagaccaagugcacccucaaguccuucaccguggagaaggggaucuaccagacgagcaacuuccgggugcagcccaccgaguccaucguccgcuucccgaacaucaccaaccugugccccuucggcgagguguucaacgccacccgguucgccagcgucuacgccuggaaccgcaagcggaucuccaacugcguggcggacuacagcgugcuguacaacuccgccagcuucuccacguucaagugcuacggcgucagccccaccaagcucaacgaccugugcuucaccaacguguacgccgacuccuucgugauccgcggggacgagguccggcagaucgcccccggccagaccgggaagaucgccgacuacaacuacaagcugccggacgacuucacgggcugcgugaucgcguggaacagcaacaaccucgacuccaaggucgggggcaacuacaacuaccuguuccgccuguuccgcaagagcaaccucaagcccuucgagcgggacaucuccaccgagaucuaccaggccggcaacacccccugcaacgggguggagggcuucaacugcuacuucccccugcaguccuacggguuccagccgaccaacggcgugggguaccagcccuaccggguggucgugcugagcuucgagcuccugcacgcccccgccacggugugcggccccaagaaguccaccaaccuggucaagaacaagugcgugaacuucaacuucaacggccucaccgggaccggcgugcugaccgagagcaacaagaaguuccugccguuccagcaguucgggcgcgacaucgccgacacgaccgacgcgguccgcgacccccagacccuggagauccucgacaucacccccugcagcuucggcgggguguccgugaucacgccgggcaccaacaccagcaaccaggucgccgugcuguaccagggcgugaacugcaccgagguccccguggccauccacgccgaccagcugacgcccaccuggcggguguacuccaccggcagcaacgucuuccagacccgcgccgggugccucaucggcgcggagcacgugaacaacuccuacgagugcgacauccccaucggggccggcaucugcgccagcuaccagacgcagaccaacuccccgcggcgcgcccggagcguggcgucccagagcgucaucgccuacaccaugucccugggcgccgagaacagcgucgccuacuccaacaacagcaucgccauccccaccaacuucacgaucuccgugaccaccgagauccugcccgugagcaugaccaagacgagcgucgacugcaccauguacaucugcggggacuccaccgagugcagcaaccuccugcugcaguacggcuccuucugcacccagcucaaccgcgcgcugacggggaucgccguggagcaggacaagaacacccaggagguguucgcccaggucaagcagaucuacaagacgcccccgaucaaggacuucggcggguucaacuucagccagauccugcccgaccccuccaagcccagcaagcgguccuucaucgaggaccuccuguucaacaaggugacccuggccgacgccggcuucaucaagcaguacggcgacugccucggggacaucgcggcccgcgaccugaucugcgcccagaaguucaacggccugaccgugcucccgccccugcugaccgacgagaugaucgcccaguacaccagcgcccuccuggcggggaccaucacguccggcuggaccuucggggccggcgccgcccugcagauccccuucgcgaugcagauggccuaccgguucaacggcaucggggucacccagaacgugcucuacgagaaccagaagcugaucgccaaccaguucaacagcgccaucggcaagauccaggacucccugagcuccaccgccagcgcgcucgggaagcugcaggacguggucaaccagaacgcccaggcccugaacacgcucgugaagcagcuguccagcaacuucggcgccaucuccagcgugcugaacgacauccucucccgccuggacaaggucgaggccgaggugcagaucgaccggcugaucaccgggcgccuccagagccugcagaccuacgugacccagcagcugauccgggcggccgagauccgcgccagcgccaaccucgccgcgaccaagauguccgagugcguccugggccagagcaagcggguggacuucugcggcaagggguaccaccugauguccuucccccagagcgccccgcacggcguggucuuccuccacgugacguacguccccgcccaggagaagaacuucaccaccgcccccgcgaucugccacgacgggaaggcccacuucccccgcgagggcguguucguguccaacgggacccacugguucgucacgcagcggaacuucuacgagccgcagaucaucaccaccgacaacaccuucgugagcggcaacugcgacguggucaucggcaucgugaacaacacgguguacgacccccugcagcccgagcuggacuccuucaaggaggagcucgacaaguacuucaagaaccacaccagccccgacgucgaccugggggacaucuccggcaucaacgccagcguggugaacauccagaaggagaucgaccgccugaacgaggucgccaagaaccucaacgagucccugaucgaccugcaggagcucgggaaguacgagcaguacaucaaguggccgugguacaucuggcugggcuucaucgccggccugaucgcgaucgugauggugaccaucaugcucugcugcaugaccagcugcugcuccugccugaaggggugcugcagcugcggcuccugcugcaaguucgacgaggacgacagcgagcccguccugaagggggugaagcuccacuacacgugaggacuaguuauaagacugacuagcccgaugggccucccaacgggcccuccuccccuccuugcaccgagauuaauagaucucaaaggcucuuuucagagccaccaaaaaaaaaaaaaaaaaaaaaaaaaaaaaaaaaaaaaaaaaaaaaaaaaaaaaaaaaaaaaaaaaaaaaaaaaaaaaaaaaaaaaaaaaaaaaaaaaaaaa

SEQ ID NO: 24300 - RNA, 4035 nt, Artificial Sequence
  SARS-CoV-2/Wuhan/WIV05/2019__EPI_ISL_402128 spike protein mRNA gc (1-1273)(H69del_V70del_Y453F_D614G_I692V_M1229I)
aggagaaagcuuaccauguucguguuccugguccuccugccccuggugagcucccagugcgugaaccucaccacccgcacgcagcugccgcccgccuacaccaacagcuucacccggggcgucuacuaccccgacaagguguuccgcuccagcgugcugcacuccacccaggaccucuuccugcccuucuucagcaacgucacgugguuccacgccaucuccgggaccaacggcaccaagcgguucgacaacccggugcugcccuucaacgacggggucuacuucgcgagcaccgagaaguccaacaucauccgcggcuggaucuucgggacgacccucgacagcaagacccagucccugcugaucgugaacaacgccaccaacguggucaucaaggugugcgaguuccaguucugcaacgaccccuuccucggcguguacuaccacaagaacaacaagagcuggauggaguccgaguuccgggucuacagcuccgccaacaacugcacguucgaguacgugagccagcccuuccugauggaccuggagggcaagcaggggaacuucaagaaccuccgcgaguucguguucaagaacaucgacggcuacuucaagaucuacuccaagcacaccccgaucaaccugguccgggaccugccccagggguucagcgcccucgagccccugguggaccugcccaucggcaucaacaucacccgcuuccagacccuccuggcccugcaccgguccuaccucacgccgggggacagcagcuccggcuggaccgcgggcgccgccgccuacuacgugggguaccugcagccccgcaccuuccugcucaaguacaacgagaacggcaccaucacggacgcggucgacugcgcccuggacccccugagcgagaccaagugcacccucaaguccuucaccguggagaaggggaucuaccagacgagcaacuuccgggugcagcccaccgaguccaucguccgcuucccgaacaucaccaaccugugccccuucggcgagguguucaacgccacccgguucgccagcgucuacgccuggaaccgcaagcggaucuccaacugcguggcggacuacagcgugcuguacaacuccgccagcuucuccacguucaagugcuacggcgucagccccaccaagcucaacgaccugugcuucaccaacguguacgccgacuccuucgugauccgcggggacgagguccggcagaucgcccccggccagaccgggaagaucgccgacuacaacuacaagcugccggacgacuucacgggcugcgugaucgcguggaacagcaacaaccucgacuccaaggucgggggcaacuacaacuaccuguuccgccuguuccgcaagagcaaccucaagcccuucgagcgggacaucuccaccgagaucuaccaggccggcagcacccccugcaacgggguggagggcuucaacugcuacuucccccugcaguccuacggguuccagccgaccaacggcgugggguaccagcccuaccggguggucgugcugagcuucgagcuccugcacgcccccgccacggugugcggccccaagaaguccaccaaccuggucaagaacaagugcgugaacuucaacuucaacggccucaccgggaccggcgugcugaccgagagcaacaagaaguuccugccguuccagcaguucgggcgcgacaucgccgacacgaccgacgcgguccgcgacccccagacccuggagauccucgacaucacccccugcagcuucggcgggguguccgugaucacgccgggcaccaacaccagcaaccaggucgccgugcuguaccagggcgugaacugcaccgagguccccguggccauccacgccgaccagcugacgcccaccuggcggguguacuccaccggcagcaacgucuuccagacccgcgccgggugccucaucggcgcggagcacgugaacaacuccuacgagugcgacauccccaucggggccggcaucugcgccagcuaccagacgcagaccaacuccccgcggcgcgcccggagcguggcgucccagagcgugaucgccuacaccaugucccugggcgccgagaacagcgucgccuacuccaacaacagcaucgccauccccaccaacuucacgaucuccgugaccaccgagauccugcccgugagcaugaccaagacgagcgucgacugcaccauguacaucugcggggacuccaccgagugcagcaaccuccugcugcaguacggcuccuucugcacccagcucaaccgcgcgcugacggggaucgccguggagcaggacaagaacacccaggagguguucgcccaggucaagcagaucuacaagacgcccccgaucaaggacuucggcggguucaacuucagccagauccugcccgaccccuccaagcccagcaagcgguccuucaucgaggaccuccuguucaacaaggugacccuggccgacgccggcuucaucaagcaguacggcgacugccucggggacaucgcggcccgcgaccugaucugcgcccagaaguucaacggccugaccgugcucccgccccugcugaccgacgagaugaucgcccaguacaccagcgcccuccuggcggggaccaucacguccggcuggaccuucggggccggcgccgcccugcagauccccuucgcgaugcagauggccuaccgguucaacggcaucggggucacccagaacgugcucuacgagaaccagaagcugaucgccaaccaguucaacagcgccaucggcaagauccaggacucccugagcuccaccgccagcgcgcucgggaagcugcaggacguggucaaccagaacgcccaggcccugaacacgcucgugaagcagcuguccagcaacuucggcgccaucuccagcgugcugaacgacauccucucccgccuggacaaggucgaggccgaggugcagaucgaccggcugaucaccgggcgccuccagagccugcagaccuacgugacccagcagcugauccgggcggccgagauccgcgccagcgccaaccucgccgcgaccaagauguccgagugcguccugggccagagcaagcggguggacuucugcggcaagggguaccaccugauguccuucccccagagcgccccgcacggcguggucuuccuccacgugacguacguccccgcccaggagaagaacuucaccaccgcccccgcgaucugccacgacgggaaggcccacuucccccgcgagggcguguucguguccaacgggacccacugguucgucacgcagcggaacuucuacgagccgcagaucaucaccaccgacaacaccuucgugagcggcaacugcgacguggucaucggcaucgugaacaacacgguguacgacccccugcagcccgagcuggacuccuucaaggaggagcucgacaaguacuucaagaaccacaccagccccgacgucgaccugggggacaucuccggcaucaacgccagcguggugaacauccagaaggagaucgaccgccugaacgaggucgccaagaaccucaacgagucccugaucgaccugcaggagcucgggaaguacgagcaguacaucaaguggccgugguacaucuggcugggcuucaucgccggccugaucgcgaucgugaucgugaccaucaugcucugcugcaugaccagcugcugcuccugccugaaggggugcugcagcugcggcuccugcugcaaguucgacgaggacgacagcgagcccguccugaagggggugaagcuccacuacacgugaggacuaguuauaagacugacuagcccgaugggccucccaacgggcccuccuccccuccuugcaccgagauuaauagaucucaaaggcucuuuucagagccaccaaaaaaaaaaaaaaaaaaaaaaaaaaaaaaaaaaaaaaaaaaaaaaaaaaaaaaaaaaaaaaaaaaaaaaaaaaaaaaaaaaaaaaaaaaaaaaaaaaaaa

SEQ ID NO: 24301 - RNA, 4032 nt, Artificial Sequence
  SARS-CoV-2/Wuhan/WIV05/2019__EPI_ISL_402128 spike protein mRNA gc (1-1273)(H69del_V70del_Y144del_N501Y_A570D_D614G_P681H_T716I_S982 A_D1118H)
aggagaaagcuuaccauguucguguuccugguccuccugccccuggugagcucccagugcgugaaccucaccacccgcacgcagcugccgcccgccuacaccaacagcuucacccggggcgucuacuaccccgacaagguguuccgcuccagcgugcugcacuccacccaggaccucuuccugcccuucuucagcaacgucacgugguuccacgccaucuccgggaccaacggcaccaagcgguucgacaacccggugcugcccuucaacgacggggucuacuucgcgagcaccgagaaguccaacaucauccgcggcuggaucuucgggacgacccucgacagcaagacccagucccugcugaucgugaacaacgccaccaacguggucaucaaggugugcgaguuccaguucugcaacgaccccuuccucggcguguaccacaagaacaacaagagcuggauggaguccgaguuccgggucuacagcuccgccaacaacugcacguucgaguacgugagccagcccuuccugauggaccuggagggcaagcaggggaacuucaagaaccuccgcgaguucguguucaagaacaucgacggcuacuucaagaucuacuccaagcacaccccgaucaaccugguccgggaccugccccagggguucagcgcccucgagccccugguggaccugcccaucggcaucaacaucacccgcuuccagacccuccuggcccugcaccgguccuaccucacgccgggggacagcagcuccggcuggaccgcgggcgccgccgccuacuacgugggguaccugcagccccgcaccuuccugcucaaguacaacgagaacggcaccaucacggacgcggucgacugcgcccuggacccccugagcgagaccaagugcacccucaaguccuucaccguggagaaggggaucuaccagacgagcaacuuccgggugcagcccaccgaguccaucguccgcuucccgaacaucaccaaccugugccccuucggcgagguguucaacgccacccgguucgccagcgucuacgccuggaaccgcaagcggaucuccaacugcguggcggacuacagcgugcuguacaacuccgccagcuucuccacguucaagugcuacggcgucagccccaccaagcucaacgaccugugcuucaccaacguguacgccgacuccuucgugauccgcggggacgagguccggcagaucgcccccggccagaccgggaagaucgccgacuacaacuacaagcugccggacgacuucacgggcugcgugaucgcguggaacagcaacaaccucgacuccaaggucgggggcaacuacaacuaccuguaccgccuguuccgcaagagcaaccucaagcccuucgagcgggacaucuccaccgagaucuaccaggccggcagcacccccugcaacgggguggagggcuucaacugcuacuucccccugcaguccuacggguuccagccgaccuacggcgugggguaccagcccuaccggguggucgugcugagcuucgagcuccugcacgcccccgccacggugugcggccccaagaaguccaccaaccuggucaagaacaagugcgugaacuucaacuucaacggccucaccgggaccggcgugcugaccgagagcaacaagaaguuccugccguuccagcaguucgggcgcgacaucgacgacacgaccgacgcgguccgcgacccccagacccuggagauccucgacaucacccccugcagcuucggcgggguguccgugaucacgccgggcaccaacaccagcaaccaggucgccgugcuguaccagggcgugaacugcaccgagguccccguggccauccacgccgaccagcugacgcccaccuggcggguguacuccaccggcagcaacgucuuccagacccgcgccgggugccucaucggcgcggagcacgugaacaacuccuacgagugcgacauccccaucggggccggcaucugcgccagcuaccagacgcagaccaacucccaccggcgcgcccggagcguggcgucccagagcaucaucgccuacaccaugucccugggcgccgagaacagcgucgccuacuccaacaacagcaucgccauccccaucaacuucacgaucuccgugaccaccgagauccugcccgugagcaugaccaagacgagcgucgacugcaccauguacaucugcggggacuccaccgagugcagcaaccuccugcugcaguacggcuccuucugcacccagcucaaccgcgcgcugacggggaucgccguggagcaggacaagaacacccaggagguguucgcccaggucaagcagaucuacaagacgcccccgaucaaggacuucggcggguucaacuucagccagauccugcccgaccccuccaagcccagcaagcgguccuucaucgaggaccuccuguucaacaaggugacccuggccgacgccggcuucaucaagcaguacggcgacugccucggggacaucgcggcccgcgaccugaucugcgcccagaaguucaacggccugaccgugcucccgccccugcugaccgacgagaugaucgcccaguacaccagcgcccuccuggcggggaccaucacguccggcuggaccuucggggccggcgccgcccugcagauccccuucgcgaugcagauggccuaccgguucaacggcaucggggucacccagaacgugcucuacgagaaccagaagcugaucgccaaccaguucaacagcgccaucggcaagauccaggacucccugagcuccaccgccagcgcgcucgggaagcugcaggacguggucaaccagaacgcccaggcccugaacacgcucgugaagcagcuguccagcaacuucggcgccaucuccagcgugcugaacgacauccucgcccgccuggacaaggucgaggccgaggugcagaucgaccggcugaucaccgggcgccuccagagccugcagaccuacgugacccagcagcugauccgggcggccgagauccgcgccagcgccaaccucgccgcgaccaagauguccgagugcguccugggccagagcaagcggguggacuucugcggcaagggguaccaccugauguccuucccccagagcgccccgcacggcguggucuuccuccacgugacguacguccccgcccaggagaagaacuucaccaccgcccccgcgaucugccacgacgggaaggcccacuucccccgcgagggcguguucguguccaacgggacccacugguucgucacgcagcggaacuucuacgagccgcagaucaucaccacccacaacaccuucgugagcggcaacugcgacguggucaucggcaucgugaacaacacgguguacgacccccugcagcccgagcuggacuccuucaaggaggagcucgacaaguacuucaagaaccacaccagccccgacgucgaccugggggacaucuccggcaucaacgccagcguggugaacauccagaaggagaucgaccgccugaacgaggucgccaagaaccucaacgagucccugaucgaccugcaggagcucgggaaguacgagcaguacaucaaguggccgugguacaucuggcugggcuucaucgccggccugaucgcgaucgugauggugaccaucaugcucugcugcaugaccagcugcugcuccugccugaaggggugcugcagcugcggcuccugcugcaaguucgacgaggacgacagcgagcccguccugaagggggugaagcuccacuacacgugaggacuaguuauaagacugacuagcccgaugggccucccaacgggcccuccuccccuccuugcaccgagauuaauagaucucaaaggcucuuuucagagccaccaaaaaaaaaaaaaaaaaaaaaaaaaaaaaaaaaaaaaaaaaaaaaaaaaaaaaaaaaaaaaaaaaaaaaaaaaaaaaaaaaaaaaaaaaaaaaaaaaaaaa

SEQ ID NO: 24302 - RNA, 4041 nt, Artificial Sequence
  SARS-CoV-2/Wuhan/WIV05/2019__EPI_ISL_402128 spike protein mRNA gc (1-1273)(K417N_E484K_N501Y_D614G)
aggagaaagcuuaccauguucguguuccugguccuccugccccuggugagcucccagugcgugaaccucaccacccgcacgcagcugccgcccgccuacaccaacagcuucacccggggcgucuacuaccccgacaagguguuccgcuccagcgugcugcacuccacccaggaccucuuccugcccuucuucagcaacgucacgugguuccacgccauccacguguccgggaccaacggcaccaagcgguucgacaacccggugcugcccuucaacgacggggucuacuucgcgagcaccgagaaguccaacaucauccgcggcuggaucuucgggacgacccucgacagcaagacccagucccugcugaucgugaacaacgccaccaacguggucaucaaggugugcgaguuccaguucugcaacgaccccuuccucggcguguacuaccacaagaacaacaagagcuggauggaguccgaguuccgggucuacagcuccgccaacaacugcacguucgaguacgugagccagcccuuccugauggaccuggagggcaagcaggggaacuucaagaaccuccgcgaguucguguucaagaacaucgacggcuacuucaagaucuacuccaagcacaccccgaucaaccugguccgggaccugccccagggguucagcgcccucgagccccugguggaccugcccaucggcaucaacaucacccgcuuccagacccuccuggcccugcaccgguccuaccucacgccgggggacagcagcuccggcuggaccgcgggcgccgccgccuacuacgugggguaccugcagccccgcaccuuccugcucaaguacaacgagaacggcaccaucacggacgcggucgacugcgcccuggacccccugagcgagaccaagugcacccucaaguccuucaccguggagaaggggaucuaccagacgagcaacuuccgggugcagcccaccgaguccaucguccgcuucccgaacaucaccaaccugugccccuucggcgagguguucaacgccacccgguucgccagcgucuacgccuggaaccgcaagcggaucuccaacugcguggcggacuacagcgugcuguacaacuccgccagcuucuccacguucaagugcuacggcgucagccccaccaagcucaacgaccugugcuucaccaacguguacgccgacuccuucgugauccgcggggacgagguccggcagaucgcccccggccagaccgggaacaucgccgacuacaacuacaagcugccggacgacuucacgggcugcgugaucgcguggaacagcaacaaccucgacuccaaggucgggggcaacuacaacuaccuguaccgccuguuccgcaagagcaaccucaagcccuucgagcgggacaucuccaccgagaucuaccaggccggcagcacccccugcaacggggugaagggcuucaacugcuacuucccccugcaguccuacggguuccagccgaccuacggcgugggguaccagcccuaccggguggucgugcugagcuucgagcuccugcacgcccccgccacggugugcggccccaagaaguccaccaaccuggucaagaacaagugcgugaacuucaacuucaacggccucaccgggaccggcgugcugaccgagagcaacaagaaguuccugccguuccagcaguucgggcgcgacaucgccgacacgaccgacgcgguccgcgacccccagacccuggagauccucgacaucacccccugcagcuucggcgggguguccgugaucacgccgggcaccaacaccagcaaccaggucgccgugcuguaccagggcgugaacugcaccgagguccccguggccauccacgccgaccagcugacgcccaccuggcggguguacuccaccggcagcaacgucuuccagacccgcgccgggugccucaucggcgcggagcacgugaacaacuccuacgagugcgacauccccaucggggccggcaucugcgccagcuaccagacgcagaccaacuccccgcggcgcgcccggagcguggcgucccagagcaucaucgccuacaccaugucccugggcgccgagaacagcgucgccuacuccaacaacagcaucgccauccccaccaacuucacgaucuccgugaccaccgagauccugcccgugagcaugaccaagacgagcgucgacugcaccauguacaucugcggggacuccaccgagugcagcaaccuccugcugcaguacggcuccuucugcacccagcucaaccgcgcgcugacggggaucgccguggagcaggacaagaacacccaggagguguucgcccaggucaagcagaucuacaagacgcccccgaucaaggacuucggcggguucaacuucagccagauccugcccgaccccuccaagcccagcaagcgguccuucaucgaggaccuccuguucaacaaggugacccuggccgacgccggcuucaucaagcaguacggcgacugccucggggacaucgcggcccgcgaccugaucugcgcccagaaguucaacggccugaccgugcucccgccccugcugaccgacgagaugaucgcccaguacaccagcgcccuccuggcggggaccaucacguccggcuggaccuucggggccggcgccgcccugcagauccccuucgcgaugcagauggccuaccgguucaacggcaucggggucacccagaacgugcucuacgagaaccagaagcugaucgccaaccaguucaacagcgccaucggcaagauccaggacucccugagcuccaccgccagcgcgcucgggaagcugcaggacguggucaaccagaacgcccaggcccugaacacgcucgugaagcagcuguccagcaacuucggcgccaucuccagcgugcugaacgacauccucucccgccuggacaaggucgaggccgaggugcagaucgaccggcugaucaccgggcgccuccagagccugcagaccuacgugacccagcagcugauccgggcggccgagauccgcgccagcgccaaccucgccgcgaccaagauguccgagugcguccugggccagagcaagcggguggacuucugcggcaagggguaccaccugauguccuucccccagagcgccccgcacggcguggucuuccuccacgugacguacguccccgcccaggagaagaacuucaccaccgcccccgcgaucugccacgacgggaaggcccacuucccccgcgagggcguguucguguccaacgggacccacugguucgucacgcagcggaacuucuacgagccgcagaucaucaccaccgacaacaccuucgugagcggcaacugcgacguggucaucggcaucgugaacaacacgguguacgacccccugcagcccgagcuggacuccuucaaggaggagcucgacaaguacuucaagaaccacaccagccccgacgucgaccugggggacaucuccggcaucaacgccagcguggugaacauccagaaggagaucgaccgccugaacgaggucgccaagaaccucaacgagucccugaucgaccugcaggagcucgggaaguacgagcaguacaucaaguggccgugguacaucuggcugggcuucaucgccggccugaucgcgaucgugauggugaccaucaugcucugcugcaugaccagcugcugcuccugccugaaggggugcugcagcugcggcuccugcugcaaguucgacgaggacgacagcgagcccguccugaagggggugaagcuccacuacacgugaggacuaguuauaagacugacuagcccgaugggccucccaacgggcccuccuccccuccuugcaccgagauuaauagaucucaaaggcucuuuucagagccaccaaaaaaaaaaaaaaaaaaaaaaaaaaaaaaaaaaaaaaaaaaaaaaaaaaaaaaaaaaaaaaaaaaaaaaaaaaaaaaaaaaaaaaaaaaaaaaaaaaaaa

SEQ ID NO: 24303 - RNA, 4032 nt, Artificial Sequence
  SARS-CoV-2/Wuhan/WIV05/2019__EPI_ISL_402128 spike protein mRNA gc (1-1273)(L18F_D80A_D215G_L242del_A243del_L244del_R246I_K417N_E484 K_N501Y_D614G_A701V)
aggagaaagcuuaccauguucguguuccugguccuccugccccuggugagcucccagugcgugaacuucaccacccgcacgcagcugccgcccgccuacaccaacagcuucacccggggcgucuacuaccccgacaagguguuccgcuccagcgugcugcacuccacccaggaccucuuccugcccuucuucagcaacgucacgugguuccacgccauccacguguccgggaccaacggcaccaagcgguucgccaacccggugcugcccuucaacgacggggucuacuucgcgagcaccgagaaguccaacaucauccgcggcuggaucuucgggacgacccucgacagcaagacccagucccugcugaucgugaacaacgccaccaacguggucaucaaggugugcgaguuccaguucugcaacgaccccuuccucggcguguacuaccacaagaacaacaagagcuggauggaguccgaguuccgggucuacagcuccgccaacaacugcacguucgaguacgugagccagcccuuccugauggaccuggagggcaagcaggggaacuucaagaaccuccgcgaguucguguucaagaacaucgacggcuacuucaagaucuacuccaagcacaccccgaucaaccugguccggggccugccccagggguucagcgcccucgagccccugguggaccugcccaucggcaucaacaucacccgcuuccagacccuccacaucuccuaccucacgccgggggacagcagcuccggcuggaccgcgggcgccgccgccuacuacgugggguaccugcagccccgcaccuuccugcucaaguacaacgagaacggcaccaucacggacgcggucgacugcgcccuggacccccugagcgagaccaagugcacccucaaguccuucaccguggagaaggggaucuaccagacgagcaacuuccgggugcagcccaccgaguccaucguccgcuucccgaacaucaccaaccugugccccuucggcgagguguucaacgccacccgguucgccagcgucuacgccuggaaccgcaagcggaucuccaacugcguggcggacuacagcgugcuguacaacuccgccagcuucuccacguucaagugcuacggcgucagccccaccaagcucaacgaccugugcuucaccaacguguacgccgacuccuucgugauccgcggggacgagguccggcagaucgcccccggccagaccgggaacaucgccgacuacaacuacaagcugccggacgacuucacgggcugcgugaucgcguggaacagcaacaaccucgacuccaaggucgggggcaacuacaacuaccuguaccgccuguuccgcaagagcaaccucaagcccuucgagcgggacaucuccaccgagaucuaccaggccggcagcacccccugcaacggggugaagggcuucaacugcuacuucccccugcaguccuacggguuccagccgaccuacggcgugggguaccagcccuaccggguggucgugcugagcuucgagcuccugcacgcccccgccacggugugcggccccaagaaguccaccaaccuggucaagaacaagugcgugaacuucaacuucaacggccucaccgggaccggcgugcugaccgagagcaacaagaaguuccugccguuccagcaguucgggcgcgacaucgccgacacgaccgacgcgguccgcgacccccagacccuggagauccucgacaucacccccugcagcuucggcgggguguccgugaucacgccgggcaccaacaccagcaaccaggucgccgugcuguaccagggcgugaacugcaccgagguccccguggccauccacgccgaccagcugacgcccaccuggcggguguacuccaccggcagcaacgucuuccagacccgcgccgggugccucaucggcgcggagcacgugaacaacuccuacgagugcgacauccccaucggggccggcaucugcgccagcuaccagacgcagaccaacuccccgcggcgcgcccggagcguggcgucccagagcaucaucgccuacaccaugucccugggcguggagaacagcgucgccuacuccaacaacagcaucgccauccccaccaacuucacgaucuccgugaccaccgagauccugcccgugagcaugaccaagacgagcgucgacugcaccauguacaucugcggggacuccaccgagugcagcaaccuccugcugcaguacggcuccuucugcacccagcucaaccgcgcgcugacggggaucgccguggagcaggacaagaacacccaggagguguucgcccaggucaagcagaucuacaagacgcccccgaucaaggacuucggcggguucaacuucagccagauccugcccgaccccuccaagcccagcaagcgguccuucaucgaggaccuccuguucaacaaggugacccuggccgacgccggcuucaucaagcaguacggcgacugccucggggacaucgcggcccgcgaccugaucugcgcccagaaguucaacggccugaccgugcucccgccccugcugaccgacgagaugaucgcccaguacaccagcgcccuccuggcggggaccaucacguccggcuggaccuucggggccggcgccgcccugcagauccccuucgcgaugcagauggccuaccgguucaacggcaucggggucacccagaacgugcucuacgagaaccagaagcugaucgccaaccaguucaacagcgccaucggcaagauccaggacucccugagcuccaccgccagcgcgcucgggaagcugcaggacguggucaaccagaacgcccaggcccugaacacgcucgugaagcagcuguccagcaacuucggcgccaucuccagcgugcugaacgacauccucucccgccuggacaaggucgaggccgaggugcagaucgaccggcugaucaccgggcgccuccagagccugcagaccuacgugacccagcagcugauccgggcggccgagauccgcgccagcgccaaccucgccgcgaccaagauguccgagugcguccugggccagagcaagcggguggacuucugcggcaagggguaccaccugauguccuucccccagagcgccccgcacggcguggucuuccuccacgugacguacguccccgcccaggagaagaacuucaccaccgcccccgcgaucugccacgacgggaaggcccacuucccccgcgagggcguguucguguccaacgggacccacugguucgucacgcagcggaacuucuacgagccgcagaucaucaccaccgacaacaccuucgugagcggcaacugcgacguggucaucggcaucgugaacaacacgguguacgacccccugcagcccgagcuggacuccuucaaggaggagcucgacaaguacuucaagaaccacaccagccccgacgucgaccugggggacaucuccggcaucaacgccagcguggugaacauccagaaggagaucgaccgccugaacgaggucgccaagaaccucaacgagucccugaucgaccugcaggagcucgggaaguacgagcaguacaucaaguggccgugguacaucuggcugggcuucaucgccggccugaucgcgaucgugauggugaccaucaugcucugcugcaugaccagcugcugcuccugccugaaggggugcugcagcugcggcuccugcugcaaguucgacgaggacgacagcgagcccguccugaagggggugaagcuccacuacacgugaggacuaguuauaagacugacuagcccgaugggccucccaacgggcccuccuccccuccuugcaccgagauuaauagaucucaaaggcucuuuucagagccaccaaaaaaaaaaaaaaaaaaaaaaaaaaaaaaaaaaaaaaaaaaaaaaaaaaaaaaaaaaaaaaaaaaaaaaaaaaaaaaaaaaaaaaaaaaaaaaaaaaaaa

SEQ ID NO: 24304 - RNA, 4041 nt, Artificial Sequence
  SARS-CoV-2/Wuhan/WIV05/2019__EPI_ISL_402128 spike protein mRNA gc (1-1273)(E484K_D614G)
aggagaaagcuuaccauguucguguuccugguccuccugccccuggugagcucccagugcgugaaccucaccacccgcacgcagcugccgcccgccuacaccaacagcuucacccggggcgucuacuaccccgacaagguguuccgcuccagcgugcugcacuccacccaggaccucuuccugcccuucuucagcaacgucacgugguuccacgccauccacguguccgggaccaacggcaccaagcgguucgacaacccggugcugcccuucaacgacggggucuacuucgcgagcaccgagaaguccaacaucauccgcggcuggaucuucgggacgacccucgacagcaagacccagucccugcugaucgugaacaacgccaccaacguggucaucaaggugugcgaguuccaguucugcaacgaccccuuccucggcguguacuaccacaagaacaacaagagcuggauggaguccgaguuccgggucuacagcuccgccaacaacugcacguucgaguacgugagccagcccuuccugauggaccuggagggcaagcaggggaacuucaagaaccuccgcgaguucguguucaagaacaucgacggcuacuucaagaucuacuccaagcacaccccgaucaaccugguccgggaccugccccagggguucagcgcccucgagccccugguggaccugcccaucggcaucaacaucacccgcuuccagacccuccuggcccugcaccgguccuaccucacgccgggggacagcagcuccggcuggaccgcgggcgccgccgccuacuacgugggguaccugcagccccgcaccuuccugcucaaguacaacgagaacggcaccaucacggacgcggucgacugcgcccuggacccccugagcgagaccaagugcacccucaaguccuucaccguggagaaggggaucuaccagacgagcaacuuccgggugcagcccaccgaguccaucguccgcuucccgaacaucaccaaccugugccccuucggcgagguguucaacgccacccgguucgccagcgucuacgccuggaaccgcaagcggaucuccaacugcguggcggacuacagcgugcuguacaacuccgccagcuucuccacguucaagugcuacggcgucagccccaccaagcucaacgaccugugcuucaccaacguguacgccgacuccuucgugauccgcggggacgagguccggcagaucgcccccggccagaccgggaagaucgccgacuacaacuacaagcugccggacgacuucacgggcugcgugaucgcguggaacagcaacaaccucgacuccaaggucgggggcaacuacaacuaccuguaccgccuguuccgcaagagcaaccucaagcccuucgagcgggacaucuccaccgagaucuaccaggccggcagcacccccugcaacggggugaagggcuucaacugcuacuucccccugcaguccuacggguuccagccgaccaacggcgugggguaccagcccuaccggguggucgugcugagcuucgagcuccugcacgcccccgccacggugugcggccccaagaaguccaccaaccuggucaagaacaagugcgugaacuucaacuucaacggccucaccgggaccggcgugcugaccgagagcaacaagaaguuccugccguuccagcaguucgggcgcgacaucgccgacacgaccgacgcgguccgcgacccccagacccuggagauccucgacaucacccccugcagcuucggcgggguguccgugaucacgccgggcaccaacaccagcaaccaggucgccgugcuguaccagggcgugaacugcaccgagguccccguggccauccacgccgaccagcugacgcccaccuggcggguguacuccaccggcagcaacgucuuccagacccgcgccgggugccucaucggcgcggagcacgugaacaacuccuacgagugcgacauccccaucggggccggcaucugcgccagcuaccagacgcagaccaacuccccgcggcgcgcccggagcguggcgucccagagcaucaucgccuacaccaugucccugggcgccgagaacagcgucgccuacuccaacaacagcaucgccauccccaccaacuucacgaucuccgugaccaccgagauccugcccgugagcaugaccaagacgagcgucgacugcaccauguacaucugcggggacuccaccgagugcagcaaccuccugcugcaguacggcuccuucugcacccagcucaaccgcgcgcugacggggaucgccguggagcaggacaagaacacccaggagguguucgcccaggucaagcagaucuacaagacgcccccgaucaaggacuucggcggguucaacuucagccagauccugcccgaccccuccaagcccagcaagcgguccuucaucgaggaccuccuguucaacaaggugacccuggccgacgccggcuucaucaagcaguacggcgacugccucggggacaucgcggcccgcgaccugaucugcgcccagaaguucaacggccugaccgugcucccgccccugcugaccgacgagaugaucgcccaguacaccagcgcccuccuggcggggaccaucacguccggcuggaccuucggggccggcgccgcccugcagauccccuucgcgaugcagauggccuaccgguucaacggcaucggggucacccagaacgugcucuacgagaaccagaagcugaucgccaaccaguucaacagcgccaucggcaagauccaggacucccugagcuccaccgccagcgcgcucgggaagcugcaggacguggucaaccagaacgcccaggcccugaacacgcucgugaagcagcuguccagcaacuucggcgccaucuccagcgugcugaacgacauccucucccgccuggacaaggucgaggccgaggugcagaucgaccggcugaucaccgggcgccuccagagccugcagaccuacgugacccagcagcugauccgggcggccgagauccgcgccagcgccaaccucgccgcgaccaagauguccgagugcguccugggccagagcaagcggguggacuucugcggcaagggguaccaccugauguccuucccccagagcgccccgcacggcguggucuuccuccacgugacguacguccccgcccaggagaagaacuucaccaccgcccccgcgaucugccacgacgggaaggcccacuucccccgcgagggcguguucguguccaacgggacccacugguucgucacgcagcggaacuucuacgagccgcagaucaucaccaccgacaacaccuucgugagcggcaacugcgacguggucaucggcaucgugaacaacacgguguacgacccccugcagcccgagcuggacuccuucaaggaggagcucgacaaguacuucaagaaccacaccagccccgacgucgaccugggggacaucuccggcaucaacgccagcguggugaacauccagaaggagaucgaccgccugaacgaggucgccaagaaccucaacgagucccugaucgaccugcaggagcucgggaaguacgagcaguacaucaaguggccgugguacaucuggcugggcuucaucgccggccugaucgcgaucgugauggugaccaucaugcucugcugcaugaccagcugcugcuccugccugaaggggugcugcagcugcggcuccugcugcaaguucgacgaggacgacagcgagcccguccugaagggggugaagcuccacuacacgugaggacuaguuauaagacugacuagcccgaugggccucccaacgggcccuccuccccuccuugcaccgagauuaauagaucucaaaggcucuuuucagagccaccaaaaaaaaaaaaaaaaaaaaaaaaaaaaaaaaaaaaaaaaaaaaaaaaaaaaaaaaaaaaaaaaaaaaaaaaaaaaaaaaaaaaaaaaaaaaaaaaaaaaa

SEQ ID NO: 24305 - RNA, 4041 nt, Artificial Sequence
  SARS-CoV-2/Wuhan/WIV05/2019__EPI_ISL_402128 spike protein mRNA gc (1-1273)(L18F_T20N_P26S_D138Y_R190S_K417T_E484K_N501Y_D614G_H655Y _T1027I)
aggagaaagcuuaccauguucguguuccugguccuccugccccuggugagcucccagugcgugaacuucaccaaccgcacgcagcugccgagcgccuacaccaacagcuucacccggggcgucuacuaccccgacaagguguuccgcuccagcgugcugcacuccacccaggaccucuuccugcccuucuucagcaacgucacgugguuccacgccauccacguguccgggaccaacggcaccaagcgguucgacaacccggugcugcccuucaacgacggggucuacuucgcgagcaccgagaaguccaacaucauccgcggcuggaucuucgggacgacccucgacagcaagacccagucccugcugaucgugaacaacgccaccaacguggucaucaaggugugcgaguuccaguucugcaacuaccccuuccucggcguguacuaccacaagaacaacaagagcuggauggaguccgaguuccgggucuacagcuccgccaacaacugcacguucgaguacgugagccagcccuuccugauggaccuggagggcaagcaggggaacuucaagaaccucagcgaguucguguucaagaacaucgacggcuacuucaagaucuacuccaagcacaccccgaucaaccugguccgggaccugccccagggguucagcgcccucgagccccugguggaccugcccaucggcaucaacaucacccgcuuccagacccuccuggcccugcaccgguccuaccucacgccgggggacagcagcuccggcuggaccgcgggcgccgccgccuacuacgugggguaccugcagccccgcaccuuccugcucaaguacaacgagaacggcaccaucacggacgcggucgacugcgcccuggacccccugagcgagaccaagugcacccucaaguccuucaccguggagaaggggaucuaccagacgagcaacuuccgggugcagcccaccgaguccaucguccgcuucccgaacaucaccaaccugugccccuucggcgagguguucaacgccacccgguucgccagcgucuacgccuggaaccgcaagcggaucuccaacugcguggcggacuacagcgugcuguacaacuccgccagcuucuccacguucaagugcuacggcgucagccccaccaagcucaacgaccugugcuucaccaacguguacgccgacuccuucgugauccgcggggacgagguccggcagaucgcccccggccagaccgggaccaucgccgacuacaacuacaagcugccggacgacuucacgggcugcgugaucgcguggaacagcaacaaccucgacuccaaggucgggggcaacuacaacuaccuguaccgccuguuccgcaagagcaaccucaagcccuucgagcgggacaucuccaccgagaucuaccaggccggcagcacccccugcaacggggugaagggcuucaacugcuacuucccccugcaguccuacggguuccagccgaccuacggcgugggguaccagcccuaccggguggucgugcugagcuucgagcuccugcacgcccccgccacggugugcggccccaagaaguccaccaaccuggucaagaacaagugcgugaacuucaacuucaacggccucaccgggaccggcgugcugaccgagagcaacaagaaguuccugccguuccagcaguucgggcgcgacaucgccgacacgaccgacgcgguccgcgacccccagacccuggagauccucgacaucacccccugcagcuucggcgggguguccgugaucacgccgggcaccaacaccagcaaccaggucgccgugcuguaccagggcgugaacugcaccgagguccccguggccauccacgccgaccagcugacgcccaccuggcggguguacuccaccggcagcaacgucuuccagacccgcgccgggugccucaucggcgcggaguacgugaacaacuccuacgagugcgacauccccaucggggccggcaucugcgccagcuaccagacgcagaccaacuccccgcggcgcgcccggagcguggcgucccagagcaucaucgccuacaccaugucccugggcgccgagaacagcgucgccuacuccaacaacagcaucgccauccccaccaacuucacgaucuccgugaccaccgagauccugcccgugagcaugaccaagacgagcgucgacugcaccauguacaucugcggggacuccaccgagugcagcaaccuccugcugcaguacggcuccuucugcacccagcucaaccgcgcgcugacggggaucgccguggagcaggacaagaacacccaggagguguucgcccaggucaagcagaucuacaagacgcccccgaucaaggacuucggcggguucaacuucagccagauccugcccgaccccuccaagcccagcaagcgguccuucaucgaggaccuccuguucaacaaggugacccuggccgacgccggcuucaucaagcaguacggcgacugccucggggacaucgcggcccgcgaccugaucugcgcccagaaguucaacggccugaccgugcucccgccccugcugaccgacgagaugaucgcccaguacaccagcgcccuccuggcggggaccaucacguccggcuggaccuucggggccggcgccgcccugcagauccccuucgcgaugcagauggccuaccgguucaacggcaucggggucacccagaacgugcucuacgagaaccagaagcugaucgccaaccaguucaacagcgccaucggcaagauccaggacucccugagcuccaccgccagcgcgcucgggaagcugcaggacguggucaaccagaacgcccaggcccugaacacgcucgugaagcagcuguccagcaacuucggcgccaucuccagcgugcugaacgacauccucucccgccuggacaaggucgaggccgaggugcagaucgaccggcugaucaccgggcgccuccagagccugcagaccuacgugacccagcagcugauccgggcggccgagauccgcgccagcgccaaccucgccgcgaucaagauguccgagugcguccugggccagagcaagcggguggacuucugcggcaagggguaccaccugauguccuucccccagagcgccccgcacggcguggucuuccuccacgugacguacguccccgcccaggagaagaacuucaccaccgcccccgcgaucugccacgacgggaaggcccacuucccccgcgagggcguguucguguccaacgggacccacugguucgucacgcagcggaacuucuacgagccgcagaucaucaccaccgacaacaccuucgugagcggcaacugcgacguggucaucggcaucgugaacaacacgguguacgacccccugcagcccgagcuggacuccuucaaggaggagcucgacaaguacuucaagaaccacaccagccccgacgucgaccugggggacaucuccggcaucaacgccagcguggugaacauccagaaggagaucgaccgccugaacgaggucgccaagaaccucaacgagucccugaucgaccugcaggagcucgggaaguacgagcaguacaucaaguggccgugguacaucuggcugggcuucaucgccggccugaucgcgaucgugauggugaccaucaugcucugcugcaugaccagcugcugcuccugccugaaggggugcugcagcugcggcuccugcugcaaguucgacgaggacgacagcgagcccguccugaagggggugaagcuccacuacacgugaggacuaguuauaagacugacuagcccgaugggccucccaacgggcccuccuccccuccuugcaccgagauuaauagaucucaaaggcucuuuucagagccaccaaaaaaaaaaaaaaaaaaaaaaaaaaaaaaaaaaaaaaaaaaaaaaaaaaaaaaaaaaaaaaaaaaaaaaaaaaaaaaaaaaaaaaaaaaaaaaaaaaaaa

SEQ ID NO: 24306 - RNA, 4041 nt, Artificial Sequence
  SARS-CoV-2/Wuhan/WIV05/2019__EPI_ISL_402128 spike protein mRNA gc (1-1273)(S13I_W152C_L452R_D614G)
aggagaaagcuuaccauguucguguuccugguccuccugccccuggugagcauccagugcgugaaccucaccacccgcacgcagcugccgcccgccuacaccaacagcuucacccggggcgucuacuaccccgacaagguguuccgcuccagcgugcugcacuccacccaggaccucuuccugcccuucuucagcaacgucacgugguuccacgccauccacguguccgggaccaacggcaccaagcgguucgacaacccggugcugcccuucaacgacggggucuacuucgcgagcaccgagaaguccaacaucauccgcggcuggaucuucgggacgacccucgacagcaagacccagucccugcugaucgugaacaacgccaccaacguggucaucaaggugugcgaguuccaguucugcaacgaccccuuccucggcguguacuaccacaagaacaacaagagcugcauggaguccgaguuccgggucuacagcuccgccaacaacugcacguucgaguacgugagccagcccuuccugauggaccuggagggcaagcaggggaacuucaagaaccuccgcgaguucguguucaagaacaucgacggcuacuucaagaucuacuccaagcacaccccgaucaaccugguccgggaccugccccagggguucagcgcccucgagccccugguggaccugcccaucggcaucaacaucacccgcuuccagacccuccuggcccugcaccgguccuaccucacgccgggggacagcagcuccggcuggaccgcgggcgccgccgccuacuacgugggguaccugcagccccgcaccuuccugcucaaguacaacgagaacggcaccaucacggacgcggucgacugcgcccuggacccccugagcgagaccaagugcacccucaaguccuucaccguggagaaggggaucuaccagacgagcaacuuccgggugcagcccaccgaguccaucguccgcuucccgaacaucaccaaccugugccccuucggcgagguguucaacgccacccgguucgccagcgucuacgccuggaaccgcaagcggaucuccaacugcguggcggacuacagcgugcuguacaacuccgccagcuucuccacguucaagugcuacggcgucagccccaccaagcucaacgaccugugcuucaccaacguguacgccgacuccuucgugauccgcggggacgagguccggcagaucgcccccggccagaccgggaagaucgccgacuacaacuacaagcugccggacgacuucacgggcugcgugaucgcguggaacagcaacaaccucgacuccaaggucgggggcaacuacaacuaccgcuaccgccuguuccgcaagagcaaccucaagcccuucgagcgggacaucuccaccgagaucuaccaggccggcagcacccccugcaacgggguggagggcuucaacugcuacuucccccugcaguccuacggguuccagccgaccaacggcgugggguaccagcccuaccggguggucgugcugagcuucgagcuccugcacgcccccgccacggugugcggccccaagaaguccaccaaccuggucaagaacaagugcgugaacuucaacuucaacggccucaccgggaccggcgugcugaccgagagcaacaagaaguuccugccguuccagcaguucgggcgcgacaucgccgacacgaccgacgcgguccgcgacccccagacccuggagauccucgacaucacccccugcagcuucggcgggguguccgugaucacgccgggcaccaacaccagcaaccaggucgccgugcuguaccagggcgugaacugcaccgagguccccguggccauccacgccgaccagcugacgcccaccuggcggguguacuccaccggcagcaacgucuuccagacccgcgccgggugccucaucggcgcggagcacgugaacaacuccuacgagugcgacauccccaucggggccggcaucugcgccagcuaccagacgcagaccaacuccccgcggcgcgcccggagcguggcgucccagagcaucaucgccuacaccaugucccugggcgccgagaacagcgucgccuacuccaacaacagcaucgccauccccaccaacuucacgaucuccgugaccaccgagauccugcccgugagcaugaccaagacgagcgucgacugcaccauguacaucugcggggacuccaccgagugcagcaaccuccugcugcaguacggcuccuucugcacccagcucaaccgcgcgcugacggggaucgccguggagcaggacaagaacacccaggagguguucgcccaggucaagcagaucuacaagacgcccccgaucaaggacuucggcggguucaacuucagccagauccugcccgaccccuccaagcccagcaagcgguccuucaucgaggaccuccuguucaacaaggugacccuggccgacgccggcuucaucaagcaguacggcgacugccucggggacaucgcggcccgcgaccugaucugcgcccagaaguucaacggccugaccgugcucccgccccugcugaccgacgagaugaucgcccaguacaccagcgcccuccuggcggggaccaucacguccggcuggaccuucggggccggcgccgcccugcagauccccuucgcgaugcagauggccuaccgguucaacggcaucggggucacccagaacgugcucuacgagaaccagaagcugaucgccaaccaguucaacagcgccaucggcaagauccaggacucccugagcuccaccgccagcgcgcucgggaagcugcaggacguggucaaccagaacgcccaggcccugaacacgcucgugaagcagcuguccagcaacuucggcgccaucuccagcgugcugaacgacauccucucccgccuggacaaggucgaggccgaggugcagaucgaccggcugaucaccgggcgccuccagagccugcagaccuacgugacccagcagcugauccgggcggccgagauccgcgccagcgccaaccucgccgcgaccaagauguccgagugcguccugggccagagcaagcggguggacuucugcggcaagggguaccaccugauguccuucccccagagcgccccgcacggcguggucuuccuccacgugacguacguccccgcccaggagaagaacuucaccaccgcccccgcgaucugccacgacgggaaggcccacuucccccgcgagggcguguucguguccaacgggacccacugguucgucacgcagcggaacuucuacgagccgcagaucaucaccaccgacaacaccuucgugagcggcaacugcgacguggucaucggcaucgugaacaacacgguguacgacccccugcagcccgagcuggacuccuucaaggaggagcucgacaaguacuucaagaaccacaccagccccgacgucgaccugggggacaucuccggcaucaacgccagcguggugaacauccagaaggagaucgaccgccugaacgaggucgccaagaaccucaacgagucccugaucgaccugcaggagcucgggaaguacgagcaguacaucaaguggccgugguacaucuggcugggcuucaucgccggccugaucgcgaucgugauggugaccaucaugcucugcugcaugaccagcugcugcuccugccugaaggggugcugcagcugcggcuccugcugcaaguucgacgaggacgacagcgagcccguccugaagggggugaagcuccacuacacgugaggacuaguuauaagacugacuagcccgaugggccucccaacgggcccuccuccccuccuugcaccgagauuaauagaucucaaaggcucuuuucagagccaccaaaaaaaaaaaaaaaaaaaaaaaaaaaaaaaaaaaaaaaaaaaaaaaaaaaaaaaaaaaaaaaaaaaaaaaaaaaaaaaaaaaaaaaaaaaaaaaaaaaaa

SEQ ID NO: 24307 - RNA, 4041 nt, Artificial Sequence; identical to SEQ ID NO: 24289
  SARS-CoV-2/Wuhan/WIV05/2019__EPI_ISL_402128 spike protein mRNA gc (1-1273)

SEQ ID NO: 24308 - RNA, 4041 nt, Artificial Sequence
  SARS-CoV-2/Wuhan/WIV05/2019__EPI_ISL_402128 spike protein mRNA gc (1-1273)(D614G)
aggagaaagcuuaccauguucguguuccugguccuccugccccuggugagcucccagugcgugaaccucaccacccgcacgcagcugccgcccgccuacaccaacagcuucacccggggcgucuacuaccccgacaagguguuccgcuccagcgugcugcacuccacccaggaccucuuccugcccuucuucagcaacgucacgugguuccacgccauccacguguccgggaccaacggcaccaagcgguucgacaacccggugcugcccuucaacgacggggucuacuucgcgagcaccgagaaguccaacaucauccgcggcuggaucuucgggacgacccucgacagcaagacccagucccugcugaucgugaacaacgccaccaacguggucaucaaggugugcgaguuccaguucugcaacgaccccuuccucggcguguacuaccacaagaacaacaagagcuggauggaguccgaguuccgggucuacagcuccgccaacaacugcacguucgaguacgugagccagcccuuccugauggaccuggagggcaagcaggggaacuucaagaaccuccgcgaguucguguucaagaacaucgacggcuacuucaagaucuacuccaagcacaccccgaucaaccugguccgggaccugccccagggguucagcgcccucgagccccugguggaccugcccaucggcaucaacaucacccgcuuccagacccuccuggcccugcaccgguccuaccucacgccgggggacagcagcuccggcuggaccgcgggcgccgccgccuacuacgugggguaccugcagccccgcaccuuccugcucaaguacaacgagaacggcaccaucacggacgcggucgacugcgcccuggacccccugagcgagaccaagugcacccucaaguccuucaccguggagaaggggaucuaccagacgagcaacuuccgggugcagcccaccgaguccaucguccgcuucccgaacaucaccaaccugugccccuucggcgagguguucaacgccacccgguucgccagcgucuacgccuggaaccgcaagcggaucuccaacugcguggcggacuacagcgugcuguacaacuccgccagcuucuccacguucaagugcuacggcgucagccccaccaagcucaacgaccugugcuucaccaacguguacgccgacuccuucgugauccgcggggacgagguccggcagaucgcccccggccagaccgggaagaucgccgacuacaacuacaagcugccggacgacuucacgggcugcgugaucgcguggaacagcaacaaccucgacuccaaggucgggggcaacuacaacuaccuguaccgccuguuccgcaagagcaaccucaagcccuucgagcgggacaucuccaccgagaucuaccaggccggcagcacccccugcaacgggguggagggcuucaacugcuacuucccccugcaguccuacggguuccagccgaccaacggcgugggguaccagcccuaccggguggucgugcugagcuucgagcuccugcacgcccccgccacggugugcggccccaagaaguccaccaaccuggucaagaacaagugcgugaacuucaacuucaacggccucaccgggaccggcgugcugaccgagagcaacaagaaguuccugccguuccagcaguucgggcgcgacaucgccgacacgaccgacgcgguccgcgacccccagacccuggagauccucgacaucacccccugcagcuucggcgggguguccgugaucacgccgggcaccaacaccagcaaccaggucgccgugcuguaccagggcgugaacugcaccgagguccccguggccauccacgccgaccagcugacgcccaccuggcggguguacuccaccgggagcaacgucuuccagacccgcgccggcugccucaucggggcggagcacgugaacaacuccuacgagugcgacauccccaucggcgccggcaucugcgccagcuaccagacgcagaccaacuccccgcggcgcgcccggagcguggcgucccagagcaucaucgccuacaccaugucccugggggccgagaacagcgucgccuacuccaacaacagcaucgccauccccaccaacuucacgaucuccgugaccaccgagauccugcccgugagcaugaccaagacgagcgucgacugcaccauguacaucugcggcgacuccaccgagugcagcaaccuccugcugcaguacggguccuucugcacccagcucaaccgcgcgcugacgggcaucgccguggagcaggacaagaacacccaggagguguucgcccaggucaagcagaucuacaagacgcccccgaucaaggacuucgggggcuucaacuucagccagauccugcccgaccccuccaagcccagcaagcgguccuucaucgaggaccuccuguucaacaaggugacccuggccgacgccggcuucaucaagcaguacggggacugccucggcgacaucgcggcccgcgaccugaucugcgcccagaaguucaacgggcugaccgugcucccgccccugcugaccgacgagaugaucgcccaguacaccagcgcccuccuggcgggcaccaucacguccggguggaccuucggcgccggcgccgcccugcagauccccuucgcgaugcagauggccuaccgguucaacgggaucggcgucacccagaacgugcucuacgagaaccagaagcugaucgccaaccaguucaacagcgccaucgggaagauccaggacucccugagcuccaccgccagcgcgcucggcaagcugcaggacguggucaaccagaacgcccaggcccugaacacgcucgugaagcagcuguccagcaacuucggggccaucuccagcgugcugaacgacauccucucccgccuggacaaggucgaggccgaggugcagaucgaccggcugaucaccggccgccuccagagccugcagaccuacgugacccagcagcugauccgggcggccgagauccgcgccagcgccaaccucgccgcgaccaagauguccgagugcguccugggccagagcaagcggguggacuucugcgggaagggcuaccaccugauguccuucccccagagcgccccgcacgggguggucuuccuccacgugacguacguccccgcccaggagaagaacuucaccaccgcccccgcgaucugccacgacggcaaggcccacuucccccgcgaggggguguucguguccaacggcacccacugguucgucacgcagcggaacuucuacgagccgcagaucaucaccaccgacaacaccuucgugagcggcaacugcgacguggucaucgggaucgugaacaacacgguguacgacccccugcagcccgagcuggacuccuucaaggaggagcucgacaaguacuucaagaaccacaccagccccgacgucgaccugggcgacaucuccgggaucaacgccagcguggugaacauccagaaggagaucgaccgccugaacgaggucgccaagaaccucaacgagucccugaucgaccugcaggagcucggcaaguacgagcaguacaucaaguggccgugguacaucuggcugggcuucaucgccgggcugaucgcgaucgugauggugaccaucaugcucugcugcaugaccagcugcugcuccugccugaagggcugcugcagcugcggguccugcugcaaguucgacgaggacgacagcgagcccguccugaagggcgugaagcuccacuacacgugaggacuaguuauaagacugacuagcccgaugggccucccaacgggcccuccuccccuccuugcaccgagauuaauagaucucaaaggcucuuuucagagccaccaaaaaaaaaaaaaaaaaaaaaaaaaaaaaaaaaaaaaaaaaaaaaaaaaaaaaaaaaaaaaaaaaaaaaaaaaaaaaaaaaaaaaaaaaaaaaaaaaaaaa

SEQ ID NO: 24309 - RNA, 4041 nt, Artificial Sequence
  SARS-CoV-2/Wuhan/WIV05/2019__EPI_ISL_402128 spike protein mRNA gc (1-1273)(A222V_D614G)
aggagaaagcuuaccauguucguguuccugguccuccugccccuggugagcucccagugcgugaaccucaccacccgcacgcagcugccgcccgccuacaccaacagcuucacccggggcgucuacuaccccgacaagguguuccgcuccagcgugcugcacuccacccaggaccucuuccugcccuucuucagcaacgucacgugguuccacgccauccacguguccgggaccaacggcaccaagcgguucgacaacccggugcugcccuucaacgacggggucuacuucgcgagcaccgagaaguccaacaucauccgcggcuggaucuucgggacgacccucgacagcaagacccagucccugcugaucgugaacaacgccaccaacguggucaucaaggugugcgaguuccaguucugcaacgaccccuuccucggcguguacuaccacaagaacaacaagagcuggauggaguccgaguuccgggucuacagcuccgccaacaacugcacguucgaguacgugagccagcccuuccugauggaccuggagggcaagcaggggaacuucaagaaccuccgcgaguucguguucaagaacaucgacggcuacuucaagaucuacuccaagcacaccccgaucaaccugguccgggaccugccccagggguucagcgugcucgagccccugguggaccugcccaucggcaucaacaucacccgcuuccagacccuccuggcccugcaccgguccuaccucacgccgggggacagcagcuccggcuggaccgccggcgcggccgccuacuacgucggguaccugcagccccgcaccuuccugcucaaguacaacgagaacggcaccaucacggacgccguggacugcgcgcuggacccccugagcgagaccaagugcacccucaaguccuucaccguggagaaggggaucuaccagacgagcaacuuccggguccagcccaccgaguccaucgugcgcuucccgaacaucaccaaccugugccccuucggcgaggucuucaacgccacccgguucgccagcguguacgccuggaaccgcaagcggaucuccaacugcguggccgacuacagcguccuguacaacuccgcgagcuucuccacguucaagugcuacggcgugagccccaccaagcucaacgaccugugcuucaccaacguguacgccgacuccuucgucauccgcggggacgaggugcggcagaucgcccccggccagaccgggaagaucgccgacuacaacuacaagcugccggacgacuucacgggcugcgugaucgccuggaacagcaacaaccucgacuccaaggucgggggcaacuacaacuaccuguaccgccuguuccgcaagagcaaccucaagcccuucgagcgggacaucuccaccgagaucuaccaggcgggcagcacccccugcaacgggguggagggcuucaacugcuacuucccccugcaguccuacggguuccagccgaccaacggcgugggguaccagcccuaccgggucguggugcugagcuucgagcuccugcacgcccccgccacggucugcggccccaagaaguccaccaaccuggugaagaacaagugcgugaacuucaacuucaacggccucaccgggaccggcguccugaccgagagcaacaagaaguuccugccguuccagcaguucgggcgcgacaucgccgacacgaccgacgccgugcgcgacccccagacccuggagauccucgacaucacccccugcagcuucggcgggguguccgucaucacgccgggcaccaacaccagcaaccagguggcggugcuguaccagggcgucaacugcaccgaggugcccguggccauccacgccgaccagcugacgcccaccuggcgggucuacuccaccgggagcaacguguuccagacccgcgccggcugccucaucggggccgagcacgugaacaacuccuacgagugcgacauccccaucggcgcgggcaucugcgccagcuaccagacgcagaccaacuccccgcggcgcgcccggagcgucgccucccagagcaucaucgcguacaccaugucccugggggccgagaacagcguggccuacuccaacaacagcaucgccauccccaccaacuucacgaucuccgugaccaccgagauccugcccgucagcaugaccaagacgagcguggacugcaccauguacaucugcggcgacuccaccgagugcagcaaccuccugcugcaguacggguccuucugcacccagcucaaccgcgcccugacgggcaucgcgguggagcaggacaagaacacccaggaggucuucgcccaggugaagcagaucuacaagacgcccccgaucaaggacuucgggggcuucaacuucagccagauccugcccgaccccuccaagcccagcaagcgguccuucaucgaggaccuccuguucaacaaggugacccuggccgacgccggcuucaucaagcaguacggggacugccucggcgacaucgccgcgcgcgaccugaucugcgcccagaaguucaacgggcugaccguccucccgccccugcugaccgacgagaugaucgcccaguacaccagcgcccuccuggccggcaccaucacguccggguggaccuucggcgcgggcgccgcccugcagauccccuucgccaugcagauggcguaccgguucaacgggaucggcgugacccagaacgugcucuacgagaaccagaagcugaucgccaaccaguucaacagcgccaucgggaagauccaggacucccugagcuccaccgccagcgcccucggcaagcugcaggacgucgugaaccagaacgcgcaggcccugaacacgcucgugaagcagcuguccagcaacuucggggccaucuccagcguccugaacgacauccucucccgccuggacaagguggaggccgaggugcagaucgaccggcugaucaccggccgccuccagagccugcagaccuacgucacccagcagcugauccgggccgcggagauccgcgccagcgccaaccucgccgccaccaagauguccgagugcgugcugggccagagcaagcggguggacuucugcgggaagggcuaccaccugauguccuucccccagagcgcgccgcacggggucguguuccuccacgucacguacgugcccgcccaggagaagaacuucaccaccgcccccgccaucugccacgacggcaaggcgcacuucccccgcgaggggguguucgucuccaacggcacccacugguucgugacgcagcggaacuucuacgagccgcagaucaucaccaccgacaacaccuucgugagcggcaacugcgacgucgugaucgggaucgugaacaacacggucuacgacccccugcagcccgagcuggacuccuucaaggaggagcucgacaaguacuucaagaaccacaccagccccgacguggaccugggcgacaucuccgggaucaacgccagcguggucaacauccagaaggagaucgaccgccugaacgagguggccaagaaccucaacgagucccugaucgaccugcaggagcucggcaaguacgagcaguacaucaaguggccgugguacaucuggcugggcuucaucgccgggcugaucgccaucgugauggucaccaucaugcucugcugcaugaccagcugcugcuccugccugaagggcugcugcagcugcggguccugcugcaaguucgacgaggacgacagcgagcccgugcugaagggcgugaagcuccacuacacgugaggacuaguuauaagacugacuagcccgaugggccucccaacgggcccuccuccccuccuugcaccgagauuaauagaucucaaaggcucuuuucagagccaccaaaaaaaaaaaaaaaaaaaaaaaaaaaaaaaaaaaaaaaaaaaaaaaaaaaaaaaaaaaaaaaaaaaaaaaaaaaaaaaaaaaaaaaaaaaaaaaaaaaaa

SEQ ID NO: 24310 - RNA, 4041 nt, Artificial Sequence
  SARS-CoV-2/Wuhan/WIV05/2019__EPI_ISL_402128 spike protein mRNA gc (1-1273)(N439K_D614G)
aggagaaagcuuaccauguucguguuccugguccuccugccccuggugagcucccagugcgugaaccucaccacccgcacgcagcugccgcccgccuacaccaacagcuucacccggggcgucuacuaccccgacaagguguuccgcuccagcgugcugcacuccacccaggaccucuuccugcccuucuucagcaacgucacgugguuccacgccauccacguguccgggaccaacggcaccaagcgguucgacaacccggugcugcccuucaacgacggggucuacuucgcgagcaccgagaaguccaacaucauccgcggcuggaucuucgggacgacccucgacagcaagacccagucccugcugaucgugaacaacgccaccaacguggucaucaaggugugcgaguuccaguucugcaacgaccccuuccucggcguguacuaccacaagaacaacaagagcuggauggaguccgaguuccgggucuacagcuccgccaacaacugcacguucgaguacgugagccagcccuuccugauggaccuggagggcaagcaggggaacuucaagaaccuccgcgaguucguguucaagaacaucgacggcuacuucaagaucuacuccaagcacaccccgaucaaccugguccgggaccugccccagggguucagcgcccucgagccccugguggaccugcccaucggcaucaacaucacccgcuuccagacccuccuggcccugcaccgguccuaccucacgccgggggacagcagcuccggcuggaccgcgggcgccgccgccuacuacgugggguaccugcagccccgcaccuuccugcucaaguacaacgagaacggcaccaucacggacgcggucgacugcgcccuggacccccugagcgagaccaagugcacccucaaguccuucaccguggagaaggggaucuaccagacgagcaacuuccgggugcagcccaccgaguccaucguccgcuucccgaacaucaccaaccugugccccuucggcgagguguucaacgccacccgguucgccagcgucuacgccuggaaccgcaagcggaucuccaacugcguggcggacuacagcgugcuguacaacuccgccagcuucuccacguucaagugcuacggcgucagccccaccaagcucaacgaccugugcuucaccaacguguacgccgacuccuucgugauccgcggggacgagguccggcagaucgcccccggccagaccgggaagaucgccgacuacaacuacaagcugccggacgacuucacgggcugcgugaucgcguggaacagcaagaaccucgacuccaaggucgggggcaacuacaacuaccuguaccgccuguuccgcaagagcaaccucaagcccuucgagcgggacaucuccaccgagaucuaccaggccggcagcacccccugcaacgggguggagggcuucaacugcuacuucccccugcaguccuacggguuccagccgaccaacggcgugggguaccagcccuaccggguggucgugcugagcuucgagcuccugcacgcccccgccacggugugcggccccaagaaguccaccaaccuggucaagaacaagugcgugaacuucaacuucaacggccucaccgggaccggcgugcugaccgagagcaacaagaaguuccugccguuccagcaguucgggcgcgacaucgccgacacgaccgacgcgguccgcgacccccagacccuggagauccucgacaucacccccugcagcuucggcgggguguccgugaucacgccgggcaccaacaccagcaaccaggucgccgugcuguaccagggcgugaacugcaccgagguccccguggccauccacgccgaccagcugacgcccaccuggcggguguacuccaccgggagcaacgucuuccagacccgcgccggcugccucaucggggcggagcacgugaacaacuccuacgagugcgacauccccaucggcgccggcaucugcgccagcuaccagacgcagaccaacuccccgcggcgcgcccggagcguggcgucccagagcaucaucgccuacaccaugucccugggggccgagaacagcgucgccuacuccaacaacagcaucgccauccccaccaacuucacgaucuccgugaccaccgagauccugcccgugagcaugaccaagacgagcgucgacugcaccauguacaucugcggcgacuccaccgagugcagcaaccuccugcugcaguacggguccuucugcacccagcucaaccgcgcgcugacgggcaucgccguggagcaggacaagaacacccaggagguguucgcccaggucaagcagaucuacaagacgcccccgaucaaggacuucgggggcuucaacuucagccagauccugcccgaccccuccaagcccagcaagcgguccuucaucgaggaccuccuguucaacaaggugacccuggccgacgccggcuucaucaagcaguacggggacugccucggcgacaucgcggcccgcgaccugaucugcgcccagaaguucaacgggcugaccgugcucccgccccugcugaccgacgagaugaucgcccaguacaccagcgcccuccuggcgggcaccaucacguccggguggaccuucggcgccggcgccgcccugcagauccccuucgcgaugcagauggccuaccgguucaacgggaucggcgucacccagaacgugcucuacgagaaccagaagcugaucgccaaccaguucaacagcgccaucgggaagauccaggacucccugagcuccaccgccagcgcgcucggcaagcugcaggacguggucaaccagaacgcccaggcccugaacacgcucgugaagcagcuguccagcaacuucggggccaucuccagcgugcugaacgacauccucucccgccuggacaaggucgaggccgaggugcagaucgaccggcugaucaccggccgccuccagagccugcagaccuacgugacccagcagcugauccgggcggccgagauccgcgccagcgccaaccucgccgcgaccaagauguccgagugcguccugggccagagcaagcggguggacuucugcgggaagggcuaccaccugauguccuucccccagagcgccccgcacgggguggucuuccuccacgugacguacguccccgcccaggagaagaacuucaccaccgcccccgcgaucugccacgacggcaaggcccacuucccccgcgaggggguguucguguccaacggcacccacugguucgucacgcagcggaacuucuacgagccgcagaucaucaccaccgacaacaccuucgugagcggcaacugcgacguggucaucgggaucgugaacaacacgguguacgacccccugcagcccgagcuggacuccuucaaggaggagcucgacaaguacuucaagaaccacaccagccccgacgucgaccugggcgacaucuccgggaucaacgccagcguggugaacauccagaaggagaucgaccgccugaacgaggucgccaagaaccucaacgagucccugaucgaccugcaggagcucggcaaguacgagcaguacaucaaguggccgugguacaucuggcugggcuucaucgccgggcugaucgcgaucgugauggugaccaucaugcucugcugcaugaccagcugcugcuccugccugaagggcugcugcagcugcggguccugcugcaaguucgacgaggacgacagcgagcccguccugaagggcgugaagcuccacuacacgugaggacuaguuauaagacugacuagcccgaugggccucccaacgggcccuccuccccuccuugcaccgagauuaauagaucucaaaggcucuuuucagagccaccaaaaaaaaaaaaaaaaaaaaaaaaaaaaaaaaaaaaaaaaaaaaaaaaaaaaaaaaaaaaaaaaaaaaaaaaaaaaaaaaaaaaaaaaaaaaaaaaaaaaa

SEQ ID NO: 24311 - RNA, 4041 nt, Artificial Sequence
  SARS-CoV-2/Wuhan/WIV05/2019__EPI_ISL_402128 spike protein mRNA gc (1-1273)(S477N_D614G)
aggagaaagcuuaccauguucguguuccugguccuccugccccuggugagcucccagugcgugaaccucaccacccgcacgcagcugccgcccgccuacaccaacagcuucacccggggcgucuacuaccccgacaagguguuccgcuccagcgugcugcacuccacccaggaccucuuccugcccuucuucagcaacgucacgugguuccacgccauccacguguccgggaccaacggcaccaagcgguucgacaacccggugcugcccuucaacgacggggucuacuucgcgagcaccgagaaguccaacaucauccgcggcuggaucuucgggacgacccucgacagcaagacccagucccugcugaucgugaacaacgccaccaacguggucaucaaggugugcgaguuccaguucugcaacgaccccuuccucggcguguacuaccacaagaacaacaagagcuggauggaguccgaguuccgggucuacagcuccgccaacaacugcacguucgaguacgugagccagcccuuccugauggaccuggagggcaagcaggggaacuucaagaaccuccgcgaguucguguucaagaacaucgacggcuacuucaagaucuacuccaagcacaccccgaucaaccugguccgggaccugccccagggguucagcgcccucgagccccugguggaccugcccaucggcaucaacaucacccgcuuccagacccuccuggcccugcaccgguccuaccucacgccgggggacagcagcuccggcuggaccgcgggcgccgccgccuacuacgugggguaccugcagccccgcaccuuccugcucaaguacaacgagaacggcaccaucacggacgcggucgacugcgcccuggacccccugagcgagaccaagugcacccucaaguccuucaccguggagaaggggaucuaccagacgagcaacuuccgggugcagcccaccgaguccaucguccgcuucccgaacaucaccaaccugugccccuucggcgagguguucaacgccacccgguucgccagcgucuacgccuggaaccgcaagcggaucuccaacugcguggcggacuacagcgugcuguacaacuccgccagcuucuccacguucaagugcuacggcgucagccccaccaagcucaacgaccugugcuucaccaacguguacgccgacuccuucgugauccgcggggacgagguccggcagaucgcccccggccagaccgggaagaucgccgacuacaacuacaagcugccggacgacuucacgggcugcgugaucgcguggaacagcaacaaccucgacuccaaggucgggggcaacuacaacuaccuguaccgccuguuccgcaagagcaaccucaagcccuucgagcgggacaucuccaccgagaucuaccaggccggcaacacccccugcaacgggguggagggcuucaacugcuacuucccccugcagagcuacggguuccagccgaccaacggcgugggguaccagcccuaccggguggucgugcuguccuucgagcuccugcacgcccccgccacggugugcggccccaagaaguccaccaaccuggucaagaacaagugcgugaacuucaacuucaacggccucaccgggaccggcgugcugaccgagagcaacaagaaguuccugccguuccagcaguucgggcgcgacaucgccgacacgaccgacgcgguccgcgacccccagacccuggagauccucgacaucacccccugcagcuucggcggggugagcgugaucacgccgggcaccaacaccuccaaccaggucgccgugcuguaccagggcgugaacugcaccgagguccccguggccauccacgccgaccagcugacgcccaccuggcggguguacagcaccggguccaacgucuuccagacccgcgccggcugccucaucggggcggagcacgugaacaacagcuacgagugcgacauccccaucggcgccggcaucugcgccuccuaccagacgcagaccaacagcccgcggcgcgcccgguccguggcgagccaguccaucaucgccuacaccaugagccugggggccgagaacuccgucgccuacagcaacaacuccaucgccauccccaccaacuucacgaucagcgugaccaccgagauccugcccguguccaugaccaagacgagcgucgacugcaccauguacaucugcggcgacagcaccgagugcuccaaccuccugcugcaguacgggagcuucugcacccagcucaaccgcgcgcugacgggcaucgccguggagcaggacaagaacacccaggagguguucgcccaggucaagcagaucuacaagacgcccccgaucaaggacuucgggggcuucaacuucucccagauccugcccgaccccagcaagcccuccaagcggagcuucaucgaggaccuccuguucaacaaggugacccuggccgacgccggcuucaucaagcaguacggggacugccucggcgacaucgcggcccgcgaccugaucugcgcccagaaguucaacgggcugaccgugcucccgccccugcugaccgacgagaugaucgcccaguacaccuccgcccuccuggcgggcaccaucacgagcggguggaccuucggcgccggcgccgcccugcagauccccuucgcgaugcagauggccuaccgguucaacgggaucggcgucacccagaacgugcucuacgagaaccagaagcugaucgccaaccaguucaacuccgccaucgggaagauccaggacagccuguccagcaccgccuccgcgcucggcaagcugcaggacguggucaaccagaacgcccaggcccugaacacgcucgugaagcagcugagcuccaacuucggggccaucagcuccgugcugaacgacauccucagccgccuggacaaggucgaggccgaggugcagaucgaccggcugaucaccggccgccuccagucccugcagaccuacgugacccagcagcugauccgggcggccgagauccgcgccagcgccaaccucgccgcgaccaagaugagcgagugcguccugggccaguccaagcggguggacuucugcgggaagggcuaccaccugaugagcuucccccaguccgccccgcacgggguggucuuccuccacgugacguacguccccgcccaggagaagaacuucaccaccgcccccgcgaucugccacgacggcaaggcccacuucccccgcgaggggguguucgugagcaacggcacccacugguucgucacgcagcggaacuucuacgagccgcagaucaucaccaccgacaacaccuucguguccggcaacugcgacguggucaucgggaucgugaacaacacgguguacgacccccugcagcccgagcuggacagcuucaaggaggagcucgacaaguacuucaagaaccacaccucccccgacgucgaccugggcgacaucagcgggaucaacgccuccguggugaacauccagaaggagaucgaccgccugaacgaggucgccaagaaccucaacgagagccugaucgaccugcaggagcucggcaaguacgagcaguacaucaaguggccgugguacaucuggcugggcuucaucgccgggcugaucgcgaucgugauggugaccaucaugcucugcugcaugaccuccugcugcagcugccugaagggcugcugcuccugcgggagcugcugcaaguucgacgaggacgacuccgagcccguccugaagggcgugaagcuccacuacacgugaggacuaguuauaagacugacuagcccgaugggccucccaacgggcccuccuccccuccuugcaccgagauuaauagaucucaaaggcucuuuucagagccaccaaaaaaaaaaaaaaaaaaaaaaaaaaaaaaaaaaaaaaaaaaaaaaaaaaaaaaaaaaaaaaaaaaaaaaaaaaaaaaaaaaaaaaaaaaaaaaaaaaaaa

SEQ ID NO: 24312 - RNA, 4041 nt, Artificial Sequence
  SARS-CoV-2/Wuhan/WIV05/2019__EPI_ISL_402128 spike protein mRNA gc (1-1273)(N501Y_D614G)
aggagaaagcuuaccauguucguguuccugguccuccugccccuggugagcucccagugcgugaaccucaccacccgcacgcagcugccgcccgccuacaccaacagcuucacccggggcgucuacuaccccgacaagguguuccgcuccagcgugcugcacuccacccaggaccucuuccugcccuucuucagcaacgucacgugguuccacgccauccacguguccgggaccaacggcaccaagcgguucgacaacccggugcugcccuucaacgacggggucuacuucgcgagcaccgagaaguccaacaucauccgcggcuggaucuucgggacgacccucgacagcaagacccagucccugcugaucgugaacaacgccaccaacguggucaucaaggugugcgaguuccaguucugcaacgaccccuuccucggcguguacuaccacaagaacaacaagagcuggauggaguccgaguuccgggucuacagcuccgccaacaacugcacguucgaguacgugagccagcccuuccugauggaccuggagggcaagcaggggaacuucaagaaccuccgcgaguucguguucaagaacaucgacggcuacuucaagaucuacuccaagcacaccccgaucaaccugguccgggaccugccccagggguucagcgcccucgagccccugguggaccugcccaucggcaucaacaucacccgcuuccagacccuccuggcccugcaccgguccuaccucacgccgggggacagcagcuccggcuggaccgcgggcgccgccgccuacuacgugggguaccugcagccccgcaccuuccugcucaaguacaacgagaacggcaccaucacggacgcggucgacugcgcccuggacccccugagcgagaccaagugcacccucaaguccuucaccguggagaaggggaucuaccagacgagcaacuuccgggugcagcccaccgaguccaucguccgcuucccgaacaucaccaaccugugccccuucggcgagguguucaacgccacccgguucgccagcgucuacgccuggaaccgcaagcggaucuccaacugcguggcggacuacagcgugcuguacaacuccgccagcuucuccacguucaagugcuacggcgucagccccaccaagcucaacgaccugugcuucaccaacguguacgccgacuccuucgugauccgcggggacgagguccggcagaucgcccccggccagaccgggaagaucgccgacuacaacuacaagcugccggacgacuucacgggcugcgugaucgcguggaacagcaacaaccucgacuccaaggucgggggcaacuacaacuaccuguaccgccuguuccgcaagagcaaccucaagcccuucgagcgggacaucuccaccgagaucuaccaggccggcagcacccccugcaacgggguggagggcuucaacugcuacuucccccugcaguccuacggguuccagccgaccuacggcgugggguaccagcccuaccggguggucgugcugagcuucgagcuccugcacgcccccgccacggugugcggccccaagaaguccaccaaccuggucaagaacaagugcgugaacuucaacuucaacggccucaccgggaccggcgugcugaccgagagcaacaagaaguuccugccguuccagcaguucgggcgcgacaucgccgacacgaccgacgcgguccgcgacccccagacccuggagauccucgacaucacccccugcagcuucggcgggguguccgugaucacgccgggcaccaacaccagcaaccaggucgccgugcuguaccagggcgugaacugcaccgagguccccguggccauccacgccgaccagcugacgcccaccuggcggguguacuccaccgggagcaacgucuuccagacccgcgccggcugccucaucggggcggagcacgugaacaacuccuacgagugcgacauccccaucggcgccggcaucugcgccagcuaccagacgcagaccaacuccccgcggcgcgcccggagcguggcgucccagagcaucaucgccuacaccaugucccugggggccgagaacagcgucgccuacuccaacaacagcaucgccauccccaccaacuucacgaucuccgugaccaccgagauccugcccgugagcaugaccaagacgagcgucgacugcaccauguacaucugcggcgacuccaccgagugcagcaaccuccugcugcaguacggguccuucugcacccagcucaaccgcgcgcugacgggcaucgccguggagcaggacaagaacacccaggagguguucgcccaggucaagcagaucuacaagacgcccccgaucaaggacuucgggggcuucaacuucagccagauccugcccgaccccuccaagcccagcaagcgguccuucaucgaggaccuccuguucaacaaggugacccuggccgacgccggcuucaucaagcaguacggggacugccucggcgacaucgcggcccgcgaccugaucugcgcccagaaguucaacgggcugaccgugcucccgccccugcugaccgacgagaugaucgcccaguacaccagcgcccuccuggcgggcaccaucacguccggguggaccuucggcgccggcgccgcccugcagauccccuucgcgaugcagauggccuaccgguucaacgggaucggcgucacccagaacgugcucuacgagaaccagaagcugaucgccaaccaguucaacagcgccaucgggaagauccaggacucccugagcuccaccgccagcgcgcucggcaagcugcaggacguggucaaccagaacgcccaggcccugaacacgcucgugaagcagcuguccagcaacuucggggccaucuccagcgugcugaacgacauccucucccgccuggacaaggucgaggccgaggugcagaucgaccggcugaucaccggccgccuccagagccugcagaccuacgugacccagcagcugauccgggcggccgagauccgcgccagcgccaaccucgccgcgaccaagauguccgagugcguccugggccagagcaagcggguggacuucugcgggaagggcuaccaccugauguccuucccccagagcgccccgcacgggguggucuuccuccacgugacguacguccccgcccaggagaagaacuucaccaccgcccccgcgaucugccacgacggcaaggcccacuucccccgcgaggggguguucguguccaacggcacccacugguucgucacgcagcggaacuucuacgagccgcagaucaucaccaccgacaacaccuucgugagcggcaacugcgacguggucaucgggaucgugaacaacacgguguacgacccccugcagcccgagcuggacuccuucaaggaggagcucgacaaguacuucaagaaccacaccagccccgacgucgaccugggcgacaucuccgggaucaacgccagcguggugaacauccagaaggagaucgaccgccugaacgaggucgccaagaaccucaacgagucccugaucgaccugcaggagcucggcaaguacgagcaguacaucaaguggccgugguacaucuggcugggcuucaucgccgggcugaucgcgaucgugauggugaccaucaugcucugcugcaugaccagcugcugcuccugccugaagggcugcugcagcugcggguccugcugcaaguucgacgaggacgacagcgagcccguccugaagggcgugaagcuccacuacacgugaggacuaguuauaagacugacuagcccgaugggccucccaacgggcccuccuccccuccuugcaccgagauuaauagaucucaaaggcucuuuucagagccaccaaaaaaaaaaaaaaaaaaaaaaaaaaaaaaaaaaaaaaaaaaaaaaaaaaaaaaaaaaaaaaaaaaaaaaaaaaaaaaaaaaaaaaaaaaaaaaaaaaaaa

SEQ ID NO: 24313 - RNA, 4035 nt, Artificial Sequence
  SARS-CoV-2/Wuhan/WIV05/2019__EPI_ISL_402128 spike protein mRNA gc (1-1273)(H69del_V70del_D614G)
aggagaaagcuuaccauguucguguuccugguccuccugccccuggugagcucccagugcgugaaccucaccacccgcacgcagcugccgcccgccuacaccaacagcuucacccggggcgucuacuaccccgacaagguguuccgcuccagcgugcugcacuccacccaggaccucuuccugcccuucuucagcaacgucacgugguuccacgccaucuccgggaccaacggcaccaagcgguucgacaacccggugcugcccuucaacgacgggguguacuucgcgagcaccgagaaguccaacaucauccgcggcuggaucuucgggacgacccucgacagcaagacccagucccugcugaucgucaacaacgccaccaacguggugaucaaggucugcgaguuccaguucugcaacgaccccuuccucggcguguacuaccacaagaacaacaagagcuggauggaguccgaguuccggguguacagcuccgccaacaacugcacguucgaguacgucagccagcccuuccugauggaccuggagggcaagcaggggaacuucaagaaccuccgcgaguucguguucaagaacaucgacggcuacuucaagaucuacuccaagcacaccccgaucaaccuggugcgggaccugccccagggguucagcgcccucgagccccuggucgaccugcccaucggcaucaacaucacccgcuuccagacccuccuggcccugcaccgguccuaccucacgccgggggacagcagcuccggcuggaccgcgggcgccgccgccuacuacgugggguaccugcagccccgcaccuuccugcucaaguacaacgagaacggcaccaucacggacgcgguggacugcgcccuggacccccugagcgagaccaagugcacccucaaguccuucaccgucgagaaggggaucuaccagacgagcaacuuccgggugcagcccaccgaguccaucgugcgcuucccgaacaucaccaaccugugccccuucggcgaggucuucaacgccacccgguucgccagcguguacgccuggaaccgcaagcggaucuccaacugcgucgcggacuacagcgugcuguacaacuccgccagcuucuccacguucaagugcuacggcgugagccccaccaagcucaacgaccugugcuucaccaacgucuacgccgacuccuucgugauccgcggggacgaggugcggcagaucgcccccggccagaccgggaagaucgccgacuacaacuacaagcugccggacgacuucacgggcugcgucaucgcguggaacagcaacaaccucgacuccaaggucgggggcaacuacaacuaccuguaccgccuguuccgcaagagcaaccucaagcccuucgagcgggacaucuccaccgagaucuaccaggccggcagcacccccugcaacgggguggagggcuucaacugcuacuucccccugcaguccuacggguuccagccgaccaacggcgugggguaccagcccuaccggguggugguccugagcuucgagcuccugcacgcccccgccacggugugcggccccaagaaguccaccaaccuggugaagaacaagugcgucaacuucaacuucaacggccucaccgggaccggcgugcugaccgagagcaacaagaaguuccugccguuccagcaguucgggcgcgacaucgccgacacgaccgacgcggugcgcgacccccagacccuggagauccucgacaucacccccugcagcuucggcggggucuccgugaucacgccgggcaccaacaccagcaaccagguggccguccuguaccagggcgugaacugcaccgaggugcccgucgccauccacgccgaccagcugacgcccaccuggcggguguacuccaccgggagcaacguguuccagacccgcgccggcugccucaucggggcggagcacgucaacaacuccuacgagugcgacauccccaucggcgccggcaucugcgccagcuaccagacgcagaccaacuccccgcggcgcgcccggagcguggcgucccagagcaucaucgccuacaccaugucccugggggccgagaacagcguggccuacuccaacaacagcaucgccauccccaccaacuucacgaucuccgucaccaccgagauccugcccgugagcaugaccaagacgagcguggacugcaccauguacaucugcggcgacuccaccgagugcagcaaccuccugcugcaguacggguccuucugcacccagcucaaccgcgcgcugacgggcaucgccgucgagcaggacaagaacacccaggagguguucgcccaggugaagcagaucuacaagacgcccccgaucaaggacuucgggggcuucaacuucagccagauccugcccgaccccuccaagcccagcaagcgguccuucaucgaggaccuccuguucaacaaggucacccuggccgacgccggcuucaucaagcaguacggggacugccucggcgacaucgcggcccgcgaccugaucugcgcccagaaguucaacgggcugaccgugcucccgccccugcugaccgacgagaugaucgcccaguacaccagcgcccuccuggcgggcaccaucacguccggguggaccuucggcgccggcgccgcccugcagauccccuucgcgaugcagauggccuaccgguucaacgggaucggcgugacccagaacguccucuacgagaaccagaagcugaucgccaaccaguucaacagcgccaucgggaagauccaggacucccugagcuccaccgccagcgcgcucggcaagcugcaggacguggugaaccagaacgcccaggcccugaacacgcucgucaagcagcuguccagcaacuucggggccaucuccagcgugcugaacgacauccucucccgccuggacaagguggaggccgagguccagaucgaccggcugaucaccggccgccuccagagccugcagaccuacgugacccagcagcugauccgggcggccgagauccgcgccagcgccaaccucgccgcgaccaagauguccgagugcgugcugggccagagcaagcgggucgacuucugcgggaagggcuaccaccugauguccuucccccagagcgccccgcacggggugguguuccuccacgucacguacgugcccgcccaggagaagaacuucaccaccgcccccgcgaucugccacgacggcaaggcccacuucccccgcgagggggucuucguguccaacggcacccacugguucgugacgcagcggaacuucuacgagccgcagaucaucaccaccgacaacaccuucgucagcggcaacugcgacguggugaucgggaucgucaacaacacgguguacgacccccugcagcccgagcuggacuccuucaaggaggagcucgacaaguacuucaagaaccacaccagccccgacguggaccugggcgacaucuccgggaucaacgccagcgucgugaacauccagaaggagaucgaccgccugaacgagguggccaagaaccucaacgagucccugaucgaccugcaggagcucggcaaguacgagcaguacaucaaguggccgugguacaucuggcugggcuucaucgccgggcugaucgcgaucgucauggugaccaucaugcucugcugcaugaccagcugcugcuccugccugaagggcugcugcagcugcggguccugcugcaaguucgacgaggacgacagcgagcccgugcugaagggcgucaagcuccacuacacgugaggacuaguuauaagacugacuagcccgaugggccucccaacgggcccuccuccccuccuugcaccgagauuaauagaucucaaaggcucuuuucagagccaccaaaaaaaaaaaaaaaaaaaaaaaaaaaaaaaaaaaaaaaaaaaaaaaaaaaaaaaaaaaaaaaaaaaaaaaaaaaaaaaaaaaaaaaaaaaaaaaaaaaaa

SEQ ID NO: 24314 - RNA, 4041 nt, Artificial Sequence
  SARS-CoV-2/Wuhan/WIV05/2019__EPI_ISL_402128 spike protein mRNA gc (1-1273)(Y453F_D614G)
aggagaaagcuuaccauguucguguuccugguccuccugccccuggugagcucccagugcgugaaccucaccacccgcacgcagcugccgcccgccuacaccaacagcuucacccggggcgucuacuaccccgacaagguguuccgcuccagcgugcugcacuccacccaggaccucuuccugcccuucuucagcaacgucacgugguuccacgccauccacguguccgggaccaacggcaccaagcgguucgacaacccggugcugcccuucaacgacggggucuacuucgcgagcaccgagaaguccaacaucauccgcggcuggaucuucgggacgacccucgacagcaagacccagucccugcugaucgugaacaacgccaccaacguggucaucaaggugugcgaguuccaguucugcaacgaccccuuccucggcguguacuaccacaagaacaacaagagcuggauggaguccgaguuccgggucuacagcuccgccaacaacugcacguucgaguacgugagccagcccuuccugauggaccuggagggcaagcaggggaacuucaagaaccuccgcgaguucguguucaagaacaucgacggcuacuucaagaucuacuccaagcacaccccgaucaaccugguccgggaccugccccagggguucagcgcccucgagccccugguggaccugcccaucggcaucaacaucacccgcuuccagacccuccuggcccugcaccgguccuaccucacgccgggggacagcagcuccggcuggaccgcgggcgccgccgccuacuacgugggguaccugcagccccgcaccuuccugcucaaguacaacgagaacggcaccaucacggacgcggucgacugcgcccuggacccccugagcgagaccaagugcacccucaaguccuucaccguggagaaggggaucuaccagacgagcaacuuccgggugcagcccaccgaguccaucguccgcuucccgaacaucaccaaccugugccccuucggcgagguguucaacgccacccgguucgccagcgucuacgccuggaaccgcaagcggaucuccaacugcguggcggacuacagcgugcuguacaacuccgccagcuucuccacguucaagugcuacggcgucagccccaccaagcucaacgaccugugcuucaccaacguguacgccgacuccuucgugauccgcggggacgagguccggcagaucgcccccggccagaccgggaagaucgccgacuacaacuacaagcugccggacgacuucacgggcugcgugaucgcguggaacagcaacaaccucgacuccaaggucgggggcaacuacaacuaccuguuccgccuguuccgcaagagcaaccucaagcccuucgagcgggacaucuccaccgagaucuaccaggccggcagcacccccugcaacgggguggagggcuucaacugcuacuucccccugcaguccuacggguuccagccgaccaacggcgugggguaccagcccuaccggguggucgugcugagcuucgagcuccugcacgcccccgccacggugugcggccccaagaaguccaccaaccuggucaagaacaagugcgugaacuucaacuucaacggccucaccgggaccggcgugcugaccgagagcaacaagaaguuccugccguuccagcaguucgggcgcgacaucgccgacacgaccgacgcgguccgcgacccccagacccuggagauccucgacaucacccccugcagcuucggcgggguguccgugaucacgccgggcaccaacaccagcaaccaggucgccgugcuguaccagggcgugaacugcaccgagguccccguggccauccacgccgaccagcugacgcccaccuggcggguguacuccaccgggagcaacgucuuccagacccgcgccggcugccucaucggggcggagcacgugaacaacuccuacgagugcgacauccccaucggcgccggcaucugcgccagcuaccagacgcagaccaacuccccgcggcgcgcccggagcguggcgucccagagcaucaucgccuacaccaugucccugggggccgagaacagcgucgccuacuccaacaacagcaucgccauccccaccaacuucacgaucuccgugaccaccgagauccugcccgugagcaugaccaagacgagcgucgacugcaccauguacaucugcggcgacuccaccgagugcagcaaccuccugcugcaguacggguccuucugcacccagcucaaccgcgcgcugacgggcaucgccguggagcaggacaagaacacccaggagguguucgcccaggucaagcagaucuacaagacgcccccgaucaaggacuucgggggcuucaacuucagccagauccugcccgaccccuccaagcccagcaagcgguccuucaucgaggaccuccuguucaacaaggugacccuggccgacgccggcuucaucaagcaguacggggacugccucggcgacaucgcggcccgcgaccugaucugcgcccagaaguucaacgggcugaccgugcucccgccccugcugaccgacgagaugaucgcccaguacaccagcgcccuccuggcgggcaccaucacguccggguggaccuucggcgccggcgccgcccugcagauccccuucgcgaugcagauggccuaccgguucaacgggaucggcgucacccagaacgugcucuacgagaaccagaagcugaucgccaaccaguucaacagcgccaucgggaagauccaggacucccugagcuccaccgccagcgcgcucggcaagcugcaggacguggucaaccagaacgcccaggcccugaacacgcucgugaagcagcuguccagcaacuucggggccaucuccagcgugcugaacgacauccucucccgccuggacaaggucgaggccgaggugcagaucgaccggcugaucaccggccgccuccagagccugcagaccuacgugacccagcagcugauccgggcggccgagauccgcgccagcgccaaccucgccgcgaccaagauguccgagugcguccugggccagagcaagcggguggacuucugcgggaagggcuaccaccugauguccuucccccagagcgccccgcacgggguggucuuccuccacgugacguacguccccgcccaggagaagaacuucaccaccgcccccgcgaucugccacgacggcaaggcccacuucccccgcgaggggguguucguguccaacggcacccacugguucgucacgcagcggaacuucuacgagccgcagaucaucaccaccgacaacaccuucgugagcggcaacugcgacguggucaucgggaucgugaacaacacgguguacgacccccugcagcccgagcuggacuccuucaaggaggagcucgacaaguacuucaagaaccacaccagccccgacgucgaccugggcgacaucuccgggaucaacgccagcguggugaacauccagaaggagaucgaccgccugaacgaggucgccaagaaccucaacgagucccugaucgaccugcaggagcucggcaaguacgagcaguacaucaaguggccgugguacaucuggcugggcuucaucgccgggcugaucgcgaucgugauggugaccaucaugcucugcugcaugaccagcugcugcuccugccugaagggcugcugcagcugcggguccugcugcaaguucgacgaggacgacagcgagcccguccugaagggcgugaagcuccacuacacgugaggacuaguuauaagacugacuagcccgaugggccucccaacgggcccuccuccccuccuugcaccgagauuaauagaucucaaaggcucuuuucagagccaccaaaaaaaaaaaaaaaaaaaaaaaaaaaaaaaaaaaaaaaaaaaaaaaaaaaaaaaaaaaaaaaaaaaaaaaaaaaaaaaaaaaaaaaaaaaaaaaaaaaaa

SEQ ID NO: 24315 - RNA, 4041 nt, Artificial Sequence
  SARS-CoV-2/Wuhan/WIV05/2019__EPI_ISL_402128 spike protein mRNA gc (1-1273)(D614G_I692V)
aggagaaagcuuaccauguucguguuccugguccuccugccccuggugagcucccagugcgugaaccucaccacccgcacgcagcugccgcccgccuacaccaacagcuucacccggggcgucuacuaccccgacaagguguuccgcuccagcgugcugcacuccacccaggaccucuuccugcccuucuucagcaacgucacgugguuccacgccauccacguguccgggaccaacggcaccaagcgguucgacaacccggugcugcccuucaacgacggggucuacuucgcgagcaccgagaaguccaacaucauccgcggcuggaucuucgggacgacccucgacagcaagacccagucccugcugaucgugaacaacgccaccaacguggucaucaaggugugcgaguuccaguucugcaacgaccccuuccucggcguguacuaccacaagaacaacaagagcuggauggaguccgaguuccgggucuacagcuccgccaacaacugcacguucgaguacgugagccagcccuuccugauggaccuggagggcaagcaggggaacuucaagaaccuccgcgaguucguguucaagaacaucgacggcuacuucaagaucuacuccaagcacaccccgaucaaccugguccgggaccugccccagggguucagcgcccucgagccccugguggaccugcccaucggcaucaacaucacccgcuuccagacccuccuggcccugcaccgguccuaccucacgccgggggacagcagcuccggcuggaccgcgggcgccgccgccuacuacgugggguaccugcagccccgcaccuuccugcucaaguacaacgagaacggcaccaucacggacgcggucgacugcgcccuggacccccugagcgagaccaagugcacccucaaguccuucaccguggagaaggggaucuaccagacgagcaacuuccgggugcagcccaccgaguccaucguccgcuucccgaacaucaccaaccugugccccuucggcgagguguucaacgccacccgguucgccagcgucuacgccuggaaccgcaagcggaucuccaacugcguggcggacuacagcgugcuguacaacuccgccagcuucuccacguucaagugcuacggcgucagccccaccaagcucaacgaccugugcuucaccaacguguacgccgacuccuucgugauccgcggggacgagguccggcagaucgcccccggccagaccgggaagaucgccgacuacaacuacaagcugccggacgacuucacgggcugcgugaucgcguggaacagcaacaaccucgacuccaaggucgggggcaacuacaacuaccuguaccgccuguuccgcaagagcaaccucaagcccuucgagcgggacaucuccaccgagaucuaccaggccggcagcacccccugcaacgggguggagggcuucaacugcuacuucccccugcaguccuacggguuccagccgaccaacggcgugggguaccagcccuaccggguggucgugcugagcuucgagcuccugcacgcccccgccacggugugcggccccaagaaguccaccaaccuggucaagaacaagugcgugaacuucaacuucaacggccucaccgggaccggcgugcugaccgagagcaacaagaaguuccugccguuccagcaguucgggcgcgacaucgccgacacgaccgacgcgguccgcgacccccagacccuggagauccucgacaucacccccugcagcuucggcgggguguccgugaucacgccgggcaccaacaccagcaaccaggucgccgugcuguaccagggcgugaacugcaccgagguccccguggccauccacgccgaccagcugacgcccaccuggcggguguacuccaccgggagcaacgucuuccagacccgcgccggcugccucaucggggcggagcacgugaacaacuccuacgagugcgacauccccaucggcgccggcaucugcgccagcuaccagacgcagaccaacuccccgcggcgcgcccggagcguggcgucccagagcgucaucgccuacaccaugucccugggggccgagaacagcguggccuacuccaacaacagcaucgccauccccaccaacuucacgaucuccgugaccaccgagauccugcccgucagcaugaccaagacgagcguggacugcaccauguacaucugcggcgacuccaccgagugcagcaaccuccugcugcaguacggguccuucugcacccagcucaaccgcgcgcugacgggcaucgccguggagcaggacaagaacacccaggaggucuucgcccaggugaagcagaucuacaagacgcccccgaucaaggacuucgggggcuucaacuucagccagauccugcccgaccccuccaagcccagcaagcgguccuucaucgaggaccuccuguucaacaaggugacccuggccgacgccggcuucaucaagcaguacggggacugccucggcgacaucgcggcccgcgaccugaucugcgcccagaaguucaacgggcugaccguccucccgccccugcugaccgacgagaugaucgcccaguacaccagcgcccuccuggcgggcaccaucacguccggguggaccuucggcgccggcgccgcccugcagauccccuucgcgaugcagauggccuaccgguucaacgggaucggcgugacccagaacgugcucuacgagaaccagaagcugaucgccaaccaguucaacagcgccaucgggaagauccaggacucccugagcuccaccgccagcgcgcucggcaagcugcaggacgucgugaaccagaacgcccaggcccugaacacgcucgugaagcagcuguccagcaacuucggggccaucuccagcguccugaacgacauccucucccgccuggacaagguggaggccgaggugcagaucgaccggcugaucaccggccgccuccagagccugcagaccuacgucacccagcagcugauccgggcggccgagauccgcgccagcgccaaccucgccgcgaccaagauguccgagugcgugcugggccagagcaagcggguggacuucugcgggaagggcuaccaccugauguccuucccccagagcgccccgcacggggucguguuccuccacgucacguacgugcccgcccaggagaagaacuucaccaccgcccccgcgaucugccacgacggcaaggcccacuucccccgcgaggggguguucgucuccaacggcacccacugguucgugacgcagcggaacuucuacgagccgcagaucaucaccaccgacaacaccuucgugagcggcaacugcgacgucgugaucgggaucgugaacaacacggucuacgacccccugcagcccgagcuggacuccuucaaggaggagcucgacaaguacuucaagaaccacaccagccccgacguggaccugggcgacaucuccgggaucaacgccagcguggucaacauccagaaggagaucgaccgccugaacgagguggccaagaaccucaacgagucccugaucgaccugcaggagcucggcaaguacgagcaguacaucaaguggccgugguacaucuggcugggcuucaucgccgggcugaucgcgaucgugauggucaccaucaugcucugcugcaugaccagcugcugcuccugccugaagggcugcugcagcugcggguccugcugcaaguucgacgaggacgacagcgagcccgugcugaagggcgugaagcuccacuacacgugaggacuaguuauaagacugacuagcccgaugggccucccaacgggcccuccuccccuccuugcaccgagauuaauagaucucaaaggcucuuuucagagccaccaaaaaaaaaaaaaaaaaaaaaaaaaaaaaaaaaaaaaaaaaaaaaaaaaaaaaaaaaaaaaaaaaaaaaaaaaaaaaaaaaaaaaaaaaaaaaaaaaaaaa

SEQ ID NO: 24316 - RNA, 4041 nt, Artificial Sequence
  SARS-CoV-2/Wuhan/WIV05/2019__EPI_ISL_402128 spike protein mRNA gc (1-1273)(D614G_M1229I)
aggagaaagcuuaccauguucguguuccugguccuccugccccuggugagcucccagugcgugaaccucaccacccgcacgcagcugccgcccgccuacaccaacagcuucacccggggcgucuacuaccccgacaagguguuccgcuccagcgugcugcacuccacccaggaccucuuccugcccuucuucagcaacgucacgugguuccacgccauccacguguccgggaccaacggcaccaagcgguucgacaacccggugcugcccuucaacgacggggucuacuucgcgagcaccgagaaguccaacaucauccgcggcuggaucuucgggacgacccucgacagcaagacccagucccugcugaucgugaacaacgccaccaacguggucaucaaggugugcgaguuccaguucugcaacgaccccuuccucggcguguacuaccacaagaacaacaagagcuggauggaguccgaguuccgggucuacagcuccgccaacaacugcacguucgaguacgugagccagcccuuccugauggaccuggagggcaagcaggggaacuucaagaaccuccgcgaguucguguucaagaacaucgacggcuacuucaagaucuacuccaagcacaccccgaucaaccugguccgggaccugccccagggguucagcgcccucgagccccugguggaccugcccaucggcaucaacaucacccgcuuccagacccuccuggcccugcaccgguccuaccucacgccgggggacagcagcuccggcuggaccgcgggcgccgccgccuacuacgugggguaccugcagccccgcaccuuccugcucaaguacaacgagaacggcaccaucacggacgcggucgacugcgcccuggacccccugagcgagaccaagugcacccucaaguccuucaccguggagaaggggaucuaccagacgagcaacuuccgggugcagcccaccgaguccaucguccgcuucccgaacaucaccaaccugugccccuucggcgagguguucaacgccacccgguucgccagcgucuacgccuggaaccgcaagcggaucuccaacugcguggcggacuacagcgugcuguacaacuccgccagcuucuccacguucaagugcuacggcgucagccccaccaagcucaacgaccugugcuucaccaacguguacgccgacuccuucgugauccgcggggacgagguccggcagaucgcccccggccagaccgggaagaucgccgacuacaacuacaagcugccggacgacuucacgggcugcgugaucgcguggaacagcaacaaccucgacuccaaggucgggggcaacuacaacuaccuguaccgccuguuccgcaagagcaaccucaagcccuucgagcgggacaucuccaccgagaucuaccaggccggcagcacccccugcaacgggguggagggcuucaacugcuacuucccccugcaguccuacggguuccagccgaccaacggcgugggguaccagcccuaccggguggucgugcugagcuucgagcuccugcacgcccccgccacggugugcggccccaagaaguccaccaaccuggucaagaacaagugcgugaacuucaacuucaacggccucaccgggaccggcgugcugaccgagagcaacaagaaguuccugccguuccagcaguucgggcgcgacaucgccgacacgaccgacgcgguccgcgacccccagacccuggagauccucgacaucacccccugcagcuucggcgggguguccgugaucacgccgggcaccaacaccagcaaccaggucgccgugcuguaccagggcgugaacugcaccgagguccccguggccauccacgccgaccagcugacgcccaccuggcggguguacuccaccgggagcaacgucuuccagacccgcgccggcugccucaucggggcggagcacgugaacaacuccuacgagugcgacauccccaucggcgccggcaucugcgccagcuaccagacgcagaccaacuccccgcggcgcgcccggagcguggcgucccagagcaucaucgccuacaccaugucccugggggccgagaacagcgucgccuacuccaacaacagcaucgccauccccaccaacuucacgaucuccgugaccaccgagauccugcccgugagcaugaccaagacgagcgucgacugcaccauguacaucugcggcgacuccaccgagugcagcaaccuccugcugcaguacggguccuucugcacccagcucaaccgcgcgcugacgggcaucgccguggagcaggacaagaacacccaggagguguucgcccaggucaagcagaucuacaagacgcccccgaucaaggacuucgggggcuucaacuucagccagauccugcccgaccccuccaagcccagcaagcgguccuucaucgaggaccuccuguucaacaaggugacccuggccgacgccggcuucaucaagcaguacggggacugccucggcgacaucgcggcccgcgaccugaucugcgcccagaaguucaacgggcugaccgugcucccgccccugcugaccgacgagaugaucgcccaguacaccagcgcccuccuggcgggcaccaucacguccggguggaccuucggcgccggcgccgcccugcagauccccuucgcgaugcagauggccuaccgguucaacgggaucggcgucacccagaacgugcucuacgagaaccagaagcugaucgccaaccaguucaacagcgccaucgggaagauccaggacucccugagcuccaccgccagcgcgcucggcaagcugcaggacguggucaaccagaacgcccaggcccugaacacgcucgugaagcagcuguccagcaacuucggggccaucuccagcgugcugaacgacauccucucccgccuggacaaggucgaggccgaggugcagaucgaccggcugaucaccggccgccuccagagccugcagaccuacgugacccagcagcugauccgggcggccgagauccgcgccagcgccaaccucgccgcgaccaagauguccgagugcguccugggccagagcaagcggguggacuucugcgggaagggcuaccaccugauguccuucccccagagcgccccgcacgggguggucuuccuccacgugacguacguccccgcccaggagaagaacuucaccaccgcccccgcgaucugccacgacggcaaggcccacuucccccgcgaggggguguucguguccaacggcacccacugguucgucacgcagcggaacuucuacgagccgcagaucaucaccaccgacaacaccuucgugagcggcaacugcgacguggucaucgggaucgugaacaacacgguguacgacccccugcagcccgagcuggacuccuucaaggaggagcucgacaaguacuucaagaaccacaccagccccgacgucgaccugggcgacaucuccgggaucaacgccagcguggugaacauccagaaggagaucgaccgccugaacgaggucgccaagaaccucaacgagucccugaucgaccugcaggagcucggcaaguacgagcaguacaucaaguggccgugguacaucuggcugggcuucaucgccgggcugaucgcgaucgugaucgugaccaucaugcucugcugcaugaccagcugcugcuccugccugaagggcugcugcagcugcggguccugcugcaaguucgacgaggacgacagcgagcccguccugaagggcgugaagcuccacuacacgugaggacuaguuauaagacugacuagcccgaugggccucccaacgggcccuccuccccuccuugcaccgagauuaauagaucucaaaggcucuuuucagagccaccaaaaaaaaaaaaaaaaaaaaaaaaaaaaaaaaaaaaaaaaaaaaaaaaaaaaaaaaaaaaaaaaaaaaaaaaaaaaaaaaaaaaaaaaaaaaaaaaaaaaa

SEQ ID NO: 24317 - RNA, 4035 nt, Artificial Sequence
  SARS-CoV-2/Wuhan/WIV05/2019__EPI_ISL_402128 spike protein mRNA gc (1-1273)(H69del_V70del_A222V_Y453F_S477N_D614G_I692V)
aggagaaagcuuaccauguucguguuccugguccuccugccccuggugagcucccagugcgugaaccucaccacccgcacgcagcugccgcccgccuacaccaacagcuucacccggggcgucuacuaccccgacaagguguuccgcuccagcgugcugcacuccacccaggaccucuuccugcccuucuucagcaacgucacgugguuccacgccaucuccgggaccaacggcaccaagcgguucgacaacccggugcugcccuucaacgacgggguguacuucgcgagcaccgagaaguccaacaucauccgcggcuggaucuucgggacgacccucgacagcaagacccagucccugcugaucgucaacaacgccaccaacguggugaucaaggucugcgaguuccaguucugcaacgaccccuuccucggcguguacuaccacaagaacaacaagagcuggauggaguccgaguuccggguguacagcuccgccaacaacugcacguucgaguacgucagccagcccuuccugauggaccuggagggcaagcaggggaacuucaagaaccuccgcgaguucguguucaagaacaucgacggcuacuucaagaucuacuccaagcacaccccgaucaaccuggugcgggaccugccccagggguucagcguccucgagccccugguggaccugcccaucggcaucaacaucacccgcuuccagacccuccuggcccugcaccgguccuaccucacgccgggggacagcagcuccggcuggaccgccggcgcggccgccuacuacgugggguaccugcagccccgcaccuuccugcucaaguacaacgagaacggcaccaucacggacgccgucgacugcgcgcuggacccccugagcgagaccaagugcacccucaaguccuucaccguggagaaggggaucuaccagacgagcaacuuccgggugcagcccaccgaguccaucguccgcuucccgaacaucaccaaccugugccccuucggcgagguguucaacgccacccgguucgccagcgucuacgccuggaaccgcaagcggaucuccaacugcguggccgacuacagcgugcuguacaacuccgcgagcuucuccacguucaagugcuacggcgucagccccaccaagcucaacgaccugugcuucaccaacguguacgccgacuccuucgugauccgcggggacgagguccggcagaucgcccccggccagaccgggaagaucgccgacuacaacuacaagcugccggacgacuucacgggcugcgugaucgccuggaacagcaacaaccucgacuccaaggucgggggcaacuacaacuaccuguuccgccuguuccgcaagagcaaccucaagcccuucgagcgggacaucuccaccgagaucuaccaggcgggcaacacccccugcaacgggguggagggcuucaacugcuacuucccccugcagagcuacggguuccagccgaccaacggcgugggguaccagcccuaccggguggucgugcuguccuucgagcuccugcacgcccccgccacggugugcggccccaagaaguccaccaaccuggucaagaacaagugcgugaacuucaacuucaacggccucaccgggaccggcgugcugaccgagagcaacaagaaguuccugccguuccagcaguucgggcgcgacaucgccgacacgaccgacgccguccgcgacccccagacccuggagauccucgacaucacccccugcagcuucggcggggugagcgugaucacgccgggcaccaacaccuccaaccaggucgcggugcuguaccagggcgugaacugcaccgagguccccguggccauccacgccgaccagcugacgcccaccuggcggguguacagcaccggguccaacgucuuccagacccgcgccggcugccucaucggggccgagcacgugaacaacagcuacgagugcgacauccccaucggcgcgggcaucugcgccuccuaccagacgcagaccaacagcccgcggcgcgcccgguccguggccagccaguccgucaucgcguacaccaugagccugggggccgagaacuccguggccuacagcaacaacuccaucgccauccccaccaacuucacgaucagcgugaccaccgagauccugcccgucuccaugaccaagacgagcguggacugcaccauguacaucugcggcgacagcaccgagugcuccaaccuccugcugcaguacgggagcuucugcacccagcucaaccgcgcccugacgggcaucgcgguggagcaggacaagaacacccaggaggucuucgcccaggugaagcagaucuacaagacgcccccgaucaaggacuucgggggcuucaacuucucccagauccugcccgaccccagcaagcccuccaagcggagcuucaucgaggaccuccuguucaacaaggugacccuggccgacgccggcuucaucaagcaguacggggacugccucggcgacaucgccgcgcgcgaccugaucugcgcccagaaguucaacgggcugaccguccucccgccccugcugaccgacgagaugaucgcccaguacaccuccgcccuccuggccggcaccaucacgagcggguggaccuucggcgcgggcgccgcccugcagauccccuucgccaugcagauggcguaccgguucaacgggaucggcgugacccagaacgugcucuacgagaaccagaagcugaucgccaaccaguucaacuccgccaucgggaagauccaggacagccuguccagcaccgccuccgcccucggcaagcugcaggacgucgugaaccagaacgcgcaggcccugaacacgcucgugaagcagcugagcuccaacuucggggccaucagcuccguccugaacgacauccucagccgccuggacaagguggaggccgaggugcagaucgaccggcugaucaccggccgccuccagucccugcagaccuacgucacccagcagcugauccgggccgcggagauccgcgccagcgccaaccucgccgccaccaagaugagcgagugcgugcugggccaguccaagcggguggacuucugcgggaagggcuaccaccugaugagcuucccccaguccgcgccgcacggggucguguuccuccacgucacguacgugcccgcccaggagaagaacuucaccaccgcccccgccaucugccacgacggcaaggcgcacuucccccgcgaggggguguucgucagcaacggcacccacugguucgugacgcagcggaacuucuacgagccgcagaucaucaccaccgacaacaccuucguguccggcaacugcgacgucgugaucgggaucgugaacaacacggucuacgacccccugcagcccgagcuggacagcuucaaggaggagcucgacaaguacuucaagaaccacaccucccccgacguggaccugggcgacaucagcgggaucaacgccuccguggucaacauccagaaggagaucgaccgccugaacgagguggccaagaaccucaacgagagccugaucgaccugcaggagcucggcaaguacgagcaguacaucaaguggccgugguacaucuggcugggcuucaucgccgggcugaucgccaucgugauggucaccaucaugcucugcugcaugaccuccugcugcagcugccugaagggcugcugcuccugcgggagcugcugcaaguucgacgaggacgacuccgagcccgugcugaagggcgugaagcuccacuacacgugaggacuaguuauaagacugacuagcccgaugggccucccaacgggcccuccuccccuccuugcaccgagauuaauagaucucaaaggcucuuuucagagccaccaaaaaaaaaaaaaaaaaaaaaaaaaaaaaaaaaaaaaaaaaaaaaaaaaaaaaaaaaaaaaaaaaaaaaaaaaaaaaaaaaaaaaaaaaaaaaaaaaaaaa

SEQ ID NO: 24318 - RNA, 4035 nt, Artificial Sequence
  SARS-CoV-2/Wuhan/WIV05/2019__EPI_ISL_402128 spike protein mRNA gc (1-1273)(H69del_V70del_Y453F_D614G_I692V_M1229I)
aggagaaagcuuaccauguucguguuccugguccuccugccccuggugagcucccagugcgugaaccucaccacccgcacgcagcugccgcccgccuacaccaacagcuucacccggggcgucuacuaccccgacaagguguuccgcuccagcgugcugcacuccacccaggaccucuuccugcccuucuucagcaacgucacgugguuccacgccaucuccgggaccaacggcaccaagcgguucgacaacccggugcugcccuucaacgacgggguguacuucgcgagcaccgagaaguccaacaucauccgcggcuggaucuucgggacgacccucgacagcaagacccagucccugcugaucgucaacaacgccaccaacguggugaucaaggucugcgaguuccaguucugcaacgaccccuuccucggcguguacuaccacaagaacaacaagagcuggauggaguccgaguuccggguguacagcuccgccaacaacugcacguucgaguacgucagccagcccuuccugauggaccuggagggcaagcaggggaacuucaagaaccuccgcgaguucguguucaagaacaucgacggcuacuucaagaucuacuccaagcacaccccgaucaaccuggugcgggaccugccccagggguucagcgcccucgagccccuggucgaccugcccaucggcaucaacaucacccgcuuccagacccuccuggcccugcaccgguccuaccucacgccgggggacagcagcuccggcuggaccgcgggcgccgccgccuacuacgugggguaccugcagccccgcaccuuccugcucaaguacaacgagaacggcaccaucacggacgcgguggacugcgcccuggacccccugagcgagaccaagugcacccucaaguccuucaccgucgagaaggggaucuaccagacgagcaacuuccgggugcagcccaccgaguccaucgugcgcuucccgaacaucaccaaccugugccccuucggcgaggucuucaacgccacccgguucgccagcguguacgccuggaaccgcaagcggaucuccaacugcgucgcggacuacagcgugcuguacaacuccgccagcuucuccacguucaagugcuacggcgugagccccaccaagcucaacgaccugugcuucaccaacgucuacgccgacuccuucgugauccgcggggacgaggugcggcagaucgcccccggccagaccgggaagaucgccgacuacaacuacaagcugccggacgacuucacgggcugcgucaucgcguggaacagcaacaaccucgacuccaaggucgggggcaacuacaacuaccuguuccgccuguuccgcaagagcaaccucaagcccuucgagcgggacaucuccaccgagaucuaccaggccggcagcacccccugcaacgggguggagggcuucaacugcuacuucccccugcaguccuacggguuccagccgaccaacggcgugggguaccagcccuaccggguggugguccugagcuucgagcuccugcacgcccccgccacggugugcggccccaagaaguccaccaaccuggugaagaacaagugcgucaacuucaacuucaacggccucaccgggaccggcgugcugaccgagagcaacaagaaguuccugccguuccagcaguucgggcgcgacaucgccgacacgaccgacgcggugcgcgacccccagacccuggagauccucgacaucacccccugcagcuucggcggggucuccgugaucacgccgggcaccaacaccagcaaccagguggccguccuguaccagggcgugaacugcaccgaggugcccgucgccauccacgccgaccagcugacgcccaccuggcggguguacuccaccgggagcaacguguuccagacccgcgccggcugccucaucggggcggagcacgucaacaacuccuacgagugcgacauccccaucggcgccggcaucugcgccagcuaccagacgcagaccaacuccccgcggcgcgcccggagcguggcgucccagagcgugaucgccuacaccaugucccugggggccgagaacagcgucgccuacuccaacaacagcaucgccauccccaccaacuucacgaucuccgugaccaccgagauccugcccgugagcaugaccaagacgagcgucgacugcaccauguacaucugcggcgacuccaccgagugcagcaaccuccugcugcaguacggguccuucugcacccagcucaaccgcgcgcugacgggcaucgccguggagcaggacaagaacacccaggagguguucgcccaggucaagcagaucuacaagacgcccccgaucaaggacuucgggggcuucaacuucagccagauccugcccgaccccuccaagcccagcaagcgguccuucaucgaggaccuccuguucaacaaggugacccuggccgacgccggcuucaucaagcaguacggggacugccucggcgacaucgcggcccgcgaccugaucugcgcccagaaguucaacgggcugaccgugcucccgccccugcugaccgacgagaugaucgcccaguacaccagcgcccuccuggcgggcaccaucacguccggguggaccuucggcgccggcgccgcccugcagauccccuucgcgaugcagauggccuaccgguucaacgggaucggcgucacccagaacgugcucuacgagaaccagaagcugaucgccaaccaguucaacagcgccaucgggaagauccaggacucccugagcuccaccgccagcgcgcucggcaagcugcaggacguggucaaccagaacgcccaggcccugaacacgcucgugaagcagcuguccagcaacuucggggccaucuccagcgugcugaacgacauccucucccgccuggacaaggucgaggccgaggugcagaucgaccggcugaucaccggccgccuccagagccugcagaccuacgugacccagcagcugauccgggcggccgagauccgcgccagcgccaaccucgccgcgaccaagauguccgagugcguccugggccagagcaagcggguggacuucugcgggaagggcuaccaccugauguccuucccccagagcgccccgcacgggguggucuuccuccacgugacguacguccccgcccaggagaagaacuucaccaccgcccccgcgaucugccacgacggcaaggcccacuucccccgcgaggggguguucguguccaacggcacccacugguucgucacgcagcggaacuucuacgagccgcagaucaucaccaccgacaacaccuucgugagcggcaacugcgacguggucaucgggaucgugaacaacacgguguacgacccccugcagcccgagcuggacuccuucaaggaggagcucgacaaguacuucaagaaccacaccagccccgacgucgaccugggcgacaucuccgggaucaacgccagcguggugaacauccagaaggagaucgaccgccugaacgaggucgccaagaaccucaacgagucccugaucgaccugcaggagcucggcaaguacgagcaguacaucaaguggccgugguacaucuggcugggcuucaucgccgggcugaucgcgaucgugaucgugaccaucaugcucugcugcaugaccagcugcugcuccugccugaagggcugcugcagcugcggguccugcugcaaguucgacgaggacgacagcgagcccguccugaagggcgugaagcuccacuacacgugaggacuaguuauaagacugacuagcccgaugggccucccaacgggcccuccuccccuccuugcaccgagauuaauagaucucaaaggcucuuuucagagccaccaaaaaaaaaaaaaaaaaaaaaaaaaaaaaaaaaaaaaaaaaaaaaaaaaaaaaaaaaaaaaaaaaaaaaaaaaaaaaaaaaaaaaaaaaaaaaaaaaaaaa

SEQ ID NO: 24319 - RNA, 4032 nt, Artificial Sequence
  SARS-CoV-2/Wuhan/WIV05/2019__EPI_ISL_402128 spike protein mRNA gc (1-1273)(H69del_V70del_Y144del_N501Y_A570D_D614G_P681H_T716I_S982 A_D1118H)
aggagaaagcuuaccauguucguguuccugguccuccugccccuggugagcucccagugcgugaaccucaccacccgcacgcagcugccgcccgccuacaccaacagcuucacccggggcgucuacuaccccgacaagguguuccgcuccagcgugcugcacuccacccaggaccucuuccugcccuucuucagcaacgucacgugguuccacgccaucuccgggaccaacggcaccaagcgguucgacaacccggugcugcccuucaacgacgggguguacuucgcgagcaccgagaaguccaacaucauccgcggcuggaucuucgggacgacccucgacagcaagacccagucccugcugaucgucaacaacgccaccaacguggugaucaaggucugcgaguuccaguucugcaacgaccccuuccucggcguguaccacaagaacaacaagagcuggauggaguccgaguuccggguguacagcuccgccaacaacugcacguucgaguacgucagccagcccuuccugauggaccuggagggcaagcaggggaacuucaagaaccuccgcgaguucguguucaagaacaucgacggcuacuucaagaucuacuccaagcacaccccgaucaaccuggugcgggaccugccccagggguucagcgcccucgagccccuggucgaccugcccaucggcaucaacaucacccgcuuccagacccuccuggcccugcaccgguccuaccucacgccgggggacagcagcuccggcuggaccgcgggcgccgccgccuacuacgugggguaccugcagccccgcaccuuccugcucaaguacaacgagaacggcaccaucacggacgcgguggacugcgcccuggacccccugagcgagaccaagugcacccucaaguccuucaccgucgagaaggggaucuaccagacgagcaacuuccgggugcagcccaccgaguccaucgugcgcuucccgaacaucaccaaccugugccccuucggcgaggucuucaacgccacccgguucgccagcguguacgccuggaaccgcaagcggaucuccaacugcgucgcggacuacagcgugcuguacaacuccgccagcuucuccacguucaagugcuacggcgugagccccaccaagcucaacgaccugugcuucaccaacgucuacgccgacuccuucgugauccgcggggacgaggugcggcagaucgcccccggccagaccgggaagaucgccgacuacaacuacaagcugccggacgacuucacgggcugcgucaucgcguggaacagcaacaaccucgacuccaaggucgggggcaacuacaacuaccuguaccgccuguuccgcaagagcaaccucaagcccuucgagcgggacaucuccaccgagaucuaccaggccggcagcacccccugcaacgggguggagggcuucaacugcuacuucccccugcaguccuacggguuccagccgaccuacggcgugggguaccagcccuaccggguggugguccugagcuucgagcuccugcacgcccccgccacggugugcggccccaagaaguccaccaaccuggugaagaacaagugcgucaacuucaacuucaacggccucaccgggaccggcgugcugaccgagagcaacaagaaguuccugccguuccagcaguucgggcgcgacaucgacgacacgaccgacgccgugcgcgacccccagacccuggagauccucgacaucacccccugcagcuucggcggggucuccgugaucacgccgggcaccaacaccagcaaccagguggcgguccuguaccagggcgugaacugcaccgaggugcccgucgccauccacgccgaccagcugacgcccaccuggcggguguacuccaccgggagcaacguguuccagacccgcgccggcugccucaucggggccgagcacgucaacaacuccuacgagugcgacauccccaucggcgcgggcaucugcgccagcuaccagacgcagaccaacucccaccggcgcgcccggagcguggccucccagagcaucaucgcguacaccaugucccugggggccgagaacagcguggccuacuccaacaacagcaucgccaucccgaucaacuucaccaucuccgucacgaccgagauccugcccgugagcaugaccaagaccagcguggacugcacgauguacaucugcggcgacuccaccgagugcagcaaccuccugcugcaguacggguccuucugcacccagcucaaccgcgcccugaccggcaucgcggucgagcaggacaagaacacgcaggagguguucgcccaggugaagcagaucuacaagaccccgcccaucaaggacuucgggggcuucaacuucagccagauccugcccgaccccuccaagcccagcaagcgguccuucaucgaggaccuccuguucaacaaggucacccuggccgacgccggcuucaucaagcaguacggggacugccucggcgacaucgccgcgcgcgaccugaucugcgcccagaaguucaacgggcugaccgugcugcccccgcuccugacggacgagaugaucgcccaguacaccagcgcccuccuggccggcaccaucaccuccggguggacguucggcgcgggcgccgcccugcagauccccuucgccaugcagauggcguaccgguucaacgggaucggcgugacccagaacguccucuacgagaaccagaagcugaucgccaaccaguucaacagcgccaucgggaagauccaggacucccugagcuccaccgccagcgcccucggcaagcugcaggacguggugaaccagaacgcgcaggcccugaacacccucgucaagcagcuguccagcaacuucggggccaucuccagcgugcugaacgacauccucgcccgccuggacaagguggaggccgagguccagaucgaccggcugaucacgggccgccuccagucccugcagaccuacgugacccagcagcugauccgggcggccgagauccgcgccagcgccaaccucgccgcgaccaagaugagcgagugcgugcugggccaguccaagcgggucgacuucugcgggaagggcuaccaccugaugagcuucccccaguccgcgccccacggggugguguuccuccacgucaccuacgugccggcccaggagaagaacuucacgaccgcccccgccaucugccacgacggcaaggcccacuucccccgcgagggggucuucgugagcaacggcacccacugguucgugacccagcggaacuucuacgagccccagaucaucacgacccacaacaccuucgucuccggcaacugcgacguggugaucgggaucgucaacaacaccguguacgacccgcugcagcccgagcuggacagcuucaaggaggagcucgacaaguacuucaagaaccacacgucccccgacguggaccugggcgacaucagcgggaucaacgccuccgucgugaacauccagaaggagaucgaccgccugaacgagguggccaagaaccucaacgagagccugaucgaccugcaggagcucggcaaguacgagcaguacaucaaguggcccugguacaucuggcugggcuucaucgccgggcugaucgcgaucgucauggugaccaucaugcucugcugcaugaccuccugcugcagcugccugaagggcugcugcuccugcgggagcugcugcaaguucgacgaggacgacuccgagccggugcugaagggcgucaagcuccacuacaccugaggacuaguuauaagacugacuagcccgaugggccucccaacgggcccuccuccccuccuugcaccgagauuaauagaucucaaaggcucuuuucagagccaccaaaaaaaaaaaaaaaaaaaaaaaaaaaaaaaaaaaaaaaaaaaaaaaaaaaaaaaaaaaaaaaaaaaaaaaaaaaaaaaaaaaaaaaaaaaaaaaaaaaaa

SEQ ID NO: 24320 - RNA, 4041 nt, Artificial Sequence
  SARS-CoV-2/Wuhan/WIV05/2019__EPI_ISL_402128 spike protein mRNA gc (1-1273)(K417N_E484K_N501Y_D614G)
aggagaaagcuuaccauguucguguuccugguccuccugccccuggugagcucccagugcgugaaccucaccacccgcacgcagcugccgcccgccuacaccaacagcuucacccggggcgucuacuaccccgacaagguguuccgcuccagcgugcugcacuccacccaggaccucuuccugcccuucuucagcaacgucacgugguuccacgccauccacguguccgggaccaacggcaccaagcgguucgacaacccggugcugcccuucaacgacggggucuacuucgcgagcaccgagaaguccaacaucauccgcggcuggaucuucgggacgacccucgacagcaagacccagucccugcugaucgugaacaacgccaccaacguggucaucaaggugugcgaguuccaguucugcaacgaccccuuccucggcguguacuaccacaagaacaacaagagcuggauggaguccgaguuccgggucuacagcuccgccaacaacugcacguucgaguacgugagccagcccuuccugauggaccuggagggcaagcaggggaacuucaagaaccuccgcgaguucguguucaagaacaucgacggcuacuucaagaucuacuccaagcacaccccgaucaaccugguccgggaccugccccagggguucagcgcccucgagccccugguggaccugcccaucggcaucaacaucacccgcuuccagacccuccuggcccugcaccgguccuaccucacgccgggggacagcagcuccggcuggaccgcgggcgccgccgccuacuacgugggguaccugcagccccgcaccuuccugcucaaguacaacgagaacggcaccaucacggacgcggucgacugcgcccuggacccccugagcgagaccaagugcacccucaaguccuucaccguggagaaggggaucuaccagacgagcaacuuccgggugcagcccaccgaguccaucguccgcuucccgaacaucaccaaccugugccccuucggcgagguguucaacgccacccgguucgccagcgucuacgccuggaaccgcaagcggaucuccaacugcguggcggacuacagcgugcuguacaacuccgccagcuucuccacguucaagugcuacggcgucagccccaccaagcucaacgaccugugcuucaccaacguguacgccgacuccuucgugauccgcggggacgagguccggcagaucgcccccggccagaccgggaacaucgccgacuacaacuacaagcugccggacgacuucacgggcugcgugaucgcguggaacagcaacaaccucgacuccaaggucgggggcaacuacaacuaccuguaccgccuguuccgcaagagcaaccucaagcccuucgagcgggacaucuccaccgagaucuaccaggccggcagcacccccugcaacggggugaagggcuucaacugcuacuucccccugcaguccuacggguuccagccgaccuacggcgugggguaccagcccuaccggguggucgugcugagcuucgagcuccugcacgcccccgccacggugugcggccccaagaaguccaccaaccuggucaagaacaagugcgugaacuucaacuucaacggccucaccgggaccggcgugcugaccgagagcaacaagaaguuccugccguuccagcaguucgggcgcgacaucgccgacacgaccgacgcgguccgcgacccccagacccuggagauccucgacaucacccccugcagcuucggcgggguguccgugaucacgccgggcaccaacaccagcaaccaggucgccgugcuguaccagggcgugaacugcaccgagguccccguggccauccacgccgaccagcugacgcccaccuggcggguguacuccaccgggagcaacgucuuccagacccgcgccggcugccucaucggggcggagcacgugaacaacuccuacgagugcgacauccccaucggcgccggcaucugcgccagcuaccagacgcagaccaacuccccgcggcgcgcccggagcguggcgucccagagcaucaucgccuacaccaugucccugggggccgagaacagcgucgccuacuccaacaacagcaucgccauccccaccaacuucacgaucuccgugaccaccgagauccugcccgugagcaugaccaagacgagcgucgacugcaccauguacaucugcggcgacuccaccgagugcagcaaccuccugcugcaguacggguccuucugcacccagcucaaccgcgcgcugacgggcaucgccguggagcaggacaagaacacccaggagguguucgcccaggucaagcagaucuacaagacgcccccgaucaaggacuucgggggcuucaacuucagccagauccugcccgaccccuccaagcccagcaagcgguccuucaucgaggaccuccuguucaacaaggugacccuggccgacgccggcuucaucaagcaguacggggacugccucggcgacaucgcggcccgcgaccugaucugcgcccagaaguucaacgggcugaccgugcucccgccccugcugaccgacgagaugaucgcccaguacaccagcgcccuccuggcgggcaccaucacguccggguggaccuucggcgccggcgccgcccugcagauccccuucgcgaugcagauggccuaccgguucaacgggaucggcgucacccagaacgugcucuacgagaaccagaagcugaucgccaaccaguucaacagcgccaucgggaagauccaggacucccugagcuccaccgccagcgcgcucggcaagcugcaggacguggucaaccagaacgcccaggcccugaacacgcucgugaagcagcuguccagcaacuucggggccaucuccagcgugcugaacgacauccucucccgccuggacaaggucgaggccgaggugcagaucgaccggcugaucaccggccgccuccagagccugcagaccuacgugacccagcagcugauccgggcggccgagauccgcgccagcgccaaccucgccgcgaccaagauguccgagugcguccugggccagagcaagcggguggacuucugcgggaagggcuaccaccugauguccuucccccagagcgccccgcacgggguggucuuccuccacgugacguacguccccgcccaggagaagaacuucaccaccgcccccgcgaucugccacgacggcaaggcccacuucccccgcgaggggguguucguguccaacggcacccacugguucgucacgcagcggaacuucuacgagccgcagaucaucaccaccgacaacaccuucgugagcggcaacugcgacguggucaucgggaucgugaacaacacgguguacgacccccugcagcccgagcuggacuccuucaaggaggagcucgacaaguacuucaagaaccacaccagccccgacgucgaccugggcgacaucuccgggaucaacgccagcguggugaacauccagaaggagaucgaccgccugaacgaggucgccaagaaccucaacgagucccugaucgaccugcaggagcucggcaaguacgagcaguacaucaaguggccgugguacaucuggcugggcuucaucgccgggcugaucgcgaucgugauggugaccaucaugcucugcugcaugaccagcugcugcuccugccugaagggcugcugcagcugcggguccugcugcaaguucgacgaggacgacagcgagcccguccugaagggcgugaagcuccacuacacgugaggacuaguuauaagacugacuagcccgaugggccucccaacgggcccuccuccccuccuugcaccgagauuaauagaucucaaaggcucuuuucagagccaccaaaaaaaaaaaaaaaaaaaaaaaaaaaaaaaaaaaaaaaaaaaaaaaaaaaaaaaaaaaaaaaaaaaaaaaaaaaaaaaaaaaaaaaaaaaaaaaaaaaaa

SEQ ID NO: 24321 - RNA, 4032 nt, Artificial Sequence
  SARS-CoV-2/Wuhan/WIV05/2019__EPI_ISL_402128 spike protein mRNA gc (1-1273)(L18F_D80A_D215G_L242del_A243del_L244del_R246I_K417N_E484 K_N501Y_D614G_A701V)
aggagaaagcuuaccauguucguguuccugguccuccugccccuggugagcucccagugcgugaacuucaccacccgcacgcagcucccgcccgccuacaccaacagcuucacccggggcgucuacuaccccgacaagguguuccgcuccagcgugcugcacuccacccaggaccuguuccuccccuucuucagcaacgucacgugguuccacgccauccacguguccgggaccaacggcaccaagcgguucgcgaacccggugcugcccuucaacgacggggucuacuucgccagcaccgagaaguccaacaucauccgcggcuggaucuucgggacgacccuggacagcaagacccagucccuccugaucgugaacaacgccaccaacguggucaucaaggugugcgaguuccaguucugcaacgaccccuuccugggcguguacuaccacaagaacaacaagagcuggauggaguccgaguuccgggucuacagcuccgccaacaacugcacguucgaguacgugagccagcccuuccucauggaccuggagggcaagcaggggaacuucaagaaccugcgcgaguucguguucaagaacaucgacggcuacuucaagaucuacuccaagcacaccccgaucaaccucguccgggggcugccccagggcuucagcgcccuggagccccucguggaccugcccaucgggaucaacaucacccgcuuccagacccugcacaucuccuaccucacgccgggcgacagcagcuccggcuggaccgcgggggccgccgccuacuacgugggcuaccugcagccccggaccuuccugcucaaguacaacgagaacgggaccaucacggacgcggucgacugcgcccuggacccccugagcgagaccaagugcacccucaaguccuucaccguggagaagggcaucuaccagacgagcaacuuccgcgugcagcccaccgaguccaucguccgguucccgaacaucaccaaccugugccccuucggcgagguguucaacgccacccgcuucgccagcgucuacgccuggaaccggaagcgcaucuccaacugcguggcggacuacagcgugcuguacaacuccgccagcuucuccacguucaagugcuacggggucagccccaccaagcucaacgaccugugcuucaccaacguguacgccgacuccuucgugauccggggcgacgagguccgccagaucgcccccgggcagaccggcaacaucgccgacuacaacuacaagcugccggacgacuucacggggugcgugaucgcguggaacagcaacaaccucgacuccaaggugggcggcaacuacaacuaccuguaccggcuguuccgcaagagcaaccucaagcccuucgagcgggacaucuccaccgagaucuaccaggccgggagcacccccugcaacggcgucaagggguucaacugcuacuucccccugcaguccuacggcuuccagccgaccuacggggugggcuaccagcccuaccgcguggucgugcugagcuucgagcuccugcacgcccccgccacggugugcggccccaagaaguccaccaaccuggucaagaacaagugcgugaacuucaacuucaacgggcucaccggcaccggggugcugaccgagagcaacaagaaguuccugccguuccagcaguucggccgggacaucgccgacacgaccgacgcgguccgcgacccccagacccucgagauccuggacaucacccccugcagcuucgggggcguguccgugaucacgccgggcaccaacaccagcaaccaggucgccgugcuguaccagggggugaacugcaccgagguccccguggccauccacgccgaccagcugacgcccaccuggcgcguguacuccaccggcagcaacgucuuccagacccgggccgggugccucaucggcgcggagcacgugaacaacuccuacgagugcgacauccccaucggcgccgggaucugcgccagcuaccagacgcagaccaacuccccgcgccgggcccgcagcguggcgucccagagcaucaucgccuacaccaugucccugggcgucgagaacagcguggccuacuccaacaacagcaucgccauccccaccaacuucacgaucuccgugaccaccgagauccugcccgucagcaugaccaagacgagcguggacugcaccauguacaucugcggggacuccaccgagugcagcaaccuccugcugcaguacggcuccuucugcacccagcucaaccgggcccugacggggaucgcgguggagcaggacaagaacacccaggaggucuucgcccaggugaagcagaucuacaagacgcccccgaucaaggacuucggcggcuucaacuucagccagauccugcccgaccccuccaagcccagcaagcgcuccuucaucgaggaccuccuguucaacaaggugacccuggccgacgccggguucaucaagcaguacggcgacugccucggggacaucgccgcgcgggaccugaucugcgcccagaaguucaacggccugaccguccucccgccccugcugaccgacgagaugaucgcccaguacaccagcgcccuccuggccgggaccaucacguccggcuggaccuucggcgcgggggccgcccugcagauccccuucgccaugcagauggcguaccgcuucaacggcaucggggugacccagaacgugcucuacgagaaccagaagcugaucgccaaccaguucaacagcgccaucggcaagauccaggacucccugagcuccaccgccagcgcccucgggaagcugcaggacgucgugaaccagaacgcgcaggcccugaacacgcucgugaagcagcuguccagcaacuucggcgccaucuccagcguccugaacgacauccucucccggcuggacaagguggaggccgaggugcagaucgaccgccugaucaccggccggcuccagagccugcagaccuacgucacccagcagcugauccgcgccgcggagauccgggccagcgccaaccucgccgccaccaagauguccgagugcgugcuggggcagagcaagcgcguggacuucugcggcaagggguaccaccugauguccuucccccagagcgcgccgcacggcgucguguuccuccacgucacguacgugcccgcccaggagaagaacuucaccaccgcccccgccaucugccacgacgggaaggcgcacuucccccgggagggcguguucgucuccaacggcacccacugguucgugacgcagcgcaacuucuacgagccgcagaucaucaccaccgacaacaccuucgugagcgggaacugcgacgucgugaucggcaucgugaacaacacggucuacgacccccugcagcccgagcuggacuccuucaaggaggagcucgacaaguacuucaagaaccacaccagccccgacguggaccugggggacaucuccggcaucaacgccagcguggucaacauccagaaggagaucgaccggcugaacgagguggccaagaaccucaacgagucccugaucgaccugcaggagcucggcaaguacgagcaguacaucaaguggccgugguacaucuggcugggguucaucgccggccugaucgccaucgugauggucaccaucaugcucugcugcaugaccagcugcugcuccugccugaaggggugcugcagcugcggcuccugcugcaaguucgacgaggacgacagcgagcccgugcugaagggggugaagcuccacuacacgugaggacuaguuauaagacugacuagcccgaugggccucccaacgggcccuccuccccuccuugcaccgagauuaauagaucucaaaggcucuuuucagagccaccaaaaaaaaaaaaaaaaaaaaaaaaaaaaaaaaaaaaaaaaaaaaaaaaaaaaaaaaaaaaaaaaaaaaaaaaaaaaaaaaaaaaaaaaaaaaaaaaaaaaa

SEQ ID NO: 24322 - RNA, 4041 nt, Artificial Sequence
  SARS-CoV-2/Wuhan/WIV05/2019__EPI_ISL_402128 spike protein mRNA gc (1-1273)(E484K_D614G)
aggagaaagcuuaccauguucguguuccugguccuccugccccuggugagcucccagugcgugaaccucaccacccgcacgcagcugccgcccgccuacaccaacagcuucacccggggcgucuacuaccccgacaagguguuccgcuccagcgugcugcacuccacccaggaccucuuccugcccuucuucagcaacgucacgugguuccacgccauccacguguccgggaccaacggcaccaagcgguucgacaacccggugcugcccuucaacgacggggucuacuucgcgagcaccgagaaguccaacaucauccgcggcuggaucuucgggacgacccucgacagcaagacccagucccugcugaucgugaacaacgccaccaacguggucaucaaggugugcgaguuccaguucugcaacgaccccuuccucggcguguacuaccacaagaacaacaagagcuggauggaguccgaguuccgggucuacagcuccgccaacaacugcacguucgaguacgugagccagcccuuccugauggaccuggagggcaagcaggggaacuucaagaaccuccgcgaguucguguucaagaacaucgacggcuacuucaagaucuacuccaagcacaccccgaucaaccugguccgggaccugccccagggguucagcgcccucgagccccugguggaccugcccaucggcaucaacaucacccgcuuccagacccuccuggcccugcaccgguccuaccucacgccgggggacagcagcuccggcuggaccgcgggcgccgccgccuacuacgugggguaccugcagccccgcaccuuccugcucaaguacaacgagaacggcaccaucacggacgcggucgacugcgcccuggacccccugagcgagaccaagugcacccucaaguccuucaccguggagaaggggaucuaccagacgagcaacuuccgggugcagcccaccgaguccaucguccgcuucccgaacaucaccaaccugugccccuucggcgagguguucaacgccacccgguucgccagcgucuacgccuggaaccgcaagcggaucuccaacugcguggcggacuacagcgugcuguacaacuccgccagcuucuccacguucaagugcuacggcgucagccccaccaagcucaacgaccugugcuucaccaacguguacgccgacuccuucgugauccgcggggacgagguccggcagaucgcccccggccagaccgggaagaucgccgacuacaacuacaagcugccggacgacuucacgggcugcgugaucgcguggaacagcaacaaccucgacuccaaggucgggggcaacuacaacuaccuguaccgccuguuccgcaagagcaaccucaagcccuucgagcgggacaucuccaccgagaucuaccaggccggcagcacccccugcaacggggugaagggcuucaacugcuacuucccccugcaguccuacggguuccagccgaccaacggcgugggguaccagcccuaccggguggucgugcugagcuucgagcuccugcacgcccccgccacggugugcggccccaagaaguccaccaaccuggucaagaacaagugcgugaacuucaacuucaacggccucaccgggaccggcgugcugaccgagagcaacaagaaguuccugccguuccagcaguucgggcgcgacaucgccgacacgaccgacgcgguccgcgacccccagacccuggagauccucgacaucacccccugcagcuucggcgggguguccgugaucacgccgggcaccaacaccagcaaccaggucgccgugcuguaccagggcgugaacugcaccgagguccccguggccauccacgccgaccagcugacgcccaccuggcggguguacuccaccgggagcaacgucuuccagacccgcgccggcugccucaucggggcggagcacgugaacaacuccuacgagugcgacauccccaucggcgccggcaucugcgccagcuaccagacgcagaccaacuccccgcggcgcgcccggagcguggcgucccagagcaucaucgccuacaccaugucccugggggccgagaacagcgucgccuacuccaacaacagcaucgccauccccaccaacuucacgaucuccgugaccaccgagauccugcccgugagcaugaccaagacgagcgucgacugcaccauguacaucugcggcgacuccaccgagugcagcaaccuccugcugcaguacggguccuucugcacccagcucaaccgcgcgcugacgggcaucgccguggagcaggacaagaacacccaggagguguucgcccaggucaagcagaucuacaagacgcccccgaucaaggacuucgggggcuucaacuucagccagauccugcccgaccccuccaagcccagcaagcgguccuucaucgaggaccuccuguucaacaaggugacccuggccgacgccggcuucaucaagcaguacggggacugccucggcgacaucgcggcccgcgaccugaucugcgcccagaaguucaacgggcugaccgugcucccgccccugcugaccgacgagaugaucgcccaguacaccagcgcccuccuggcgggcaccaucacguccggguggaccuucggcgccggcgccgcccugcagauccccuucgcgaugcagauggccuaccgguucaacgggaucggcgucacccagaacgugcucuacgagaaccagaagcugaucgccaaccaguucaacagcgccaucgggaagauccaggacucccugagcuccaccgccagcgcgcucggcaagcugcaggacguggucaaccagaacgcccaggcccugaacacgcucgugaagcagcuguccagcaacuucggggccaucuccagcgugcugaacgacauccucucccgccuggacaaggucgaggccgaggugcagaucgaccggcugaucaccggccgccuccagagccugcagaccuacgugacccagcagcugauccgggcggccgagauccgcgccagcgccaaccucgccgcgaccaagauguccgagugcguccugggccagagcaagcggguggacuucugcgggaagggcuaccaccugauguccuucccccagagcgccccgcacgggguggucuuccuccacgugacguacguccccgcccaggagaagaacuucaccaccgcccccgcgaucugccacgacggcaaggcccacuucccccgcgaggggguguucguguccaacggcacccacugguucgucacgcagcggaacuucuacgagccgcagaucaucaccaccgacaacaccuucgugagcggcaacugcgacguggucaucgggaucgugaacaacacgguguacgacccccugcagcccgagcuggacuccuucaaggaggagcucgacaaguacuucaagaaccacaccagccccgacgucgaccugggcgacaucuccgggaucaacgccagcguggugaacauccagaaggagaucgaccgccugaacgaggucgccaagaaccucaacgagucccugaucgaccugcaggagcucggcaaguacgagcaguacaucaaguggccgugguacaucuggcugggcuucaucgccgggcugaucgcgaucgugauggugaccaucaugcucugcugcaugaccagcugcugcuccugccugaagggcugcugcagcugcggguccugcugcaaguucgacgaggacgacagcgagcccguccugaagggcgugaagcuccacuacacgugaggacuaguuauaagacugacuagcccgaugggccucccaacgggcccuccuccccuccuugcaccgagauuaauagaucucaaaggcucuuuucagagccaccaaaaaaaaaaaaaaaaaaaaaaaaaaaaaaaaaaaaaaaaaaaaaaaaaaaaaaaaaaaaaaaaaaaaaaaaaaaaaaaaaaaaaaaaaaaaaaaaaaaaa

SEQ ID NO: 24323 - RNA, 4041 nt, Artificial Sequence
  SARS-CoV-2/Wuhan/WIV05/2019__EPI_ISL_402128 spike protein mRNA gc (1-1273)(L18F_T20N_P26S_D138Y_R190S_K417T_E484K_N501Y_D614G_H655Y _T1027I)
aggagaaagcuuaccauguucguguuccugguccuccugccccuggugagcucccagugcgugaacuucaccaaccgcacccagcucccgagcgccuacacgaacuccuucacccggggcgucuacuaccccgacaagguguuccgcagcuccgugcugcacagcacccaggaccuguuccuccccuucuucuccaacgucaccugguuccacgccauccacgugagcgggacgaacggcaccaagcgguucgacaaccccgugcugccguucaacgacggggucuacuucgcguccaccgagaaguccaacaucauccgcggcuggaucuucgggaccacgcuggacuccaagacccagagccuccugaucgugaacaacgccaccaacguggucaucaaggugugcgaguuccaguucugcaacuaccccuuccugggcguguacuaccacaagaacaacaaguccuggauggagagcgaguuccgggucuacuccagcgccaacaacugcaccuucgaguacgugucccagcccuuccucauggaccuggagggcaagcaggggaacuucaagaaccugagcgaguucguguucaagaacaucgacggcuacuucaagaucuacuccaagcacacgcccaucaaccucguccgcgaccugccgcagggguucagcgcccuggagccccucguggaccugcccaucggcaucaacaucacccgguuccagacccugcucgcccugcaccgcagcuaccugacccccggggacuccagcuccggcuggacggcgggcgccgccgccuacuacgugggguaccuccagccgcggaccuuccugcugaaguacaacgagaacggcaccaucaccgacgcggucgacugcgcccucgacccccugagcgagacgaagugcacccugaaguccuucaccguggagaaggggaucuaccagaccagcaacuuccgcgugcagcccacggaguccaucguccgguuccccaacaucaccaaccucugcccguucggcgagguguucaacgccacccgcuucgccagcgucuacgccuggaaccggaagcgcaucuccaacugcguggcggacuacagcgugcuguacaacuccgccagcuucuccaccuucaagugcuacggcgucagccccacgaagcugaacgaccucugcuucaccaacguguacgccgacuccuucgugauccgcggggacgagguccggcagaucgcccccggccagaccgggaccaucgccgacuacaacuacaagcugcccgacgacuucacgggcugcgugaucgcguggaacagcaacaaccuggacuccaaggucgggggcaacuacaacuaccucuaccggcuguuccgcaagagcaaccugaagccguucgagcgggacaucuccaccgagaucuaccaggccggcagcacccccugcaacggggugaagggcuucaacugcuacuucccccuccagagcuacggguuccagcccaccuacggcgugggguaccagccguaccgcguggucgugcuguccuucgagcugcuccacgcccccgccacggugugcggccccaagaaguccaccaaccuggucaagaacaagugcgugaacuucaacuucaacggccugaccgggaccggcgugcucaccgagagcaacaagaaguuccugcccuuccagcaguucgggcgggacaucgccgacacgaccgacgcgguccgcgacccgcagacccuggagauccuggacaucacccccugcagcuucggcgggguguccgugaucacgcccggcaccaacaccagcaaccaggucgccgugcucuaccagggcgugaacugcaccgaggucccgguggccauccacgccgaccagcugacgcccaccuggcgcguguacuccaccgggagcaacgucuuccagacccgggccggcugccugaucggggcggaguacgugaacaacuccuacgagugcgacauccccaucggcgccggcaucugcgccagcuaccagacgcagaccaacagcccccgccgggcccgcagcguggcgucccagagcaucaucgccuacaccaugucccucggggccgagaacagcgucgccuacuccaacaacagcaucgccaucccgaccaacuucacgaucagcgugaccaccgagauccugcccguguccaugaccaagacgagcgucgacugcaccauguacaucugcggcgacuccaccgagugcagcaaccugcuccugcaguacggguccuucugcacccagcugaaccgggcgcucacgggcaucgccguggagcaggacaagaacacccaggagguguucgcccaggucaagcagaucuacaagaccccgcccaucaaggacuucgggggcuucaacuucagccagauccugcccgaccccuccaagcccagcaagcgcuccuucaucgaggaccuccuguucaacaaggugacccuggccgacgccggcuucaucaagcaguacggggacugccugggcgacaucgcggcccgggaccucaucugcgcccagaaguucaacgggcugacggugcugcccccgcuccugaccgacgagaugaucgcccaguacaccagcgcccugcucgcgggcaccaucacguccggguggaccuucggcgccggcgccgcccugcagauccccuucgcgaugcagauggccuaccgcuucaacgggaucggcgucacccagaacgugcuguacgagaaccagaagcucaucgccaaccaguucaacagcgccaucgggaagauccaggacucccugagcuccaccgccagcgcgcugggcaagcuccaggacguggucaaccagaacgcccaggcccugaacacgcuggugaagcagcucuccagcaacuucggggccaucuccagcgugcugaacgacauccugagccggcucgacaaggucgaggccgaggugcagaucgaccgccugaucaccggccggcugcagucccuccagaccuacgugacccagcagcugauccgcgcggccgagauccgggccagcgccaaccuggccgcgaucaagauguccgagugcguccucggccagagcaagcgcguggacuucugcgggaagggcuaccaccugauguccuucccccagagcgcgccccacgggguggucuuccugcacgugaccuacgucccggcccaggagaagaacuucacgaccgcccccgccaucugccacgacggcaaggcccacuucccccgggaggggguguucguguccaacggcacccacugguucgucacccagcgcaacuucuacgagccccagaucaucacgaccgacaacaccuucgugagcggcaacugcgacguggucaucgggaucgugaacaacaccguguacgacccgcuccagcccgagcuggacuccuucaaggaggagcuggacaaguacuucaagaaccacacgagccccgacgucgaccucggcgacaucuccgggaucaacgccagcguggugaacauccagaaggagaucgaccggcugaacgaggucgccaagaaccugaacgagucccucaucgaccugcaggagcugggcaaguacgagcaguacaucaaguggcccugguacaucuggcucggcuucaucgccgggcugaucgcgaucgugauggugaccaucaugcugugcugcaugaccagcugcugcuccugccucaagggcugcugcagcugcggguccugcugcaaguucgacgaggacgacagcgagccgguccugaagggcgugaagcugcacuacaccugaggacuaguuauaagacugacuagcccgaugggccucccaacgggcccuccuccccuccuugcaccgagauuaauagaucucaaaggcucuuuucagagccaccaaaaaaaaaaaaaaaaaaaaaaaaaaaaaaaaaaaaaaaaaaaaaaaaaaaaaaaaaaaaaaaaaaaaaaaaaaaaaaaaaaaaaaaaaaaaaaaaaaaaa

SEQ ID NO: 24324 - RNA, 4041 nt, Artificial Sequence
  SARS-CoV-2/Wuhan/WIV05/2019__EPI_ISL_402128 spike protein mRNA gc (1-1273)(S13I_W152C_L452R_D614G)
aggagaaagcuuaccauguucguguuccugguccuccugccccuggugagcauccagugcgugaaccucaccacccgcacgcagcugccgcccgccuacaccaacuccuucacccggggcgucuacuaccccgacaagguguuccgcagcuccgugcugcacagcacccaggaccucuuccugcccuucuucuccaacgucacgugguuccacgccauccacgugagcgggaccaacggcaccaagcgguucgacaacccggugcugcccuucaacgacggggucuacuucgcguccaccgagaaguccaacaucauccgcggcuggaucuucgggacgacccucgacagcaagacccagagccugcugaucgugaacaacgccaccaacguggucaucaaggugugcgaguuccaguucugcaacgaccccuuccucggcguguacuaccacaagaacaacaaguccugcauggagagcgaguuccgggucuacuccagcgccaacaacugcacguucgaguacgugucccagcccuuccugauggaccuggagggcaagcaggggaacuucaagaaccuccgcgaguucguguucaagaacaucgacggcuacuucaagaucuacagcaagcacaccccgaucaaccugguccgggaccugccccagggguucuccgcccucgagccccugguggaccugcccaucggcaucaacaucacccgcuuccagacccuccuggcccugcaccggagcuaccucacgccgggggacuccagcagcggcuggaccgcgggcgccgccgccuacuacgugggguaccugcagccccgcaccuuccugcucaaguacaacgagaacggcaccaucacggacgcggucgacugcgcccuggacccccuguccgagaccaagugcacccucaagagcuucaccguggagaaggggaucuaccagacguccaacuuccgggugcagcccaccgagagcaucguccgcuucccgaacaucaccaaccugugccccuucggcgagguguucaacgccacccgguucgccuccgucuacgccuggaaccgcaagcggaucagcaacugcguggcggacuacuccgugcuguacaacagcgccuccuucagcacguucaagugcuacggcgucucccccaccaagcucaacgaccugugcuucaccaacguguacgccgacagcuucgugauccgcggggacgagguccggcagaucgcccccggccagaccgggaagaucgccgacuacaacuacaagcugccggacgacuucacgggcugcgugaucgcguggaacuccaacaaccucgacagcaaggucgggggcaacuacaacuaccgcuaccggcuguuccgcaaguccaaccugaagcccuucgagcgggacaucagcaccgagaucuaccaggccggcuccacccccugcaacgggguggagggcuucaacugcuacuucccccuccagagcuacggguuccagccgaccaacggcgugggguaccagcccuaccgcguggucgugcuguccuucgagcugcuccacgcccccgccacggugugcggccccaagaaguccaccaaccuggucaagaacaagugcgugaacuucaacuucaacggccugaccgggaccggcgugcucaccgagagcaacaagaaguuccugccguuccagcaguucgggcgcgacaucgccgacacgaccgacgcgguccgggacccccagacccuggagauccuggacaucacccccugcagcuucggcggggugagcgugaucacgccgggcaccaacaccuccaaccaggucgccgugcucuaccagggcgugaacugcaccgagguccccguggccauccacgccgaccagcugacgcccaccuggcgcguguacagcaccggguccaacgucuuccagacccgggccggcugccugaucggggcggagcacgugaacaacagcuacgagugcgacauccccaucggcgccggcaucugcgccuccuaccagacgcagaccaacagcccgcgccgggcccgcuccguggcgagccaguccaucaucgccuacaccaugagccucggggccgagaacuccgucgccuacagcaacaacuccaucgccauccccaccaacuucacgaucagcgugaccaccgagauccugcccguguccaugaccaagacgagcgucgacugcaccauguacaucugcggcgacagcaccgagugcuccaaccugcuccugcaguacgggagcuucugcacccagcugaaccgggcgcucacgggcaucgccguggagcaggacaagaacacccaggagguguucgcccaggucaagcagaucuacaagacgcccccgaucaaggacuucgggggcuucaacuucucccagauccugcccgaccccagcaagcccuccaagcgcagcuucaucgaggaccuccuguucaacaaggugacccuggccgacgccggcuucaucaagcaguacggggacugccugggcgacaucgcggcccgggaccucaucugcgcccagaaguucaacgggcugaccgugcugccgccccuccugaccgacgagaugaucgcccaguacaccuccgcccugcucgcgggcaccaucacgagcggguggaccuucggcgccggcgccgcccugcagauccccuucgcgaugcagauggccuaccgcuucaacgggaucggcgucacccagaacgugcuguacgagaaccagaagcucaucgccaaccaguucaacuccgccaucgggaagauccaggacagccuguccagcaccgccuccgcgcugggcaagcuccaggacguggucaaccagaacgcccaggcccugaacacgcuggugaagcagcucagcuccaacuucggggccaucagcuccgugcugaacgacauccugagccggcucgacaaggucgaggccgaggugcagaucgaccgccugaucaccggccggcugcagucccuccagaccuacgugacccagcagcugauccgcgcggccgagauccgggccagcgccaaccuggccgcgaccaagaugagcgagugcguccucggccaguccaagcgcguggacuucugcgggaagggcuaccaccugaugagcuucccccaguccgccccgcacgggguggucuuccugcacgugacguacguccccgcccaggagaagaacuucaccaccgcccccgcgaucugccacgacggcaaggcccacuucccccgggaggggguguucgugagcaacggcacccacugguucgucacgcagcgcaacuucuacgagccgcagaucaucaccaccgacaacaccuucguguccggcaacugcgacguggucaucgggaucgugaacaacacgguguacgacccccuccagcccgagcuggacagcuucaaggaggagcuggacaaguacuucaagaaccacaccucccccgacgucgaccucggcgacaucagcgggaucaacgccuccguggugaacauccagaaggagaucgaccggcugaacgaggucgccaagaaccugaacgagagccucaucgaccugcaggagcugggcaaguacgagcaguacaucaaguggccgugguacaucuggcucggcuucaucgccgggcugaucgcgaucgugauggugaccaucaugcugugcugcaugaccuccugcugcagcugccucaagggcugcugcuccugcgggagcugcugcaaguucgacgaggacgacuccgagcccguccugaagggcgugaagcugcacuacacgugaggacuaguuauaagacugacuagcccgaugggccucccaacgggcccuccuccccuccuugcaccgagauuaauagaucucaaaggcucuuuucagagccaccaaaaaaaaaaaaaaaaaaaaaaaaaaaaaaaaaaaaaaaaaaaaaaaaaaaaaaaaaaaaaaaaaaaaaaaaaaaaaaaaaaaaaaaaaaaaaaaaaaaaa

SEQ ID NO: 24325 - RNA, 4041 nt, Artificial Sequence
  SARS-CoV-2/Wuhan/WIV05/2019__EPI_ISL_402128 spike protein mRNA gc (1-1273)
aggagaaagcuuaccauguucguguuccuggugcugcugccccuggugagcagccagugcgugaaccugaccacccggacccagcugccaccagccuacaccaacagcuucacccggggcgucuacuaccccgacaagguguuccggagcagcguccugcacagcacccaggaccuguuccugcccuucuucagcaacgugaccugguuccacgccauccacgugagcggcaccaacggcaccaagcgguucgacaaccccgugcugcccuucaacgacggcguguacuucgccagcaccgagaagagcaacaucauccggggcuggaucuucggcaccacccuggacagcaagacccagagccugcugaucgugaauaacgccaccaacguggugaucaaggugugcgaguuccaguucugcaacgaccccuuccugggcguguacuaccacaagaacaacaagagcuggauggagagcgaguuccggguguacagcagcgccaacaacugcaccuucgaguacgugagccagcccuuccugauggaccuggagggcaagcagggcaacuucaagaaccugcgggaguucguguucaagaacaucgacggcuacuucaagaucuacagcaagcacaccccaaucaaccuggugcgggaucugccccagggcuucucagcccuggagccccugguggaccugcccaucggcaucaacaucacccgguuccagacccugcuggcccugcaccggagcuaccugaccccaggcgacagcagcagcggguggacagcaggcgcggcugcuuacuacgugggcuaccugcagccccggaccuuccugcugaaguacaacgagaacggcaccaucaccgacgccguggacugcgcccuggacccucugagcgagaccaagugcacccugaagagcuucaccguggagaagggcaucuaccagaccagcaacuuccgggugcagcccaccgagagcaucgugcgguuccccaacaucaccaaccugugccccuucggcgagguguucaacgccacccgguucgccagcguguacgccuggaaccggaagcggaucagcaacugcguggccgacuacagcgugcuguacaacagcgccagcuucagcaccuucaagugcuacggcgugagccccaccaagcugaacgaccugugcuucaccaacguguacgccgacagcuucgugauccguggcgacgaggugcggcagaucgcacccggccagacaggcaagaucgccgacuacaacuacaagcugcccgacgacuucaccggcugcgugaucgccuggaacagcaacaaccucgacagcaaggugggcggcaacuacaacuaccuguaccggcuguuccggaagagcaaccugaagcccuucgagcgggacaucagcaccgagaucuaccaagccggcuccaccccuugcaacggcguggagggcuucaacugcuacuucccucugcagagcuacggcuuccagcccaccaacggcgugggcuaccagcccuaccgggugguggugcugagcuucgagcugcugcacgccccagccaccguguguggccccaagaagagcaccaaccuggugaagaacaagugcgugaacuucaacuucaacggccuuaccggcaccggcgugcugaccgagagcaacaagaaauuccugcccuuucagcaguucggccgggacaucgccgacaccaccgacgcugugcgggauccccagacccuggagauccuggacaucaccccuugcagcuucggcggcgugagcgugaucaccccaggcaccaacaccagcaaccagguggccgugcuguaccaggacgugaacugcaccgaggugcccguggccauccacgccgaccagcugacacccaccuggcgggucuacagcaccggcagcaacguguuccagacccgggccgguugccugaucggcgccgagcacgugaacaacagcuacgagugcgacauccccaucggcgccggcaucugugccagcuaccagacccagaccaauucaccccggagggcaaggagcguggccagccagagcaucaucgccuacaccaugagccugggcgccgagaacagcguggccuacagcaacaacagcaucgccauccccaccaacuucaccaucagcgugaccaccgagauucugcccgugagcaugaccaagaccagcguggacugcaccauguacaucugcggcgacagcaccgagugcagcaaccugcugcugcaguacggcagcuucugcacccagcugaaccgggcccugaccggcaucgccguggagcaggacaagaacacccaggagguguucgcccaggugaagcagaucuacaagaccccucccaucaaggacuucggcggcuucaacuucagccagauccugcccgaccccagcaagcccagcaagcggagcuucaucgaggaccugcuguucaacaaggugacccuagccgacgccggcuucaucaagcaguacggcgacugccucggcgacauagccgcccgggaccugaucugcgcccagaaguucaacggccugaccgugcugccuccccugcugaccgacgagaugaucgcccaguacaccagcgcccuguuagccggaaccaucaccagcggcuggacuuucggcgcuggagccgcucugcagauccccuucgccaugcagauggccuaccgguucaacggcaucggcgugacccagaacgugcuguacgagaaccagaagcugaucgccaaccaguucaacagcgccaucggcaagauccaggacagccugagcagcaccgcuagcgcccugggcaagcugcaggacguggugaaccagaacgcccaggcccugaacacccuggugaagcagcugagcagcaacuucggcgccaucagcagcgugcugaacgacauccugagccggcuggacaaggucgaggccgaggugcagaucgaccggcugaucacuggccggcugcagagccugcagaccuacgugacccagcagcugauccgggccgccgagauucgggccagcgccaaccuggccgccaccaagaugagcgagugcgugcugggccagagcaagcggguggacuucugcggcaagggcuaccaccugaugagcuuuccccagagcgcaccccacggagugguguuccugcacgugaccuacgugcccgcccaggagaagaacuucaccaccgccccagccaucugccacgacggcaaggcccacuuuccccgggagggcguguucgugagcaacggcacccacugguucgugacccagcggaacuucuacgagccccagaucaucaccaccgacaacaccuucgugagcggcaacugcgacguggugaucggcaucgugaacaacaccguguacgauccccugcagcccgagcuggacagcuucaaggaggagcuggacaaguacuucaagaaucacaccagccccgacguggaccugggcgacaucagcggcaucaacgccagcguggugaacauccagaaggagaucgaucggcugaacgagguggccaagaaccugaacgagagccugaucgaccugcaggagcugggcaaguacgagcaguacaucaaguggcccugguacaucuggcugggcuucaucgccggccugaucgccaucgugauggugaccaucaugcugugcugcaugaccagcugcugcagcugccugaagggcuguugcagcugcggcagcugcugcaaguucgacgaggacgacagcgagcccgugcugaagggcgugaagcugcacuacaccugaggacuaguuauaagacugacuagcccgaugggccucccaacgggcccuccuccccuccuugcaccgagauuaauagaucucaaaggcucuuuucagagccaccaaaaaaaaaaaaaaaaaaaaaaaaaaaaaaaaaaaaaaaaaaaaaaaaaaaaaaaaaaaaaaaaaaaaaaaaaaaaaaaaaaaaaaaaaaaaaaaaaaaaa

SEQ ID NO: 24326 - RNA, 4041 nt, Artificial Sequence
  SARS-CoV-2/Wuhan/WIV05/2019__EPI_ISL_402128 spike protein mRNA gc (1-1273)(D614G)
aggagaaagcuuaccauguucguguuccuggugcugcugccccuggugagcagccagugcgugaaccugaccacccggacccagcugccaccagccuacaccaacagcuucacccggggcgucuacuaccccgacaagguguuccggagcagcguccugcacagcacccaggaccuguuccugcccuucuucagcaacgugaccugguuccacgccauccacgugagcggcaccaacggcaccaagcgguucgacaaccccgugcugcccuucaacgacggcguguacuucgccagcaccgagaagagcaacaucauccggggcuggaucuucggcaccacccuggacagcaagacccagagccugcugaucgugaauaacgccaccaacguggugaucaaggugugcgaguuccaguucugcaacgaccccuuccugggcguguacuaccacaagaacaacaagagcuggauggagagcgaguuccggguguacagcagcgccaacaacugcaccuucgaguacgugagccagcccuuccugauggaccuggagggcaagcagggcaacuucaagaaccugcgggaguucguguucaagaacaucgacggcuacuucaagaucuacagcaagcacaccccaaucaaccuggugcgggaucugccccagggcuucucagcccuggagccccugguggaccugcccaucggcaucaacaucacccgguuccagacccugcuggcccugcaccggagcuaccugaccccaggcgacagcagcagcggguggacagcaggcgcggcugcuuacuacgugggcuaccugcagccccggaccuuccugcugaaguacaacgagaacggcaccaucaccgacgccguggacugcgcccuggacccucugagcgagaccaagugcacccugaagagcuucaccguggagaagggcaucuaccagaccagcaacuuccgggugcagcccaccgagagcaucgugcgguuccccaacaucaccaaccugugccccuucggcgagguguucaacgccacccgguucgccagcguguacgccuggaaccggaagcggaucagcaacugcguggccgacuacagcgugcuguacaacagcgccagcuucagcaccuucaagugcuacggcgugagccccaccaagcugaacgaccugugcuucaccaacguguacgccgacagcuucgugauccguggcgacgaggugcggcagaucgcacccggccagacaggcaagaucgccgacuacaacuacaagcugcccgacgacuucaccggcugcgugaucgccuggaacagcaacaaccucgacagcaaggugggcggcaacuacaacuaccuguaccggcuguuccggaagagcaaccugaagcccuucgagcgggacaucagcaccgagaucuaccaagccggcuccaccccuugcaacggcguggagggcuucaacugcuacuucccucugcagagcuacggcuuccagcccaccaacggcgugggcuaccagcccuaccgggugguggugcugagcuucgagcugcugcacgccccagccaccguguguggccccaagaagagcaccaaccuggugaagaacaagugcgugaacuucaacuucaacggccuuaccggcaccggcgugcugaccgagagcaacaagaaauuccugcccuuucagcaguucggccgggacaucgccgacaccaccgacgcugugcgggauccccagacccuggagauccuggacaucaccccuugcagcuucggcggcgugagcgugaucaccccaggcaccaacaccagcaaccagguggccgugcuguaccagggcgugaacugcaccgaggugcccguggccauccacgccgaccagcugacacccaccuggcgggucuacagcaccggcagcaacguguuccagacccgggccgguugccugaucggcgccgagcacgugaacaacagcuacgagugcgacauccccaucggcgccggcaucugugccagcuaccagacccagaccaauucaccccggagggcaaggagcguggccagccagagcaucaucgccuacaccaugagccugggcgccgagaacagcguggccuacagcaacaacagcaucgccauccccaccaacuucaccaucagcgugaccaccgagauucugcccgugagcaugaccaagaccagcguggacugcaccauguacaucugcggcgacagcaccgagugcagcaaccugcugcugcaguacggcagcuucugcacccagcugaaccgggcccugaccggcaucgccguggagcaggacaagaacacccaggagguguucgcccaggugaagcagaucuacaagaccccucccaucaaggacuucggcggcuucaacuucagccagauccugcccgaccccagcaagcccagcaagcggagcuucaucgaggaccugcuguucaacaaggugacccuagccgacgccggcuucaucaagcaguacggcgacugccucggcgacauagccgcccgggaccugaucugcgcccagaaguucaacggccugaccgugcugccuccccugcugaccgacgagaugaucgcccaguacaccagcgcccuguuagccggaaccaucaccagcggcuggacuuucggcgcuggagccgcucugcagauccccuucgccaugcagauggccuaccgguucaacggcaucggcgugacccagaacgugcuguacgagaaccagaagcugaucgccaaccaguucaacagcgccaucggcaagauccaggacagccugagcagcaccgcuagcgcccugggcaagcugcaggacguggugaaccagaacgcccaggcccugaacacccuggugaagcagcugagcagcaacuucggcgccaucagcagcgugcugaacgacauccugagccggcuggacaaggucgaggccgaggugcagaucgaccggcugaucacuggccggcugcagagccugcagaccuacgugacccagcagcugauccgggccgccgagauucgggccagcgccaaccuggccgccaccaagaugagcgagugcgugcugggccagagcaagcggguggacuucugcggcaagggcuaccaccugaugagcuuuccccagagcgcaccccacggagugguguuccugcacgugaccuacgugcccgcccaggagaagaacuucaccaccgccccagccaucugccacgacggcaaggcccacuuuccccgggagggcguguucgugagcaacggcacccacugguucgugacccagcggaacuucuacgagccccagaucaucaccaccgacaacaccuucgugagcggcaacugcgacguggugaucggcaucgugaacaacaccguguacgauccccugcagcccgagcuggacagcuucaaggaggagcuggacaaguacuucaagaaucacaccagccccgacguggaccugggcgacaucagcggcaucaacgccagcguggugaacauccagaaggagaucgaucggcugaacgagguggccaagaaccugaacgagagccugaucgaccugcaggagcugggcaaguacgagcaguacaucaaguggcccugguacaucuggcugggcuucaucgccggccugaucgccaucgugauggugaccaucaugcugugcugcaugaccagcugcugcagcugccugaagggcuguugcagcugcggcagcugcugcaaguucgacgaggacgacagcgagcccgugcugaagggcgugaagcugcacuacaccugaggacuaguuauaagacugacuagcccgaugggccucccaacgggcccuccuccccuccuugcaccgagauuaauagaucucaaaggcucuuuucagagccaccaaaaaaaaaaaaaaaaaaaaaaaaaaaaaaaaaaaaaaaaaaaaaaaaaaaaaaaaaaaaaaaaaaaaaaaaaaaaaaaaaaaaaaaaaaaaaaaaaaaaa

SEQ ID NO: 24327 - RNA, 4041 nt, Artificial Sequence
  SARS-CoV-2/Wuhan/WIV05/2019__EPI_ISL_402128 spike protein mRNA gc (1-1273)(A222V_D614G)
aggagaaagcuuaccauguucguguuccuggugcugcugccccuggugagcagccagugcgugaaccugaccacccggacccagcugccaccagccuacaccaacagcuucacccggggcgucuacuaccccgacaagguguuccggagcagcguccugcacagcacccaggaccuguuccugcccuucuucagcaacgugaccugguuccacgccauccacgugagcggcaccaacggcaccaagcgguucgacaaccccgugcugcccuucaacgacggcguguacuucgccagcaccgagaagagcaacaucauccggggcuggaucuucggcaccacccuggacagcaagacccagagccugcugaucgugaauaacgccaccaacguggugaucaaggugugcgaguuccaguucugcaacgaccccuuccugggcguguacuaccacaagaacaacaagagcuggauggagagcgaguuccggguguacagcagcgccaacaacugcaccuucgaguacgugagccagcccuuccugauggaccuggagggcaagcagggcaacuucaagaaccugcgggaguucguguucaagaacaucgacggcuacuucaagaucuacagcaagcacaccccaaucaaccuggugcgggaucugccccagggcuucucagugcuggagccccugguggaccugcccaucggcaucaacaucacccgguuccagacccugcuggcccugcaccggagcuaccugaccccaggcgacagcagcagcggguggacagcaggcgcggcugcuuacuacgugggcuaccugcagccccggaccuuccugcugaaguacaacgagaacggcaccaucaccgacgccguggacugcgcccuggacccucugagcgagaccaagugcacccugaagagcuucaccguggagaagggcaucuaccagaccagcaacuuccgggugcagcccaccgagagcaucgugcgguuccccaacaucaccaaccugugccccuucggcgagguguucaacgccacccgguucgccagcguguacgccuggaaccggaagcggaucagcaacugcguggccgacuacagcgugcuguacaacagcgccagcuucagcaccuucaagugcuacggcgugagccccaccaagcugaacgaccugugcuucaccaacguguacgccgacagcuucgugauccguggcgacgaggugcggcagaucgcacccggccagacaggcaagaucgccgacuacaacuacaagcugcccgacgacuucaccggcugcgugaucgccuggaacagcaacaaccucgacagcaaggugggcggcaacuacaacuaccuguaccggcuguuccggaagagcaaccugaagcccuucgagcgggacaucagcaccgagaucuaccaagccggcuccaccccuugcaacggcguggagggcuucaacugcuacuucccucugcagagcuacggcuuccagcccaccaacggcgugggcuaccagcccuaccgggugguggugcugagcuucgagcugcugcacgccccagccaccguguguggccccaagaagagcaccaaccuggugaagaacaagugcgugaacuucaacuucaacggccuuaccggcaccggcgugcugaccgagagcaacaagaaauuccugcccuuucagcaguucggccgggacaucgccgacaccaccgacgcugugcgggauccccagacccuggagauccuggacaucaccccuugcagcuucggcggcgugagcgugaucaccccaggcaccaacaccagcaaccagguggccgugcuguaccagggcgugaacugcaccgaggugcccguggccauccacgccgaccagcugacacccaccuggcgggucuacagcaccggcagcaacguguuccagacccgggccgguugccugaucggcgccgagcacgugaacaacagcuacgagugcgacauccccaucggcgccggcaucugugccagcuaccagacccagaccaauucaccccggagggcaaggagcguggccagccagagcaucaucgccuacaccaugagccugggcgccgagaacagcguggccuacagcaacaacagcaucgccauccccaccaacuucaccaucagcgugaccaccgagauucugcccgugagcaugaccaagaccagcguggacugcaccauguacaucugcggcgacagcaccgagugcagcaaccugcugcugcaguacggcagcuucugcacccagcugaaccgggcccugaccggcaucgccguggagcaggacaagaacacccaggagguguucgcccaggugaagcagaucuacaagaccccucccaucaaggacuucggcggcuucaacuucagccagauccugcccgaccccagcaagcccagcaagcggagcuucaucgaggaccugcuguucaacaaggugacccuagccgacgccggcuucaucaagcaguacggcgacugccucggcgacauagccgcccgggaccugaucugcgcccagaaguucaacggccugaccgugcugccuccccugcugaccgacgagaugaucgcccaguacaccagcgcccuguuagccggaaccaucaccagcggcuggacuuucggcgcuggagccgcucugcagauccccuucgccaugcagauggccuaccgguucaacggcaucggcgugacccagaacgugcuguacgagaaccagaagcugaucgccaaccaguucaacagcgccaucggcaagauccaggacagccugagcagcaccgcuagcgcccugggcaagcugcaggacguggugaaccagaacgcccaggcccugaacacccuggugaagcagcugagcagcaacuucggcgccaucagcagcgugcugaacgacauccugagccggcuggacaaggucgaggccgaggugcagaucgaccggcugaucacuggccggcugcagagccugcagaccuacgugacccagcagcugauccgggccgccgagauucgggccagcgccaaccuggccgccaccaagaugagcgagugcgugcugggccagagcaagcggguggacuucugcggcaagggcuaccaccugaugagcuuuccccagagcgcaccccacggagugguguuccugcacgugaccuacgugcccgcccaggagaagaacuucaccaccgccccagccaucugccacgacggcaaggcccacuuuccccgggagggcguguucgugagcaacggcacccacugguucgugacccagcggaacuucuacgagccccagaucaucaccaccgacaacaccuucgugagcggcaacugcgacguggugaucggcaucgugaacaacaccguguacgauccccugcagcccgagcuggacagcuucaaggaggagcuggacaaguacuucaagaaucacaccagccccgacguggaccugggcgacaucagcggcaucaacgccagcguggugaacauccagaaggagaucgaucggcugaacgagguggccaagaaccugaacgagagccugaucgaccugcaggagcugggcaaguacgagcaguacaucaaguggcccugguacaucuggcugggcuucaucgccggccugaucgccaucgugauggugaccaucaugcugugcugcaugaccagcugcugcagcugccugaagggcuguugcagcugcggcagcugcugcaaguucgacgaggacgacagcgagcccgugcugaagggcgugaagcugcacuacaccugaggacuaguuauaagacugacuagcccgaugggccucccaacgggcccuccuccccuccuugcaccgagauuaauagaucucaaaggcucuuuucagagccaccaaaaaaaaaaaaaaaaaaaaaaaaaaaaaaaaaaaaaaaaaaaaaaaaaaaaaaaaaaaaaaaaaaaaaaaaaaaaaaaaaaaaaaaaaaaaaaaaaaaaa

SEQ ID NO: 24328 - RNA, 4041 nt, Artificial Sequence
  SARS-CoV-2/Wuhan/WIV05/2019__EPI_ISL_402128 spike protein mRNA gc (1-1273)(N439K_D614G)
aggagaaagcuuaccauguucguguuccuggugcugcugccccuggugagcagccagugcgugaaccugaccacccggacccagcugccaccagccuacaccaacagcuucacccggggcgucuacuaccccgacaagguguuccggagcagcguccugcacagcacccaggaccuguuccugcccuucuucagcaacgugaccugguuccacgccauccacgugagcggcaccaacggcaccaagcgguucgacaaccccgugcugcccuucaacgacggcguguacuucgccagcaccgagaagagcaacaucauccggggcuggaucuucggcaccacccuggacagcaagacccagagccugcugaucgugaauaacgccaccaacguggugaucaaggugugcgaguuccaguucugcaacgaccccuuccugggcguguacuaccacaagaacaacaagagcuggauggagagcgaguuccggguguacagcagcgccaacaacugcaccuucgaguacgugagccagcccuuccugauggaccuggagggcaagcagggcaacuucaagaaccugcgggaguucguguucaagaacaucgacggcuacuucaagaucuacagcaagcacaccccaaucaaccuggugcgggaucugccccagggcuucucagcccuggagccccugguggaccugcccaucggcaucaacaucacccgguuccagacccugcuggcccugcaccggagcuaccugaccccaggcgacagcagcagcggguggacagcaggcgcggcugcuuacuacgugggcuaccugcagccccggaccuuccugcugaaguacaacgagaacggcaccaucaccgacgccguggacugcgcccuggacccucugagcgagaccaagugcacccugaagagcuucaccguggagaagggcaucuaccagaccagcaacuuccgggugcagcccaccgagagcaucgugcgguuccccaacaucaccaaccugugccccuucggcgagguguucaacgccacccgguucgccagcguguacgccuggaaccggaagcggaucagcaacugcguggccgacuacagcgugcuguacaacagcgccagcuucagcaccuucaagugcuacggcgugagccccaccaagcugaacgaccugugcuucaccaacguguacgccgacagcuucgugauccguggcgacgaggugcggcagaucgcacccggccagacaggcaagaucgccgacuacaacuacaagcugcccgacgacuucaccggcugcgugaucgccuggaacagcaagaaccucgacagcaaggugggcggcaacuacaacuaccuguaccggcuguuccggaagagcaaccugaagcccuucgagcgggacaucagcaccgagaucuaccaagccggcuccaccccuugcaacggcguggagggcuucaacugcuacuucccucugcagagcuacggcuuccagcccaccaacggcgugggcuaccagcccuaccgggugguggugcugagcuucgagcugcugcacgccccagccaccguguguggccccaagaagagcaccaaccuggugaagaacaagugcgugaacuucaacuucaacggccuuaccggcaccggcgugcugaccgagagcaacaagaaauuccugcccuuucagcaguucggccgggacaucgccgacaccaccgacgcugugcgggauccccagacccuggagauccuggacaucaccccuugcagcuucggcggcgugagcgugaucaccccaggcaccaacaccagcaaccagguggccgugcuguaccagggcgugaacugcaccgaggugcccguggccauccacgccgaccagcugacacccaccuggcgggucuacagcaccggcagcaacguguuccagacccgggccgguugccugaucggcgccgagcacgugaacaacagcuacgagugcgacauccccaucggcgccggcaucugugccagcuaccagacccagaccaauucaccccggagggcaaggagcguggccagccagagcaucaucgccuacaccaugagccugggcgccgagaacagcguggccuacagcaacaacagcaucgccauccccaccaacuucaccaucagcgugaccaccgagauucugcccgugagcaugaccaagaccagcguggacugcaccauguacaucugcggcgacagcaccgagugcagcaaccugcugcugcaguacggcagcuucugcacccagcugaaccgggcccugaccggcaucgccguggagcaggacaagaacacccaggagguguucgcccaggugaagcagaucuacaagaccccucccaucaaggacuucggcggcuucaacuucagccagauccugcccgaccccagcaagcccagcaagcggagcuucaucgaggaccugcuguucaacaaggugacccuagccgacgccggcuucaucaagcaguacggcgacugccucggcgacauagccgcccgggaccugaucugcgcccagaaguucaacggccugaccgugcugccuccccugcugaccgacgagaugaucgcccaguacaccagcgcccuguuagccggaaccaucaccagcggcuggacuuucggcgcuggagccgcucugcagauccccuucgccaugcagauggccuaccgguucaacggcaucggcgugacccagaacgugcuguacgagaaccagaagcugaucgccaaccaguucaacagcgccaucggcaagauccaggacagccugagcagcaccgcuagcgcccugggcaagcugcaggacguggugaaccagaacgcccaggcccugaacacccuggugaagcagcugagcagcaacuucggcgccaucagcagcgugcugaacgacauccugagccggcuggacaaggucgaggccgaggugcagaucgaccggcugaucacuggccggcugcagagccugcagaccuacgugacccagcagcugauccgggccgccgagauucgggccagcgccaaccuggccgccaccaagaugagcgagugcgugcugggccagagcaagcggguggacuucugcggcaagggcuaccaccugaugagcuuuccccagagcgcaccccacggagugguguuccugcacgugaccuacgugcccgcccaggagaagaacuucaccaccgccccagccaucugccacgacggcaaggcccacuuuccccgggagggcguguucgugagcaacggcacccacugguucgugacccagcggaacuucuacgagccccagaucaucaccaccgacaacaccuucgugagcggcaacugcgacguggugaucggcaucgugaacaacaccguguacgauccccugcagcccgagcuggacagcuucaaggaggagcuggacaaguacuucaagaaucacaccagccccgacguggaccugggcgacaucagcggcaucaacgccagcguggugaacauccagaaggagaucgaucggcugaacgagguggccaagaaccugaacgagagccugaucgaccugcaggagcugggcaaguacgagcaguacaucaaguggcccugguacaucuggcugggcuucaucgccggccugaucgccaucgugauggugaccaucaugcugugcugcaugaccagcugcugcagcugccugaagggcuguugcagcugcggcagcugcugcaaguucgacgaggacgacagcgagcccgugcugaagggcgugaagcugcacuacaccugaggacuaguuauaagacugacuagcccgaugggccucccaacgggcccuccuccccuccuugcaccgagauuaauagaucucaaaggcucuuuucagagccaccaaaaaaaaaaaaaaaaaaaaaaaaaaaaaaaaaaaaaaaaaaaaaaaaaaaaaaaaaaaaaaaaaaaaaaaaaaaaaaaaaaaaaaaaaaaaaaaaaaaaa

SEQ ID NO: 24329 - RNA, 4041 nt, Artificial Sequence
  SARS-CoV-2/Wuhan/WIV05/2019__EPI_ISL_402128 spike protein mRNA gc (1-1273)(S477N_D614G)
aggagaaagcuuaccauguucguguuccuggugcugcugccccuggugagcagccagugcgugaaccugaccacccggacccagcugccaccagccuacaccaacagcuucacccggggcgucuacuaccccgacaagguguuccggagcagcguccugcacagcacccaggaccuguuccugcccuucuucagcaacgugaccugguuccacgccauccacgugagcggcaccaacggcaccaagcgguucgacaaccccgugcugcccuucaacgacggcguguacuucgccagcaccgagaagagcaacaucauccggggcuggaucuucggcaccacccuggacagcaagacccagagccugcugaucgugaauaacgccaccaacguggugaucaaggugugcgaguuccaguucugcaacgaccccuuccugggcguguacuaccacaagaacaacaagagcuggauggagagcgaguuccggguguacagcagcgccaacaacugcaccuucgaguacgugagccagcccuuccugauggaccuggagggcaagcagggcaacuucaagaaccugcgggaguucguguucaagaacaucgacggcuacuucaagaucuacagcaagcacaccccaaucaaccuggugcgggaucugccccagggcuucucagcccuggagccccugguggaccugcccaucggcaucaacaucacccgguuccagacccugcuggcccugcaccggagcuaccugaccccaggcgacagcagcagcggguggacagcaggcgcggcugcuuacuacgugggcuaccugcagccccggaccuuccugcugaaguacaacgagaacggcaccaucaccgacgccguggacugcgcccuggacccucugagcgagaccaagugcacccugaagagcuucaccguggagaagggcaucuaccagaccagcaacuuccgggugcagcccaccgagagcaucgugcgguuccccaacaucaccaaccugugccccuucggcgagguguucaacgccacccgguucgccagcguguacgccuggaaccggaagcggaucagcaacugcguggccgacuacagcgugcuguacaacagcgccagcuucagcaccuucaagugcuacggcgugagccccaccaagcugaacgaccugugcuucaccaacguguacgccgacagcuucgugauccguggcgacgaggugcggcagaucgcacccggccagacaggcaagaucgccgacuacaacuacaagcugcccgacgacuucaccggcugcgugaucgccuggaacagcaacaaccucgacagcaaggugggcggcaacuacaacuaccuguaccggcuguuccggaagagcaaccugaagcccuucgagcgggacaucagcaccgagaucuaccaagccggcaacaccccuugcaacggcguggagggcuucaacugcuacuucccucugcagagcuacggcuuccagcccaccaacggcgugggcuaccagcccuaccgggugguggugcugagcuucgagcugcugcacgccccagccaccguguguggccccaagaagagcaccaaccuggugaagaacaagugcgugaacuucaacuucaacggccuuaccggcaccggcgugcugaccgagagcaacaagaaauuccugcccuuucagcaguucggccgggacaucgccgacaccaccgacgcugugcgggauccccagacccuggagauccuggacaucaccccuugcagcuucggcggcgugagcgugaucaccccaggcaccaacaccagcaaccagguggccgugcuguaccagggcgugaacugcaccgaggugcccguggccauccacgccgaccagcugacacccaccuggcgggucuacagcaccggcagcaacguguuccagacccgggccgguugccugaucggcgccgagcacgugaacaacagcuacgagugcgacauccccaucggcgccggcaucugugccagcuaccagacccagaccaauucaccccggagggcaaggagcguggccagccagagcaucaucgccuacaccaugagccugggcgccgagaacagcguggccuacagcaacaacagcaucgccauccccaccaacuucaccaucagcgugaccaccgagauucugcccgugagcaugaccaagaccagcguggacugcaccauguacaucugcggcgacagcaccgagugcagcaaccugcugcugcaguacggcagcuucugcacccagcugaaccgggcccugaccggcaucgccguggagcaggacaagaacacccaggagguguucgcccaggugaagcagaucuacaagaccccucccaucaaggacuucggcggcuucaacuucagccagauccugcccgaccccagcaagcccagcaagcggagcuucaucgaggaccugcuguucaacaaggugacccuagccgacgccggcuucaucaagcaguacggcgacugccucggcgacauagccgcccgggaccugaucugcgcccagaaguucaacggccugaccgugcugccuccccugcugaccgacgagaugaucgcccaguacaccagcgcccuguuagccggaaccaucaccagcggcuggacuuucggcgcuggagccgcucugcagauccccuucgccaugcagauggccuaccgguucaacggcaucggcgugacccagaacgugcuguacgagaaccagaagcugaucgccaaccaguucaacagcgccaucggcaagauccaggacagccugagcagcaccgcuagcgcccugggcaagcugcaggacguggugaaccagaacgcccaggcccugaacacccuggugaagcagcugagcagcaacuucggcgccaucagcagcgugcugaacgacauccugagccggcuggacaaggucgaggccgaggugcagaucgaccggcugaucacuggccggcugcagagccugcagaccuacgugacccagcagcugauccgggccgccgagauucgggccagcgccaaccuggccgccaccaagaugagcgagugcgugcugggccagagcaagcggguggacuucugcggcaagggcuaccaccugaugagcuuuccccagagcgcaccccacggagugguguuccugcacgugaccuacgugcccgcccaggagaagaacuucaccaccgccccagccaucugccacgacggcaaggcccacuuuccccgggagggcguguucgugagcaacggcacccacugguucgugacccagcggaacuucuacgagccccagaucaucaccaccgacaacaccuucgugagcggcaacugcgacguggugaucggcaucgugaacaacaccguguacgauccccugcagcccgagcuggacagcuucaaggaggagcuggacaaguacuucaagaaucacaccagccccgacguggaccugggcgacaucagcggcaucaacgccagcguggugaacauccagaaggagaucgaucggcugaacgagguggccaagaaccugaacgagagccugaucgaccugcaggagcugggcaaguacgagcaguacaucaaguggcccugguacaucuggcugggcuucaucgccggccugaucgccaucgugauggugaccaucaugcugugcugcaugaccagcugcugcagcugccugaagggcuguugcagcugcggcagcugcugcaaguucgacgaggacgacagcgagcccgugcugaagggcgugaagcugcacuacaccugaggacuaguuauaagacugacuagcccgaugggccucccaacgggcccuccuccccuccuugcaccgagauuaauagaucucaaaggcucuuuucagagccaccaaaaaaaaaaaaaaaaaaaaaaaaaaaaaaaaaaaaaaaaaaaaaaaaaaaaaaaaaaaaaaaaaaaaaaaaaaaaaaaaaaaaaaaaaaaaaaaaaaaaa

SEQ ID NO: 24330 - RNA, 4041 nt, Artificial Sequence
  SARS-CoV-2/Wuhan/WIV05/2019__EPI_ISL_402128 spike protein mRNA gc (1-1273)(N501Y_D614G)
aggagaaagcuuaccauguucguguuccuggugcugcugccccuggugagcagccagugcgugaaccugaccacccggacccagcugccaccagccuacaccaacagcuucacccggggcgucuacuaccccgacaagguguuccggagcagcguccugcacagcacccaggaccuguuccugcccuucuucagcaacgugaccugguuccacgccauccacgugagcggcaccaacggcaccaagcgguucgacaaccccgugcugcccuucaacgacggcguguacuucgccagcaccgagaagagcaacaucauccggggcuggaucuucggcaccacccuggacagcaagacccagagccugcugaucgugaauaacgccaccaacguggugaucaaggugugcgaguuccaguucugcaacgaccccuuccugggcguguacuaccacaagaacaacaagagcuggauggagagcgaguuccggguguacagcagcgccaacaacugcaccuucgaguacgugagccagcccuuccugauggaccuggagggcaagcagggcaacuucaagaaccugcgggaguucguguucaagaacaucgacggcuacuucaagaucuacagcaagcacaccccaaucaaccuggugcgggaucugccccagggcuucucagcccuggagccccugguggaccugcccaucggcaucaacaucacccgguuccagacccugcuggcccugcaccggagcuaccugaccccaggcgacagcagcagcggguggacagcaggcgcggcugcuuacuacgugggcuaccugcagccccggaccuuccugcugaaguacaacgagaacggcaccaucaccgacgccguggacugcgcccuggacccucugagcgagaccaagugcacccugaagagcuucaccguggagaagggcaucuaccagaccagcaacuuccgggugcagcccaccgagagcaucgugcgguuccccaacaucaccaaccugugccccuucggcgagguguucaacgccacccgguucgccagcguguacgccuggaaccggaagcggaucagcaacugcguggccgacuacagcgugcuguacaacagcgccagcuucagcaccuucaagugcuacggcgugagccccaccaagcugaacgaccugugcuucaccaacguguacgccgacagcuucgugauccguggcgacgaggugcggcagaucgcacccggccagacaggcaagaucgccgacuacaacuacaagcugcccgacgacuucaccggcugcgugaucgccuggaacagcaacaaccucgacagcaaggugggcggcaacuacaacuaccuguaccggcuguuccggaagagcaaccugaagcccuucgagcgggacaucagcaccgagaucuaccaagccggcuccaccccuugcaacggcguggagggcuucaacugcuacuucccucugcagagcuacggcuuccagcccaccuacggcgugggcuaccagcccuaccgggugguggugcugagcuucgagcugcugcacgccccagccaccguguguggccccaagaagagcaccaaccuggugaagaacaagugcgugaacuucaacuucaacggccuuaccggcaccggcgugcugaccgagagcaacaagaaauuccugcccuuucagcaguucggccgggacaucgccgacaccaccgacgcugugcgggauccccagacccuggagauccuggacaucaccccuugcagcuucggcggcgugagcgugaucaccccaggcaccaacaccagcaaccagguggccgugcuguaccagggcgugaacugcaccgaggugcccguggccauccacgccgaccagcugacacccaccuggcgggucuacagcaccggcagcaacguguuccagacccgggccgguugccugaucggcgccgagcacgugaacaacagcuacgagugcgacauccccaucggcgccggcaucugugccagcuaccagacccagaccaauucaccccggagggcaaggagcguggccagccagagcaucaucgccuacaccaugagccugggcgccgagaacagcguggccuacagcaacaacagcaucgccauccccaccaacuucaccaucagcgugaccaccgagauucugcccgugagcaugaccaagaccagcguggacugcaccauguacaucugcggcgacagcaccgagugcagcaaccugcugcugcaguacggcagcuucugcacccagcugaaccgggcccugaccggcaucgccguggagcaggacaagaacacccaggagguguucgcccaggugaagcagaucuacaagaccccucccaucaaggacuucggcggcuucaacuucagccagauccugcccgaccccagcaagcccagcaagcggagcuucaucgaggaccugcuguucaacaaggugacccuagccgacgccggcuucaucaagcaguacggcgacugccucggcgacauagccgcccgggaccugaucugcgcccagaaguucaacggccugaccgugcugccuccccugcugaccgacgagaugaucgcccaguacaccagcgcccuguuagccggaaccaucaccagcggcuggacuuucggcgcuggagccgcucugcagauccccuucgccaugcagauggccuaccgguucaacggcaucggcgugacccagaacgugcuguacgagaaccagaagcugaucgccaaccaguucaacagcgccaucggcaagauccaggacagccugagcagcaccgcuagcgcccugggcaagcugcaggacguggugaaccagaacgcccaggcccugaacacccuggugaagcagcugagcagcaacuucggcgccaucagcagcgugcugaacgacauccugagccggcuggacaaggucgaggccgaggugcagaucgaccggcugaucacuggccggcugcagagccugcagaccuacgugacccagcagcugauccgggccgccgagauucgggccagcgccaaccuggccgccaccaagaugagcgagugcgugcugggccagagcaagcggguggacuucugcggcaagggcuaccaccugaugagcuuuccccagagcgcaccccacggagugguguuccugcacgugaccuacgugcccgcccaggagaagaacuucaccaccgccccagccaucugccacgacggcaaggcccacuuuccccgggagggcguguucgugagcaacggcacccacugguucgugacccagcggaacuucuacgagccccagaucaucaccaccgacaacaccuucgugagcggcaacugcgacguggugaucggcaucgugaacaacaccguguacgauccccugcagcccgagcuggacagcuucaaggaggagcuggacaaguacuucaagaaucacaccagccccgacguggaccugggcgacaucagcggcaucaacgccagcguggugaacauccagaaggagaucgaucggcugaacgagguggccaagaaccugaacgagagccugaucgaccugcaggagcugggcaaguacgagcaguacaucaaguggcccugguacaucuggcugggcuucaucgccggccugaucgccaucgugauggugaccaucaugcugugcugcaugaccagcugcugcagcugccugaagggcuguugcagcugcggcagcugcugcaaguucgacgaggacgacagcgagcccgugcugaagggcgugaagcugcacuacaccugaggacuaguuauaagacugacuagcccgaugggccucccaacgggcccuccuccccuccuugcaccgagauuaauagaucucaaaggcucuuuucagagccaccaaaaaaaaaaaaaaaaaaaaaaaaaaaaaaaaaaaaaaaaaaaaaaaaaaaaaaaaaaaaaaaaaaaaaaaaaaaaaaaaaaaaaaaaaaaaaaaaaaaaa

SEQ ID NO: 24331 - RNA, 4035 nt, Artificial Sequence
  SARS-CoV-2/Wuhan/WIV05/2019__EPI_ISL_402128 spike protein mRNA gc (1-1273)(H69del_V70del_D614G)
aggagaaagcuuaccauguucguguuccuggugcugcugccccuggugagcagccagugcgugaaccugaccacccggacccagcugccaccagccuacaccaacagcuucacccggggcgucuacuaccccgacaagguguuccggagcagcguccugcacagcacccaggaccuguuccugcccuucuucagcaacgugaccugguuccacgccaucagcggcaccaacggcaccaagcgguucgacaaccccgugcugcccuucaacgacggcguguacuucgccagcaccgagaagagcaacaucauccggggcuggaucuucggcaccacccuggacagcaagacccagagccugcugaucgugaauaacgccaccaacguggugaucaaggugugcgaguuccaguucugcaacgaccccuuccugggcguguacuaccacaagaacaacaagagcuggauggagagcgaguuccggguguacagcagcgccaacaacugcaccuucgaguacgugagccagcccuuccugauggaccuggagggcaagcagggcaacuucaagaaccugcgggaguucguguucaagaacaucgacggcuacuucaagaucuacagcaagcacaccccaaucaaccuggugcgggaucugccccagggcuucucagcccuggagccccugguggaccugcccaucggcaucaacaucacccgguuccagacccugcuggcccugcaccggagcuaccugaccccaggcgacagcagcagcggguggacagcaggcgcggcugcuuacuacgugggcuaccugcagccccggaccuuccugcugaaguacaacgagaacggcaccaucaccgacgccguggacugcgcccuggacccucugagcgagaccaagugcacccugaagagcuucaccguggagaagggcaucuaccagaccagcaacuuccgggugcagcccaccgagagcaucgugcgguuccccaacaucaccaaccugugccccuucggcgagguguucaacgccacccgguucgccagcguguacgccuggaaccggaagcggaucagcaacugcguggccgacuacagcgugcuguacaacagcgccagcuucagcaccuucaagugcuacggcgugagccccaccaagcugaacgaccugugcuucaccaacguguacgccgacagcuucgugauccguggcgacgaggugcggcagaucgcacccggccagacaggcaagaucgccgacuacaacuacaagcugcccgacgacuucaccggcugcgugaucgccuggaacagcaacaaccucgacagcaaggugggcggcaacuacaacuaccuguaccggcuguuccggaagagcaaccugaagcccuucgagcgggacaucagcaccgagaucuaccaagccggcuccaccccuugcaacggcguggagggcuucaacugcuacuucccucugcagagcuacggcuuccagcccaccaacggcgugggcuaccagcccuaccgggugguggugcugagcuucgagcugcugcacgccccagccaccguguguggccccaagaagagcaccaaccuggugaagaacaagugcgugaacuucaacuucaacggccuuaccggcaccggcgugcugaccgagagcaacaagaaauuccugcccuuucagcaguucggccgggacaucgccgacaccaccgacgcugugcgggauccccagacccuggagauccuggacaucaccccuugcagcuucggcggcgugagcgugaucaccccaggcaccaacaccagcaaccagguggccgugcuguaccagggcgugaacugcaccgaggugcccguggccauccacgccgaccagcugacacccaccuggcgggucuacagcaccggcagcaacguguuccagacccgggccgguugccugaucggcgccgagcacgugaacaacagcuacgagugcgacauccccaucggcgccggcaucugugccagcuaccagacccagaccaauucaccccggagggcaaggagcguggccagccagagcaucaucgccuacaccaugagccugggcgccgagaacagcguggccuacagcaacaacagcaucgccauccccaccaacuucaccaucagcgugaccaccgagauucugcccgugagcaugaccaagaccagcguggacugcaccauguacaucugcggcgacagcaccgagugcagcaaccugcugcugcaguacggcagcuucugcacccagcugaaccgggcccugaccggcaucgccguggagcaggacaagaacacccaggagguguucgcccaggugaagcagaucuacaagaccccucccaucaaggacuucggcggcuucaacuucagccagauccugcccgaccccagcaagcccagcaagcggagcuucaucgaggaccugcuguucaacaaggugacccuagccgacgccggcuucaucaagcaguacggcgacugccucggcgacauagccgcccgggaccugaucugcgcccagaaguucaacggccugaccgugcugccuccccugcugaccgacgagaugaucgcccaguacaccagcgcccuguuagccggaaccaucaccagcggcuggacuuucggcgcuggagccgcucugcagauccccuucgccaugcagauggccuaccgguucaacggcaucggcgugacccagaacgugcuguacgagaaccagaagcugaucgccaaccaguucaacagcgccaucggcaagauccaggacagccugagcagcaccgcuagcgcccugggcaagcugcaggacguggugaaccagaacgcccaggcccugaacacccuggugaagcagcugagcagcaacuucggcgccaucagcagcgugcugaacgacauccugagccggcuggacaaggucgaggccgaggugcagaucgaccggcugaucacuggccggcugcagagccugcagaccuacgugacccagcagcugauccgggccgccgagauucgggccagcgccaaccuggccgccaccaagaugagcgagugcgugcugggccagagcaagcggguggacuucugcggcaagggcuaccaccugaugagcuuuccccagagcgcaccccacggagugguguuccugcacgugaccuacgugcccgcccaggagaagaacuucaccaccgccccagccaucugccacgacggcaaggcccacuuuccccgggagggcguguucgugagcaacggcacccacugguucgugacccagcggaacuucuacgagccccagaucaucaccaccgacaacaccuucgugagcggcaacugcgacguggugaucggcaucgugaacaacaccguguacgauccccugcagcccgagcuggacagcuucaaggaggagcuggacaaguacuucaagaaucacaccagccccgacguggaccugggcgacaucagcggcaucaacgccagcguggugaacauccagaaggagaucgaucggcugaacgagguggccaagaaccugaacgagagccugaucgaccugcaggagcugggcaaguacgagcaguacaucaaguggcccugguacaucuggcugggcuucaucgccggccugaucgccaucgugauggugaccaucaugcugugcugcaugaccagcugcugcagcugccugaagggcuguugcagcugcggcagcugcugcaaguucgacgaggacgacagcgagcccgugcugaagggcgugaagcugcacuacaccugaggacuaguuauaagacugacuagcccgaugggccucccaacgggcccuccuccccuccuugcaccgagauuaauagaucucaaaggcucuuuucagagccaccaaaaaaaaaaaaaaaaaaaaaaaaaaaaaaaaaaaaaaaaaaaaaaaaaaaaaaaaaaaaaaaaaaaaaaaaaaaaaaaaaaaaaaaaaaaaaaaaaaaaa

SEQ ID NO: 24332 - RNA, 4041 nt, Artificial Sequence
  SARS-CoV-2/Wuhan/WIV05/2019__EPI_ISL_402128 spike protein mRNA gc (1-1273)(Y453F_D614G)
aggagaaagcuuaccauguucguguuccuggugcugcugccccuggugagcagccagugcgugaaccugaccacccggacccagcugccaccagccuacaccaacagcuucacccggggcgucuacuaccccgacaagguguuccggagcagcguccugcacagcacccaggaccuguuccugcccuucuucagcaacgugaccugguuccacgccauccacgugagcggcaccaacggcaccaagcgguucgacaaccccgugcugcccuucaacgacggcguguacuucgccagcaccgagaagagcaacaucauccggggcuggaucuucggcaccacccuggacagcaagacccagagccugcugaucgugaauaacgccaccaacguggugaucaaggugugcgaguuccaguucugcaacgaccccuuccugggcguguacuaccacaagaacaacaagagcuggauggagagcgaguuccggguguacagcagcgccaacaacugcaccuucgaguacgugagccagcccuuccugauggaccuggagggcaagcagggcaacuucaagaaccugcgggaguucguguucaagaacaucgacggcuacuucaagaucuacagcaagcacaccccaaucaaccuggugcgggaucugccccagggcuucucagcccuggagccccugguggaccugcccaucggcaucaacaucacccgguuccagacccugcuggcccugcaccggagcuaccugaccccaggcgacagcagcagcggguggacagcaggcgcggcugcuuacuacgugggcuaccugcagccccggaccuuccugcugaaguacaacgagaacggcaccaucaccgacgccguggacugcgcccuggacccucugagcgagaccaagugcacccugaagagcuucaccguggagaagggcaucuaccagaccagcaacuuccgggugcagcccaccgagagcaucgugcgguuccccaacaucaccaaccugugccccuucggcgagguguucaacgccacccgguucgccagcguguacgccuggaaccggaagcggaucagcaacugcguggccgacuacagcgugcuguacaacagcgccagcuucagcaccuucaagugcuacggcgugagccccaccaagcugaacgaccugugcuucaccaacguguacgccgacagcuucgugauccguggcgacgaggugcggcagaucgcacccggccagacaggcaagaucgccgacuacaacuacaagcugcccgacgacuucaccggcugcgugaucgccuggaacagcaacaaccucgacagcaaggugggcggcaacuacaacuaccuguuccggcuguuccggaagagcaaccugaagcccuucgagcgggacaucagcaccgagaucuaccaagccggcuccaccccuugcaacggcguggagggcuucaacugcuacuucccucugcagagcuacggcuuccagcccaccaacggcgugggcuaccagcccuaccgggugguggugcugagcuucgagcugcugcacgccccagccaccguguguggccccaagaagagcaccaaccuggugaagaacaagugcgugaacuucaacuucaacggccuuaccggcaccggcgugcugaccgagagcaacaagaaauuccugcccuuucagcaguucggccgggacaucgccgacaccaccgacgcugugcgggauccccagacccuggagauccuggacaucaccccuugcagcuucggcggcgugagcgugaucaccccaggcaccaacaccagcaaccagguggccgugcuguaccagggcgugaacugcaccgaggugcccguggccauccacgccgaccagcugacacccaccuggcgggucuacagcaccggcagcaacguguuccagacccgggccgguugccugaucggcgccgagcacgugaacaacagcuacgagugcgacauccccaucggcgccggcaucugugccagcuaccagacccagaccaauucaccccggagggcaaggagcguggccagccagagcaucaucgccuacaccaugagccugggcgccgagaacagcguggccuacagcaacaacagcaucgccauccccaccaacuucaccaucagcgugaccaccgagauucugcccgugagcaugaccaagaccagcguggacugcaccauguacaucugcggcgacagcaccgagugcagcaaccugcugcugcaguacggcagcuucugcacccagcugaaccgggcccugaccggcaucgccguggagcaggacaagaacacccaggagguguucgcccaggugaagcagaucuacaagaccccucccaucaaggacuucggcggcuucaacuucagccagauccugcccgaccccagcaagcccagcaagcggagcuucaucgaggaccugcuguucaacaaggugacccuagccgacgccggcuucaucaagcaguacggcgacugccucggcgacauagccgcccgggaccugaucugcgcccagaaguucaacggccugaccgugcugccuccccugcugaccgacgagaugaucgcccaguacaccagcgcccuguuagccggaaccaucaccagcggcuggacuuucggcgcuggagccgcucugcagauccccuucgccaugcagauggccuaccgguucaacggcaucggcgugacccagaacgugcuguacgagaaccagaagcugaucgccaaccaguucaacagcgccaucggcaagauccaggacagccugagcagcaccgcuagcgcccugggcaagcugcaggacguggugaaccagaacgcccaggcccugaacacccuggugaagcagcugagcagcaacuucggcgccaucagcagcgugcugaacgacauccugagccggcuggacaaggucgaggccgaggugcagaucgaccggcugaucacuggccggcugcagagccugcagaccuacgugacccagcagcugauccgggccgccgagauucgggccagcgccaaccuggccgccaccaagaugagcgagugcgugcugggccagagcaagcggguggacuucugcggcaagggcuaccaccugaugagcuuuccccagagcgcaccccacggagugguguuccugcacgugaccuacgugcccgcccaggagaagaacuucaccaccgccccagccaucugccacgacggcaaggcccacuuuccccgggagggcguguucgugagcaacggcacccacugguucgugacccagcggaacuucuacgagccccagaucaucaccaccgacaacaccuucgugagcggcaacugcgacguggugaucggcaucgugaacaacaccguguacgauccccugcagcccgagcuggacagcuucaaggaggagcuggacaaguacuucaagaaucacaccagccccgacguggaccugggcgacaucagcggcaucaacgccagcguggugaacauccagaaggagaucgaucggcugaacgagguggccaagaaccugaacgagagccugaucgaccugcaggagcugggcaaguacgagcaguacaucaaguggcccugguacaucuggcugggcuucaucgccggccugaucgccaucgugauggugaccaucaugcugugcugcaugaccagcugcugcagcugccugaagggcuguugcagcugcggcagcugcugcaaguucgacgaggacgacagcgagcccgugcugaagggcgugaagcugcacuacaccugaggacuaguuauaagacugacuagcccgaugggccucccaacgggcccuccuccccuccuugcaccgagauuaauagaucucaaaggcucuuuucagagccaccaaaaaaaaaaaaaaaaaaaaaaaaaaaaaaaaaaaaaaaaaaaaaaaaaaaaaaaaaaaaaaaaaaaaaaaaaaaaaaaaaaaaaaaaaaaaaaaaaaaaa

SEQ ID NO: 24333 - RNA, 4041 nt, Artificial Sequence
  SARS-CoV-2/Wuhan/WIV05/2019__EPI_ISL_402128 spike protein mRNA gc (1-1273)(D614G_I692V)
aggagaaagcuuaccauguucguguuccuggugcugcugccccuggugagcagccagugcgugaaccugaccacccggacccagcugccaccagccuacaccaacagcuucacccggggcgucuacuaccccgacaagguguuccggagcagcguccugcacagcacccaggaccuguuccugcccuucuucagcaacgugaccugguuccacgccauccacgugagcggcaccaacggcaccaagcgguucgacaaccccgugcugcccuucaacgacggcguguacuucgccagcaccgagaagagcaacaucauccggggcuggaucuucggcaccacccuggacagcaagacccagagccugcugaucgugaauaacgccaccaacguggugaucaaggugugcgaguuccaguucugcaacgaccccuuccugggcguguacuaccacaagaacaacaagagcuggauggagagcgaguuccggguguacagcagcgccaacaacugcaccuucgaguacgugagccagcccuuccugauggaccuggagggcaagcagggcaacuucaagaaccugcgggaguucguguucaagaacaucgacggcuacuucaagaucuacagcaagcacaccccaaucaaccuggugcgggaucugccccagggcuucucagcccuggagccccugguggaccugcccaucggcaucaacaucacccgguuccagacccugcuggcccugcaccggagcuaccugaccccaggcgacagcagcagcggguggacagcaggcgcggcugcuuacuacgugggcuaccugcagccccggaccuuccugcugaaguacaacgagaacggcaccaucaccgacgccguggacugcgcccuggacccucugagcgagaccaagugcacccugaagagcuucaccguggagaagggcaucuaccagaccagcaacuuccgggugcagcccaccgagagcaucgugcgguuccccaacaucaccaaccugugccccuucggcgagguguucaacgccacccgguucgccagcguguacgccuggaaccggaagcggaucagcaacugcguggccgacuacagcgugcuguacaacagcgccagcuucagcaccuucaagugcuacggcgugagccccaccaagcugaacgaccugugcuucaccaacguguacgccgacagcuucgugauccguggcgacgaggugcggcagaucgcacccggccagacaggcaagaucgccgacuacaacuacaagcugcccgacgacuucaccggcugcgugaucgccuggaacagcaacaaccucgacagcaaggugggcggcaacuacaacuaccuguaccggcuguuccggaagagcaaccugaagcccuucgagcgggacaucagcaccgagaucuaccaagccggcuccaccccuugcaacggcguggagggcuucaacugcuacuucccucugcagagcuacggcuuccagcccaccaacggcgugggcuaccagcccuaccgggugguggugcugagcuucgagcugcugcacgccccagccaccguguguggccccaagaagagcaccaaccuggugaagaacaagugcgugaacuucaacuucaacggccuuaccggcaccggcgugcugaccgagagcaacaagaaauuccugcccuuucagcaguucggccgggacaucgccgacaccaccgacgcugugcgggauccccagacccuggagauccuggacaucaccccuugcagcuucggcggcgugagcgugaucaccccaggcaccaacaccagcaaccagguggccgugcuguaccagggcgugaacugcaccgaggugcccguggccauccacgccgaccagcugacacccaccuggcgggucuacagcaccggcagcaacguguuccagacccgggccgguugccugaucggcgccgagcacgugaacaacagcuacgagugcgacauccccaucggcgccggcaucugugccagcuaccagacccagaccaauucaccccggagggcaaggagcguggccagccagagcgugaucgccuacaccaugagccugggcgccgagaacagcguggccuacagcaacaacagcaucgccauccccaccaacuucaccaucagcgugaccaccgagauucugcccgugagcaugaccaagaccagcguggacugcaccauguacaucugcggcgacagcaccgagugcagcaaccugcugcugcaguacggcagcuucugcacccagcugaaccgggcccugaccggcaucgccguggagcaggacaagaacacccaggagguguucgcccaggugaagcagaucuacaagaccccucccaucaaggacuucggcggcuucaacuucagccagauccugcccgaccccagcaagcccagcaagcggagcuucaucgaggaccugcuguucaacaaggugacccuagccgacgccggcuucaucaagcaguacggcgacugccucggcgacauagccgcccgggaccugaucugcgcccagaaguucaacggccugaccgugcugccuccccugcugaccgacgagaugaucgcccaguacaccagcgcccuguuagccggaaccaucaccagcggcuggacuuucggcgcuggagccgcucugcagauccccuucgccaugcagauggccuaccgguucaacggcaucggcgugacccagaacgugcuguacgagaaccagaagcugaucgccaaccaguucaacagcgccaucggcaagauccaggacagccugagcagcaccgcuagcgcccugggcaagcugcaggacguggugaaccagaacgcccaggcccugaacacccuggugaagcagcugagcagcaacuucggcgccaucagcagcgugcugaacgacauccugagccggcuggacaaggucgaggccgaggugcagaucgaccggcugaucacuggccggcugcagagccugcagaccuacgugacccagcagcugauccgggccgccgagauucgggccagcgccaaccuggccgccaccaagaugagcgagugcgugcugggccagagcaagcggguggacuucugcggcaagggcuaccaccugaugagcuuuccccagagcgcaccccacggagugguguuccugcacgugaccuacgugcccgcccaggagaagaacuucaccaccgccccagccaucugccacgacggcaaggcccacuuuccccgggagggcguguucgugagcaacggcacccacugguucgugacccagcggaacuucuacgagccccagaucaucaccaccgacaacaccuucgugagcggcaacugcgacguggugaucggcaucgugaacaacaccguguacgauccccugcagcccgagcuggacagcuucaaggaggagcuggacaaguacuucaagaaucacaccagccccgacguggaccugggcgacaucagcggcaucaacgccagcguggugaacauccagaaggagaucgaucggcugaacgagguggccaagaaccugaacgagagccugaucgaccugcaggagcugggcaaguacgagcaguacaucaaguggcccugguacaucuggcugggcuucaucgccggccugaucgccaucgugauggugaccaucaugcugugcugcaugaccagcugcugcagcugccugaagggcuguugcagcugcggcagcugcugcaaguucgacgaggacgacagcgagcccgugcugaagggcgugaagcugcacuacaccugaggacuaguuauaagacugacuagcccgaugggccucccaacgggcccuccuccccuccuugcaccgagauuaauagaucucaaaggcucuuuucagagccaccaaaaaaaaaaaaaaaaaaaaaaaaaaaaaaaaaaaaaaaaaaaaaaaaaaaaaaaaaaaaaaaaaaaaaaaaaaaaaaaaaaaaaaaaaaaaaaaaaaaaa

SEQ ID NO: 24334 - RNA, 4041 nt, Artificial Sequence
  SARS-CoV-2/Wuhan/WIV05/2019__EPI_ISL_402128 spike protein mRNA gc (1-1273)(D614G_M1229I)
aggagaaagcuuaccauguucguguuccuggugcugcugccccuggugagcagccagugcgugaaccugaccacccggacccagcugccaccagccuacaccaacagcuucacccggggcgucuacuaccccgacaagguguuccggagcagcguccugcacagcacccaggaccuguuccugcccuucuucagcaacgugaccugguuccacgccauccacgugagcggcaccaacggcaccaagcgguucgacaaccccgugcugcccuucaacgacggcguguacuucgccagcaccgagaagagcaacaucauccggggcuggaucuucggcaccacccuggacagcaagacccagagccugcugaucgugaauaacgccaccaacguggugaucaaggugugcgaguuccaguucugcaacgaccccuuccugggcguguacuaccacaagaacaacaagagcuggauggagagcgaguuccggguguacagcagcgccaacaacugcaccuucgaguacgugagccagcccuuccugauggaccuggagggcaagcagggcaacuucaagaaccugcgggaguucguguucaagaacaucgacggcuacuucaagaucuacagcaagcacaccccaaucaaccuggugcgggaucugccccagggcuucucagcccuggagccccugguggaccugcccaucggcaucaacaucacccgguuccagacccugcuggcccugcaccggagcuaccugaccccaggcgacagcagcagcggguggacagcaggcgcggcugcuuacuacgugggcuaccugcagccccggaccuuccugcugaaguacaacgagaacggcaccaucaccgacgccguggacugcgcccuggacccucugagcgagaccaagugcacccugaagagcuucaccguggagaagggcaucuaccagaccagcaacuuccgggugcagcccaccgagagcaucgugcgguuccccaacaucaccaaccugugccccuucggcgagguguucaacgccacccgguucgccagcguguacgccuggaaccggaagcggaucagcaacugcguggccgacuacagcgugcuguacaacagcgccagcuucagcaccuucaagugcuacggcgugagccccaccaagcugaacgaccugugcuucaccaacguguacgccgacagcuucgugauccguggcgacgaggugcggcagaucgcacccggccagacaggcaagaucgccgacuacaacuacaagcugcccgacgacuucaccggcugcgugaucgccuggaacagcaacaaccucgacagcaaggugggcggcaacuacaacuaccuguaccggcuguuccggaagagcaaccugaagcccuucgagcgggacaucagcaccgagaucuaccaagccggcuccaccccuugcaacggcguggagggcuucaacugcuacuucccucugcagagcuacggcuuccagcccaccaacggcgugggcuaccagcccuaccgggugguggugcugagcuucgagcugcugcacgccccagccaccguguguggccccaagaagagcaccaaccuggugaagaacaagugcgugaacuucaacuucaacggccuuaccggcaccggcgugcugaccgagagcaacaagaaauuccugcccuuucagcaguucggccgggacaucgccgacaccaccgacgcugugcgggauccccagacccuggagauccuggacaucaccccuugcagcuucggcggcgugagcgugaucaccccaggcaccaacaccagcaaccagguggccgugcuguaccagggcgugaacugcaccgaggugcccguggccauccacgccgaccagcugacacccaccuggcgggucuacagcaccggcagcaacguguuccagacccgggccgguugccugaucggcgccgagcacgugaacaacagcuacgagugcgacauccccaucggcgccggcaucugugccagcuaccagacccagaccaauucaccccggagggcaaggagcguggccagccagagcaucaucgccuacaccaugagccugggcgccgagaacagcguggccuacagcaacaacagcaucgccauccccaccaacuucaccaucagcgugaccaccgagauucugcccgugagcaugaccaagaccagcguggacugcaccauguacaucugcggcgacagcaccgagugcagcaaccugcugcugcaguacggcagcuucugcacccagcugaaccgggcccugaccggcaucgccguggagcaggacaagaacacccaggagguguucgcccaggugaagcagaucuacaagaccccucccaucaaggacuucggcggcuucaacuucagccagauccugcccgaccccagcaagcccagcaagcggagcuucaucgaggaccugcuguucaacaaggugacccuagccgacgccggcuucaucaagcaguacggcgacugccucggcgacauagccgcccgggaccugaucugcgcccagaaguucaacggccugaccgugcugccuccccugcugaccgacgagaugaucgcccaguacaccagcgcccuguuagccggaaccaucaccagcggcuggacuuucggcgcuggagccgcucugcagauccccuucgccaugcagauggccuaccgguucaacggcaucggcgugacccagaacgugcuguacgagaaccagaagcugaucgccaaccaguucaacagcgccaucggcaagauccaggacagccugagcagcaccgcuagcgcccugggcaagcugcaggacguggugaaccagaacgcccaggcccugaacacccuggugaagcagcugagcagcaacuucggcgccaucagcagcgugcugaacgacauccugagccggcuggacaaggucgaggccgaggugcagaucgaccggcugaucacuggccggcugcagagccugcagaccuacgugacccagcagcugauccgggccgccgagauucgggccagcgccaaccuggccgccaccaagaugagcgagugcgugcugggccagagcaagcggguggacuucugcggcaagggcuaccaccugaugagcuuuccccagagcgcaccccacggagugguguuccugcacgugaccuacgugcccgcccaggagaagaacuucaccaccgccccagccaucugccacgacggcaaggcccacuuuccccgggagggcguguucgugagcaacggcacccacugguucgugacccagcggaacuucuacgagccccagaucaucaccaccgacaacaccuucgugagcggcaacugcgacguggugaucggcaucgugaacaacaccguguacgauccccugcagcccgagcuggacagcuucaaggaggagcuggacaaguacuucaagaaucacaccagccccgacguggaccugggcgacaucagcggcaucaacgccagcguggugaacauccagaaggagaucgaucggcugaacgagguggccaagaaccugaacgagagccugaucgaccugcaggagcugggcaaguacgagcaguacaucaaguggcccugguacaucuggcugggcuucaucgccggccugaucgccaucgugaucgugaccaucaugcugugcugcaugaccagcugcugcagcugccugaagggcuguugcagcugcggcagcugcugcaaguucgacgaggacgacagcgagcccgugcugaagggcgugaagcugcacuacaccugaggacuaguuauaagacugacuagcccgaugggccucccaacgggcccuccuccccuccuugcaccgagauuaauagaucucaaaggcucuuuucagagccaccaaaaaaaaaaaaaaaaaaaaaaaaaaaaaaaaaaaaaaaaaaaaaaaaaaaaaaaaaaaaaaaaaaaaaaaaaaaaaaaaaaaaaaaaaaaaaaaaaaaaa

SEQ ID NO: 24335 - RNA, 4035 nt, Artificial Sequence
  SARS-CoV-2/Wuhan/WIV05/2019__EPI_ISL_402128 spike protein mRNA gc (1-1273)(H69del_V70del_A222V_Y453F_S477N_D614G_I692V)
aggagaaagcuuaccauguucguguuccuggugcugcugccccuggugagcagccagugcgugaaccugaccacccggacccagcugccaccagccuacaccaacagcuucacccggggcgucuacuaccccgacaagguguuccggagcagcguccugcacagcacccaggaccuguuccugcccuucuucagcaacgugaccugguuccacgccaucagcggcaccaacggcaccaagcgguucgacaaccccgugcugcccuucaacgacggcguguacuucgccagcaccgagaagagcaacaucauccggggcuggaucuucggcaccacccuggacagcaagacccagagccugcugaucgugaauaacgccaccaacguggugaucaaggugugcgaguuccaguucugcaacgaccccuuccugggcguguacuaccacaagaacaacaagagcuggauggagagcgaguuccggguguacagcagcgccaacaacugcaccuucgaguacgugagccagcccuuccugauggaccuggagggcaagcagggcaacuucaagaaccugcgggaguucguguucaagaacaucgacggcuacuucaagaucuacagcaagcacaccccaaucaaccuggugcgggaucugccccagggcuucucagugcuggagccccugguggaccugcccaucggcaucaacaucacccgguuccagacccugcuggcccugcaccggagcuaccugaccccaggcgacagcagcagcggguggacagcaggcgcggcugcuuacuacgugggcuaccugcagccccggaccuuccugcugaaguacaacgagaacggcaccaucaccgacgccguggacugcgcccuggacccucugagcgagaccaagugcacccugaagagcuucaccguggagaagggcaucuaccagaccagcaacuuccgggugcagcccaccgagagcaucgugcgguuccccaacaucaccaaccugugccccuucggcgagguguucaacgccacccgguucgccagcguguacgccuggaaccggaagcggaucagcaacugcguggccgacuacagcgugcuguacaacagcgccagcuucagcaccuucaagugcuacggcgugagccccaccaagcugaacgaccugugcuucaccaacguguacgccgacagcuucgugauccguggcgacgaggugcggcagaucgcacccggccagacaggcaagaucgccgacuacaacuacaagcugcccgacgacuucaccggcugcgugaucgccuggaacagcaacaaccucgacagcaaggugggcggcaacuacaacuaccuguuccggcuguuccggaagagcaaccugaagcccuucgagcgggacaucagcaccgagaucuaccaagccggcaacaccccuugcaacggcguggagggcuucaacugcuacuucccucugcagagcuacggcuuccagcccaccaacggcgugggcuaccagcccuaccgggugguggugcugagcuucgagcugcugcacgccccagccaccguguguggccccaagaagagcaccaaccuggugaagaacaagugcgugaacuucaacuucaacggccuuaccggcaccggcgugcugaccgagagcaacaagaaauuccugcccuuucagcaguucggccgggacaucgccgacaccaccgacgcugugcgggauccccagacccuggagauccuggacaucaccccuugcagcuucggcggcgugagcgugaucaccccaggcaccaacaccagcaaccagguggccgugcuguaccagggcgugaacugcaccgaggugcccguggccauccacgccgaccagcugacacccaccuggcgggucuacagcaccggcagcaacguguuccagacccgggccgguugccugaucggcgccgagcacgugaacaacagcuacgagugcgacauccccaucggcgccggcaucugugccagcuaccagacccagaccaauucaccccggagggcaaggagcguggccagccagagcgugaucgccuacaccaugagccugggcgccgagaacagcguggccuacagcaacaacagcaucgccauccccaccaacuucaccaucagcgugaccaccgagauucugcccgugagcaugaccaagaccagcguggacugcaccauguacaucugcggcgacagcaccgagugcagcaaccugcugcugcaguacggcagcuucugcacccagcugaaccgggcccugaccggcaucgccguggagcaggacaagaacacccaggagguguucgcccaggugaagcagaucuacaagaccccucccaucaaggacuucggcggcuucaacuucagccagauccugcccgaccccagcaagcccagcaagcggagcuucaucgaggaccugcuguucaacaaggugacccuagccgacgccggcuucaucaagcaguacggcgacugccucggcgacauagccgcccgggaccugaucugcgcccagaaguucaacggccugaccgugcugccuccccugcugaccgacgagaugaucgcccaguacaccagcgcccuguuagccggaaccaucaccagcggcuggacuuucggcgcuggagccgcucugcagauccccuucgccaugcagauggccuaccgguucaacggcaucggcgugacccagaacgugcuguacgagaaccagaagcugaucgccaaccaguucaacagcgccaucggcaagauccaggacagccugagcagcaccgcuagcgcccugggcaagcugcaggacguggugaaccagaacgcccaggcccugaacacccuggugaagcagcugagcagcaacuucggcgccaucagcagcgugcugaacgacauccugagccggcuggacaaggucgaggccgaggugcagaucgaccggcugaucacuggccggcugcagagccugcagaccuacgugacccagcagcugauccgggccgccgagauucgggccagcgccaaccuggccgccaccaagaugagcgagugcgugcugggccagagcaagcggguggacuucugcggcaagggcuaccaccugaugagcuuuccccagagcgcaccccacggagugguguuccugcacgugaccuacgugcccgcccaggagaagaacuucaccaccgccccagccaucugccacgacggcaaggcccacuuuccccgggagggcguguucgugagcaacggcacccacugguucgugacccagcggaacuucuacgagccccagaucaucaccaccgacaacaccuucgugagcggcaacugcgacguggugaucggcaucgugaacaacaccguguacgauccccugcagcccgagcuggacagcuucaaggaggagcuggacaaguacuucaagaaucacaccagccccgacguggaccugggcgacaucagcggcaucaacgccagcguggugaacauccagaaggagaucgaucggcugaacgagguggccaagaaccugaacgagagccugaucgaccugcaggagcugggcaaguacgagcaguacaucaaguggcccugguacaucuggcugggcuucaucgccggccugaucgccaucgugauggugaccaucaugcugugcugcaugaccagcugcugcagcugccugaagggcuguugcagcugcggcagcugcugcaaguucgacgaggacgacagcgagcccgugcugaagggcgugaagcugcacuacaccugaggacuaguuauaagacugacuagcccgaugggccucccaacgggcccuccuccccuccuugcaccgagauuaauagaucucaaaggcucuuuucagagccaccaaaaaaaaaaaaaaaaaaaaaaaaaaaaaaaaaaaaaaaaaaaaaaaaaaaaaaaaaaaaaaaaaaaaaaaaaaaaaaaaaaaaaaaaaaaaaaaaaaaaa

SEQ ID NO: 24336 - RNA, 4035 nt, Artificial Sequence
  SARS-CoV-2/Wuhan/WIV05/2019__EPI_ISL_402128 spike protein mRNA gc (1-1273)(H69del_V70del_Y453F_D614G_I692V_M1229I)
aggagaaagcuuaccauguucguguuccuggugcugcugccccuggugagcagccagugcgugaaccugaccacccggacccagcugccaccagccuacaccaacagcuucacccggggcgucuacuaccccgacaagguguuccggagcagcguccugcacagcacccaggaccuguuccugcccuucuucagcaacgugaccugguuccacgccaucagcggcaccaacggcaccaagcgguucgacaaccccgugcugcccuucaacgacggcguguacuucgccagcaccgagaagagcaacaucauccggggcuggaucuucggcaccacccuggacagcaagacccagagccugcugaucgugaauaacgccaccaacguggugaucaaggugugcgaguuccaguucugcaacgaccccuuccugggcguguacuaccacaagaacaacaagagcuggauggagagcgaguuccggguguacagcagcgccaacaacugcaccuucgaguacgugagccagcccuuccugauggaccuggagggcaagcagggcaacuucaagaaccugcgggaguucguguucaagaacaucgacggcuacuucaagaucuacagcaagcacaccccaaucaaccuggugcgggaucugccccagggcuucucagcccuggagccccugguggaccugcccaucggcaucaacaucacccgguuccagacccugcuggcccugcaccggagcuaccugaccccaggcgacagcagcagcggguggacagcaggcgcggcugcuuacuacgugggcuaccugcagccccggaccuuccugcugaaguacaacgagaacggcaccaucaccgacgccguggacugcgcccuggacccucugagcgagaccaagugcacccugaagagcuucaccguggagaagggcaucuaccagaccagcaacuuccgggugcagcccaccgagagcaucgugcgguuccccaacaucaccaaccugugccccuucggcgagguguucaacgccacccgguucgccagcguguacgccuggaaccggaagcggaucagcaacugcguggccgacuacagcgugcuguacaacagcgccagcuucagcaccuucaagugcuacggcgugagccccaccaagcugaacgaccugugcuucaccaacguguacgccgacagcuucgugauccguggcgacgaggugcggcagaucgcacccggccagacaggcaagaucgccgacuacaacuacaagcugcccgacgacuucaccggcugcgugaucgccuggaacagcaacaaccucgacagcaaggugggcggcaacuacaacuaccuguuccggcuguuccggaagagcaaccugaagcccuucgagcgggacaucagcaccgagaucuaccaagccggcuccaccccuugcaacggcguggagggcuucaacugcuacuucccucugcagagcuacggcuuccagcccaccaacggcgugggcuaccagcccuaccgggugguggugcugagcuucgagcugcugcacgccccagccaccguguguggccccaagaagagcaccaaccuggugaagaacaagugcgugaacuucaacuucaacggccuuaccggcaccggcgugcugaccgagagcaacaagaaauuccugcccuuucagcaguucggccgggacaucgccgacaccaccgacgcugugcgggauccccagacccuggagauccuggacaucaccccuugcagcuucggcggcgugagcgugaucaccccaggcaccaacaccagcaaccagguggccgugcuguaccagggcgugaacugcaccgaggugcccguggccauccacgccgaccagcugacacccaccuggcgggucuacagcaccggcagcaacguguuccagacccgggccgguugccugaucggcgccgagcacgugaacaacagcuacgagugcgacauccccaucggcgccggcaucugugccagcuaccagacccagaccaauucaccccggagggcaaggagcguggccagccagagcgugaucgccuacaccaugagccugggcgccgagaacagcguggccuacagcaacaacagcaucgccauccccaccaacuucaccaucagcgugaccaccgagauucugcccgugagcaugaccaagaccagcguggacugcaccauguacaucugcggcgacagcaccgagugcagcaaccugcugcugcaguacggcagcuucugcacccagcugaaccgggcccugaccggcaucgccguggagcaggacaagaacacccaggagguguucgcccaggugaagcagaucuacaagaccccucccaucaaggacuucggcggcuucaacuucagccagauccugcccgaccccagcaagcccagcaagcggagcuucaucgaggaccugcuguucaacaaggugacccuagccgacgccggcuucaucaagcaguacggcgacugccucggcgacauagccgcccgggaccugaucugcgcccagaaguucaacggccugaccgugcugccuccccugcugaccgacgagaugaucgcccaguacaccagcgcccuguuagccggaaccaucaccagcggcuggacuuucggcgcuggagccgcucugcagauccccuucgccaugcagauggccuaccgguucaacggcaucggcgugacccagaacgugcuguacgagaaccagaagcugaucgccaaccaguucaacagcgccaucggcaagauccaggacagccugagcagcaccgcuagcgcccugggcaagcugcaggacguggugaaccagaacgcccaggcccugaacacccuggugaagcagcugagcagcaacuucggcgccaucagcagcgugcugaacgacauccugagccggcuggacaaggucgaggccgaggugcagaucgaccggcugaucacuggccggcugcagagccugcagaccuacgugacccagcagcugauccgggccgccgagauucgggccagcgccaaccuggccgccaccaagaugagcgagugcgugcugggccagagcaagcggguggacuucugcggcaagggcuaccaccugaugagcuuuccccagagcgcaccccacggagugguguuccugcacgugaccuacgugcccgcccaggagaagaacuucaccaccgccccagccaucugccacgacggcaaggcccacuuuccccgggagggcguguucgugagcaacggcacccacugguucgugacccagcggaacuucuacgagccccagaucaucaccaccgacaacaccuucgugagcggcaacugcgacguggugaucggcaucgugaacaacaccguguacgauccccugcagcccgagcuggacagcuucaaggaggagcuggacaaguacuucaagaaucacaccagccccgacguggaccugggcgacaucagcggcaucaacgccagcguggugaacauccagaaggagaucgaucggcugaacgagguggccaagaaccugaacgagagccugaucgaccugcaggagcugggcaaguacgagcaguacaucaaguggcccugguacaucuggcugggcuucaucgccggccugaucgccaucgugaucgugaccaucaugcugugcugcaugaccagcugcugcagcugccugaagggcuguugcagcugcggcagcugcugcaaguucgacgaggacgacagcgagcccgugcugaagggcgugaagcugcacuacaccugaggacuaguuauaagacugacuagcccgaugggccucccaacgggcccuccuccccuccuugcaccgagauuaauagaucucaaaggcucuuuucagagccaccaaaaaaaaaaaaaaaaaaaaaaaaaaaaaaaaaaaaaaaaaaaaaaaaaaaaaaaaaaaaaaaaaaaaaaaaaaaaaaaaaaaaaaaaaaaaaaaaaaaaa

SEQ ID NO: 24337 - RNA, 4032 nt, Artificial Sequence
  SARS-CoV-2/Wuhan/WIV05/2019__EPI_ISL_402128 spike protein mRNA gc (1-1273)(H69del_V70del_Y144del_N501Y_A570D_D614G_P681H_T716I_S982 A_D1118H)
aggagaaagcuuaccauguucguguuccuggugcugcugccccuggugagcagccagugcgugaaccugaccacccggacccagcugccaccagccuacaccaacagcuucacccggggcgucuacuaccccgacaagguguuccggagcagcguccugcacagcacccaggaccuguuccugcccuucuucagcaacgugaccugguuccacgccaucagcggcaccaacggcaccaagcgguucgacaaccccgugcugcccuucaacgacggcguguacuucgccagcaccgagaagagcaacaucauccggggcuggaucuucggcaccacccuggacagcaagacccagagccugcugaucgugaauaacgccaccaacguggugaucaaggugugcgaguuccaguucugcaacgaccccuuccugggcguguaccacaagaacaacaagagcuggauggagagcgaguuccggguguacagcagcgccaacaacugcaccuucgaguacgugagccagcccuuccugauggaccuggagggcaagcagggcaacuucaagaaccugcgggaguucguguucaagaacaucgacggcuacuucaagaucuacagcaagcacaccccaaucaaccuggugcgggaucugccccagggcuucucagcccuggagccccugguggaccugcccaucggcaucaacaucacccgguuccagacccugcuggcccugcaccggagcuaccugaccccaggcgacagcagcagcggguggacagcaggcgcggcugcuuacuacgugggcuaccugcagccccggaccuuccugcugaaguacaacgagaacggcaccaucaccgacgccguggacugcgcccuggacccucugagcgagaccaagugcacccugaagagcuucaccguggagaagggcaucuaccagaccagcaacuuccgggugcagcccaccgagagcaucgugcgguuccccaacaucaccaaccugugccccuucggcgagguguucaacgccacccgguucgccagcguguacgccuggaaccggaagcggaucagcaacugcguggccgacuacagcgugcuguacaacagcgccagcuucagcaccuucaagugcuacggcgugagccccaccaagcugaacgaccugugcuucaccaacguguacgccgacagcuucgugauccguggcgacgaggugcggcagaucgcacccggccagacaggcaagaucgccgacuacaacuacaagcugcccgacgacuucaccggcugcgugaucgccuggaacagcaacaaccucgacagcaaggugggcggcaacuacaacuaccuguaccggcuguuccggaagagcaaccugaagcccuucgagcgggacaucagcaccgagaucuaccaagccggcuccaccccuugcaacggcguggagggcuucaacugcuacuucccucugcagagcuacggcuuccagcccaccuacggcgugggcuaccagcccuaccgggugguggugcugagcuucgagcugcugcacgccccagccaccguguguggccccaagaagagcaccaaccuggugaagaacaagugcgugaacuucaacuucaacggccuuaccggcaccggcgugcugaccgagagcaacaagaaauuccugcccuuucagcaguucggccgggacaucgacgacaccaccgacgcugugcgggauccccagacccuggagauccuggacaucaccccuugcagcuucggcggcgugagcgugaucaccccaggcaccaacaccagcaaccagguggccgugcuguaccagggcgugaacugcaccgaggugcccguggccauccacgccgaccagcugacacccaccuggcgggucuacagcaccggcagcaacguguuccagacccgggccgguugccugaucggcgccgagcacgugaacaacagcuacgagugcgacauccccaucggcgccggcaucugugccagcuaccagacccagaccaauucacaccggagggcaaggagcguggccagccagagcaucaucgccuacaccaugagccugggcgccgagaacagcguggccuacagcaacaacagcaucgccauccccaucaacuucaccaucagcgugaccaccgagauucugcccgugagcaugaccaagaccagcguggacugcaccauguacaucugcggcgacagcaccgagugcagcaaccugcugcugcaguacggcagcuucugcacccagcugaaccgggcccugaccggcaucgccguggagcaggacaagaacacccaggagguguucgcccaggugaagcagaucuacaagaccccucccaucaaggacuucggcggcuucaacuucagccagauccugcccgaccccagcaagcccagcaagcggagcuucaucgaggaccugcuguucaacaaggugacccuagccgacgccggcuucaucaagcaguacggcgacugccucggcgacauagccgcccgggaccugaucugcgcccagaaguucaacggccugaccgugcugccuccccugcugaccgacgagaugaucgcccaguacaccagcgcccuguuagccggaaccaucaccagcggcuggacuuucggcgcuggagccgcucugcagauccccuucgccaugcagauggccuaccgguucaacggcaucggcgugacccagaacgugcuguacgagaaccagaagcugaucgccaaccaguucaacagcgccaucggcaagauccaggacagccugagcagcaccgcuagcgcccugggcaagcugcaggacguggugaaccagaacgcccaggcccugaacacccuggugaagcagcugagcagcaacuucggcgccaucagcagcgugcugaacgacauccuggcccggcuggacaaggucgaggccgaggugcagaucgaccggcugaucacuggccggcugcagagccugcagaccuacgugacccagcagcugauccgggccgccgagauucgggccagcgccaaccuggccgccaccaagaugagcgagugcgugcugggccagagcaagcggguggacuucugcggcaagggcuaccaccugaugagcuuuccccagagcgcaccccacggagugguguuccugcacgugaccuacgugcccgcccaggagaagaacuucaccaccgccccagccaucugccacgacggcaaggcccacuuuccccgggagggcguguucgugagcaacggcacccacugguucgugacccagcggaacuucuacgagccccagaucaucaccacccacaacaccuucgugagcggcaacugcgacguggugaucggcaucgugaacaacaccguguacgauccccugcagcccgagcuggacagcuucaaggaggagcuggacaaguacuucaagaaucacaccagccccgacguggaccugggcgacaucagcggcaucaacgccagcguggugaacauccagaaggagaucgaucggcugaacgagguggccaagaaccugaacgagagccugaucgaccugcaggagcugggcaaguacgagcaguacaucaaguggcccugguacaucuggcugggcuucaucgccggccugaucgccaucgugauggugaccaucaugcugugcugcaugaccagcugcugcagcugccugaagggcuguugcagcugcggcagcugcugcaaguucgacgaggacgacagcgagcccgugcugaagggcgugaagcugcacuacaccugaggacuaguuauaagacugacuagcccgaugggccucccaacgggcccuccuccccuccuugcaccgagauuaauagaucucaaaggcucuuuucagagccaccaaaaaaaaaaaaaaaaaaaaaaaaaaaaaaaaaaaaaaaaaaaaaaaaaaaaaaaaaaaaaaaaaaaaaaaaaaaaaaaaaaaaaaaaaaaaaaaaaaaaa

SEQ ID NO: 24338 - RNA, 4041 nt, Artificial Sequence
  SARS-CoV-2/Wuhan/WIV05/2019__EPI_ISL_402128 spike protein mRNA gc (1-1273)(K417N_E484K_N501Y_D614G)
aggagaaagcuuaccauguucguguuccuggugcugcugccccuggugagcagccagugcgugaaccugaccacccggacccagcugccaccagccuacaccaacagcuucacccggggcgucuacuaccccgacaagguguuccggagcagcguccugcacagcacccaggaccuguuccugcccuucuucagcaacgugaccugguuccacgccauccacgugagcggcaccaacggcaccaagcgguucgacaaccccgugcugcccuucaacgacggcguguacuucgccagcaccgagaagagcaacaucauccggggcuggaucuucggcaccacccuggacagcaagacccagagccugcugaucgugaauaacgccaccaacguggugaucaaggugugcgaguuccaguucugcaacgaccccuuccugggcguguacuaccacaagaacaacaagagcuggauggagagcgaguuccggguguacagcagcgccaacaacugcaccuucgaguacgugagccagcccuuccugauggaccuggagggcaagcagggcaacuucaagaaccugcgggaguucguguucaagaacaucgacggcuacuucaagaucuacagcaagcacaccccaaucaaccuggugcgggaucugccccagggcuucucagcccuggagccccugguggaccugcccaucggcaucaacaucacccgguuccagacccugcuggcccugcaccggagcuaccugaccccaggcgacagcagcagcggguggacagcaggcgcggcugcuuacuacgugggcuaccugcagccccggaccuuccugcugaaguacaacgagaacggcaccaucaccgacgccguggacugcgcccuggacccucugagcgagaccaagugcacccugaagagcuucaccguggagaagggcaucuaccagaccagcaacuuccgggugcagcccaccgagagcaucgugcgguuccccaacaucaccaaccugugccccuucggcgagguguucaacgccacccgguucgccagcguguacgccuggaaccggaagcggaucagcaacugcguggccgacuacagcgugcuguacaacagcgccagcuucagcaccuucaagugcuacggcgugagccccaccaagcugaacgaccugugcuucaccaacguguacgccgacagcuucgugauccguggcgacgaggugcggcagaucgcacccggccagacaggcaacaucgccgacuacaacuacaagcugcccgacgacuucaccggcugcgugaucgccuggaacagcaacaaccucgacagcaaggugggcggcaacuacaacuaccuguaccggcuguuccggaagagcaaccugaagcccuucgagcgggacaucagcaccgagaucuaccaagccggcuccaccccuugcaacggcgugaagggcuucaacugcuacuucccucugcagagcuacggcuuccagcccaccuacggcgugggcuaccagcccuaccgggugguggugcugagcuucgagcugcugcacgccccagccaccguguguggccccaagaagagcaccaaccuggugaagaacaagugcgugaacuucaacuucaacggccuuaccggcaccggcgugcugaccgagagcaacaagaaauuccugcccuuucagcaguucggccgggacaucgccgacaccaccgacgcugugcgggauccccagacccuggagauccuggacaucaccccuugcagcuucggcggcgugagcgugaucaccccaggcaccaacaccagcaaccagguggccgugcuguaccagggcgugaacugcaccgaggugcccguggccauccacgccgaccagcugacacccaccuggcgggucuacagcaccggcagcaacguguuccagacccgggccgguugccugaucggcgccgagcacgugaacaacagcuacgagugcgacauccccaucggcgccggcaucugugccagcuaccagacccagaccaauucaccccggagggcaaggagcguggccagccagagcaucaucgccuacaccaugagccugggcgccgagaacagcguggccuacagcaacaacagcaucgccauccccaccaacuucaccaucagcgugaccaccgagauucugcccgugagcaugaccaagaccagcguggacugcaccauguacaucugcggcgacagcaccgagugcagcaaccugcugcugcaguacggcagcuucugcacccagcugaaccgggcccugaccggcaucgccguggagcaggacaagaacacccaggagguguucgcccaggugaagcagaucuacaagaccccucccaucaaggacuucggcggcuucaacuucagccagauccugcccgaccccagcaagcccagcaagcggagcuucaucgaggaccugcuguucaacaaggugacccuagccgacgccggcuucaucaagcaguacggcgacugccucggcgacauagccgcccgggaccugaucugcgcccagaaguucaacggccugaccgugcugccuccccugcugaccgacgagaugaucgcccaguacaccagcgcccuguuagccggaaccaucaccagcggcuggacuuucggcgcuggagccgcucugcagauccccuucgccaugcagauggccuaccgguucaacggcaucggcgugacccagaacgugcuguacgagaaccagaagcugaucgccaaccaguucaacagcgccaucggcaagauccaggacagccugagcagcaccgcuagcgcccugggcaagcugcaggacguggugaaccagaacgcccaggcccugaacacccuggugaagcagcugagcagcaacuucggcgccaucagcagcgugcugaacgacauccugagccggcuggacaaggucgaggccgaggugcagaucgaccggcugaucacuggccggcugcagagccugcagaccuacgugacccagcagcugauccgggccgccgagauucgggccagcgccaaccuggccgccaccaagaugagcgagugcgugcugggccagagcaagcggguggacuucugcggcaagggcuaccaccugaugagcuuuccccagagcgcaccccacggagugguguuccugcacgugaccuacgugcccgcccaggagaagaacuucaccaccgccccagccaucugccacgacggcaaggcccacuuuccccgggagggcguguucgugagcaacggcacccacugguucgugacccagcggaacuucuacgagccccagaucaucaccaccgacaacaccuucgugagcggcaacugcgacguggugaucggcaucgugaacaacaccguguacgauccccugcagcccgagcuggacagcuucaaggaggagcuggacaaguacuucaagaaucacaccagccccgacguggaccugggcgacaucagcggcaucaacgccagcguggugaacauccagaaggagaucgaucggcugaacgagguggccaagaaccugaacgagagccugaucgaccugcaggagcugggcaaguacgagcaguacaucaaguggcccugguacaucuggcugggcuucaucgccggccugaucgccaucgugauggugaccaucaugcugugcugcaugaccagcugcugcagcugccugaagggcuguugcagcugcggcagcugcugcaaguucgacgaggacgacagcgagcccgugcugaagggcgugaagcugcacuacaccugaggacuaguuauaagacugacuagcccgaugggccucccaacgggcccuccuccccuccuugcaccgagauuaauagaucucaaaggcucuuuucagagccaccaaaaaaaaaaaaaaaaaaaaaaaaaaaaaaaaaaaaaaaaaaaaaaaaaaaaaaaaaaaaaaaaaaaaaaaaaaaaaaaaaaaaaaaaaaaaaaaaaaaaa

SEQ ID NO: 24339 - RNA, 4032 nt, Artificial Sequence
  SARS-CoV-2/Wuhan/WIV05/2019__EPI_ISL_402128 spike protein mRNA gc (1-1273)(L18F_D80A_D215G_L242del_A243del_L244del_R246I_K417N_E484 K_N501Y_D614G_A701V)
aggagaaagcuuaccauguucguguuccuggugcugcugccccuggugagcagccagugcgugaacuucaccacccggacccagcugccaccagccuacaccaacagcuucacccggggcgucuacuaccccgacaagguguuccggagcagcguccugcacagcacccaggaccuguuccugcccuucuucagcaacgugaccugguuccacgccauccacgugagcggcaccaacggcaccaagcgguucgccaaccccgugcugcccuucaacgacggcguguacuucgccagcaccgagaagagcaacaucauccggggcuggaucuucggcaccacccuggacagcaagacccagagccugcugaucgugaauaacgccaccaacguggugaucaaggugugcgaguuccaguucugcaacgaccccuuccugggcguguacuaccacaagaacaacaagagcuggauggagagcgaguuccggguguacagcagcgccaacaacugcaccuucgaguacgugagccagcccuuccugauggaccuggagggcaagcagggcaacuucaagaaccugcgggaguucguguucaagaacaucgacggcuacuucaagaucuacagcaagcacaccccaaucaaccuggugcggggccugccccagggcuucucagcccuggagccccugguggaccugcccaucggcaucaacaucacccgguuccagacccugcacaucagcuaccugaccccaggcgacagcagcagcggguggacagcaggcgcggcugcuuacuacgugggcuaccugcagccccggaccuuccugcugaaguacaacgagaacggcaccaucaccgacgccguggacugcgcccuggacccucugagcgagaccaagugcacccugaagagcuucaccguggagaagggcaucuaccagaccagcaacuuccgggugcagcccaccgagagcaucgugcgguuccccaacaucaccaaccugugccccuucggcgagguguucaacgccacccgguucgccagcguguacgccuggaaccggaagcggaucagcaacugcguggccgacuacagcgugcuguacaacagcgccagcuucagcaccuucaagugcuacggcgugagccccaccaagcugaacgaccugugcuucaccaacguguacgccgacagcuucgugauccguggcgacgaggugcggcagaucgcacccggccagacaggcaacaucgccgacuacaacuacaagcugcccgacgacuucaccggcugcgugaucgccuggaacagcaacaaccucgacagcaaggugggcggcaacuacaacuaccuguaccggcuguuccggaagagcaaccugaagcccuucgagcgggacaucagcaccgagaucuaccaagccggcuccaccccuugcaacggcgugaagggcuucaacugcuacuucccucugcagagcuacggcuuccagcccaccuacggcgugggcuaccagcccuaccgggugguggugcugagcuucgagcugcugcacgccccagccaccguguguggccccaagaagagcaccaaccuggugaagaacaagugcgugaacuucaacuucaacggccuuaccggcaccggcgugcugaccgagagcaacaagaaauuccugcccuuucagcaguucggccgggacaucgccgacaccaccgacgcugugcgggauccccagacccuggagauccuggacaucaccccuugcagcuucggcggcgugagcgugaucaccccaggcaccaacaccagcaaccagguggccgugcuguaccagggcgugaacugcaccgaggugcccguggccauccacgccgaccagcugacacccaccuggcgggucuacagcaccggcagcaacguguuccagacccgggccgguugccugaucggcgccgagcacgugaacaacagcuacgagugcgacauccccaucggcgccggcaucugugccagcuaccagacccagaccaauucaccccggagggcaaggagcguggccagccagagcaucaucgccuacaccaugagccugggcguggagaacagcguggccuacagcaacaacagcaucgccauccccaccaacuucaccaucagcgugaccaccgagauucugcccgugagcaugaccaagaccagcguggacugcaccauguacaucugcggcgacagcaccgagugcagcaaccugcugcugcaguacggcagcuucugcacccagcugaaccgggcccugaccggcaucgccguggagcaggacaagaacacccaggagguguucgcccaggugaagcagaucuacaagaccccucccaucaaggacuucggcggcuucaacuucagccagauccugcccgaccccagcaagcccagcaagcggagcuucaucgaggaccugcuguucaacaaggugacccuagccgacgccggcuucaucaagcaguacggcgacugccucggcgacauagccgcccgggaccugaucugcgcccagaaguucaacggccugaccgugcugccuccccugcugaccgacgagaugaucgcccaguacaccagcgcccuguuagccggaaccaucaccagcggcuggacuuucggcgcuggagccgcucugcagauccccuucgccaugcagauggccuaccgguucaacggcaucggcgugacccagaacgugcuguacgagaaccagaagcugaucgccaaccaguucaacagcgccaucggcaagauccaggacagccugagcagcaccgcuagcgcccugggcaagcugcaggacguggugaaccagaacgcccaggcccugaacacccuggugaagcagcugagcagcaacuucggcgccaucagcagcgugcugaacgacauccugagccggcuggacaaggucgaggccgaggugcagaucgaccggcugaucacuggccggcugcagagccugcagaccuacgugacccagcagcugauccgggccgccgagauucgggccagcgccaaccuggccgccaccaagaugagcgagugcgugcugggccagagcaagcggguggacuucugcggcaagggcuaccaccugaugagcuuuccccagagcgcaccccacggagugguguuccugcacgugaccuacgugcccgcccaggagaagaacuucaccaccgccccagccaucugccacgacggcaaggcccacuuuccccgggagggcguguucgugagcaacggcacccacugguucgugacccagcggaacuucuacgagccccagaucaucaccaccgacaacaccuucgugagcggcaacugcgacguggugaucggcaucgugaacaacaccguguacgauccccugcagcccgagcuggacagcuucaaggaggagcuggacaaguacuucaagaaucacaccagccccgacguggaccugggcgacaucagcggcaucaacgccagcguggugaacauccagaaggagaucgaucggcugaacgagguggccaagaaccugaacgagagccugaucgaccugcaggagcugggcaaguacgagcaguacaucaaguggcccugguacaucuggcugggcuucaucgccggccugaucgccaucgugauggugaccaucaugcugugcugcaugaccagcugcugcagcugccugaagggcuguugcagcugcggcagcugcugcaaguucgacgaggacgacagcgagcccgugcugaagggcgugaagcugcacuacaccugaggacuaguuauaagacugacuagcccgaugggccucccaacgggcccuccuccccuccuugcaccgagauuaauagaucucaaaggcucuuuucagagccaccaaaaaaaaaaaaaaaaaaaaaaaaaaaaaaaaaaaaaaaaaaaaaaaaaaaaaaaaaaaaaaaaaaaaaaaaaaaaaaaaaaaaaaaaaaaaaaaaaaaaa

SEQ ID NO: 24340 - RNA, 4041 nt, Artificial Sequence
  SARS-CoV-2/Wuhan/WIV05/2019__EPI_ISL_402128 spike protein mRNA gc (1-1273)(E484K_D614G)
aggagaaagcuuaccauguucguguuccuggugcugcugccccuggugagcagccagugcgugaaccugaccacccggacccagcugccaccagccuacaccaacagcuucacccggggcgucuacuaccccgacaagguguuccggagcagcguccugcacagcacccaggaccuguuccugcccuucuucagcaacgugaccugguuccacgccauccacgugagcggcaccaacggcaccaagcgguucgacaaccccgugcugcccuucaacgacggcguguacuucgccagcaccgagaagagcaacaucauccggggcuggaucuucggcaccacccuggacagcaagacccagagccugcugaucgugaauaacgccaccaacguggugaucaaggugugcgaguuccaguucugcaacgaccccuuccugggcguguacuaccacaagaacaacaagagcuggauggagagcgaguuccggguguacagcagcgccaacaacugcaccuucgaguacgugagccagcccuuccugauggaccuggagggcaagcagggcaacuucaagaaccugcgggaguucguguucaagaacaucgacggcuacuucaagaucuacagcaagcacaccccaaucaaccuggugcgggaucugccccagggcuucucagcccuggagccccugguggaccugcccaucggcaucaacaucacccgguuccagacccugcuggcccugcaccggagcuaccugaccccaggcgacagcagcagcggguggacagcaggcgcggcugcuuacuacgugggcuaccugcagccccggaccuuccugcugaaguacaacgagaacggcaccaucaccgacgccguggacugcgcccuggacccucugagcgagaccaagugcacccugaagagcuucaccguggagaagggcaucuaccagaccagcaacuuccgggugcagcccaccgagagcaucgugcgguuccccaacaucaccaaccugugccccuucggcgagguguucaacgccacccgguucgccagcguguacgccuggaaccggaagcggaucagcaacugcguggccgacuacagcgugcuguacaacagcgccagcuucagcaccuucaagugcuacggcgugagccccaccaagcugaacgaccugugcuucaccaacguguacgccgacagcuucgugauccguggcgacgaggugcggcagaucgcacccggccagacaggcaagaucgccgacuacaacuacaagcugcccgacgacuucaccggcugcgugaucgccuggaacagcaacaaccucgacagcaaggugggcggcaacuacaacuaccuguaccggcuguuccggaagagcaaccugaagcccuucgagcgggacaucagcaccgagaucuaccaagccggcuccaccccuugcaacggcgugaagggcuucaacugcuacuucccucugcagagcuacggcuuccagcccaccaacggcgugggcuaccagcccuaccgggugguggugcugagcuucgagcugcugcacgccccagccaccguguguggccccaagaagagcaccaaccuggugaagaacaagugcgugaacuucaacuucaacggccuuaccggcaccggcgugcugaccgagagcaacaagaaauuccugcccuuucagcaguucggccgggacaucgccgacaccaccgacgcugugcgggauccccagacccuggagauccuggacaucaccccuugcagcuucggcggcgugagcgugaucaccccaggcaccaacaccagcaaccagguggccgugcuguaccagggcgugaacugcaccgaggugcccguggccauccacgccgaccagcugacacccaccuggcgggucuacagcaccggcagcaacguguuccagacccgggccgguugccugaucggcgccgagcacgugaacaacagcuacgagugcgacauccccaucggcgccggcaucugugccagcuaccagacccagaccaauucaccccggagggcaaggagcguggccagccagagcaucaucgccuacaccaugagccugggcgccgagaacagcguggccuacagcaacaacagcaucgccauccccaccaacuucaccaucagcgugaccaccgagauucugcccgugagcaugaccaagaccagcguggacugcaccauguacaucugcggcgacagcaccgagugcagcaaccugcugcugcaguacggcagcuucugcacccagcugaaccgggcccugaccggcaucgccguggagcaggacaagaacacccaggagguguucgcccaggugaagcagaucuacaagaccccucccaucaaggacuucggcggcuucaacuucagccagauccugcccgaccccagcaagcccagcaagcggagcuucaucgaggaccugcuguucaacaaggugacccuagccgacgccggcuucaucaagcaguacggcgacugccucggcgacauagccgcccgggaccugaucugcgcccagaaguucaacggccugaccgugcugccuccccugcugaccgacgagaugaucgcccaguacaccagcgcccuguuagccggaaccaucaccagcggcuggacuuucggcgcuggagccgcucugcagauccccuucgccaugcagauggccuaccgguucaacggcaucggcgugacccagaacgugcuguacgagaaccagaagcugaucgccaaccaguucaacagcgccaucggcaagauccaggacagccugagcagcaccgcuagcgcccugggcaagcugcaggacguggugaaccagaacgcccaggcccugaacacccuggugaagcagcugagcagcaacuucggcgccaucagcagcgugcugaacgacauccugagccggcuggacaaggucgaggccgaggugcagaucgaccggcugaucacuggccggcugcagagccugcagaccuacgugacccagcagcugauccgggccgccgagauucgggccagcgccaaccuggccgccaccaagaugagcgagugcgugcugggccagagcaagcggguggacuucugcggcaagggcuaccaccugaugagcuuuccccagagcgcaccccacggagugguguuccugcacgugaccuacgugcccgcccaggagaagaacuucaccaccgccccagccaucugccacgacggcaaggcccacuuuccccgggagggcguguucgugagcaacggcacccacugguucgugacccagcggaacuucuacgagccccagaucaucaccaccgacaacaccuucgugagcggcaacugcgacguggugaucggcaucgugaacaacaccguguacgauccccugcagcccgagcuggacagcuucaaggaggagcuggacaaguacuucaagaaucacaccagccccgacguggaccugggcgacaucagcggcaucaacgccagcguggugaacauccagaaggagaucgaucggcugaacgagguggccaagaaccugaacgagagccugaucgaccugcaggagcugggcaaguacgagcaguacaucaaguggcccugguacaucuggcugggcuucaucgccggccugaucgccaucgugauggugaccaucaugcugugcugcaugaccagcugcugcagcugccugaagggcuguugcagcugcggcagcugcugcaaguucgacgaggacgacagcgagcccgugcugaagggcgugaagcugcacuacaccugaggacuaguuauaagacugacuagcccgaugggccucccaacgggcccuccuccccuccuugcaccgagauuaauagaucucaaaggcucuuuucagagccaccaaaaaaaaaaaaaaaaaaaaaaaaaaaaaaaaaaaaaaaaaaaaaaaaaaaaaaaaaaaaaaaaaaaaaaaaaaaaaaaaaaaaaaaaaaaaaaaaaaaaa

SEQ ID NO: 24341 - RNA, 4041 nt, Artificial Sequence
  SARS-CoV-2/Wuhan/WIV05/2019__EPI_ISL_402128 spike protein mRNA gc (1-1273)(L18F_T20N_P26S_D138Y_R190S_K417T_E484K_N501Y_D614G_H655Y _T1027I)
aggagaaagcuuaccauguucguguuccuggugcugcugccccuggugagcagccagugcgugaacuucaccaaccggacccagcugccaagcgccuacaccaacagcuucacccggggcgucuacuaccccgacaagguguuccggagcagcguccugcacagcacccaggaccuguuccugcccuucuucagcaacgugaccugguuccacgccauccacgugagcggcaccaacggcaccaagcgguucgacaaccccgugcugcccuucaacgacggcguguacuucgccagcaccgagaagagcaacaucauccggggcuggaucuucggcaccacccuggacagcaagacccagagccugcugaucgugaauaacgccaccaacguggugaucaaggugugcgaguuccaguucugcaacuaccccuuccugggcguguacuaccacaagaacaacaagagcuggauggagagcgaguuccggguguacagcagcgccaacaacugcaccuucgaguacgugagccagcccuuccugauggaccuggagggcaagcagggcaacuucaagaaccugagcgaguucguguucaagaacaucgacggcuacuucaagaucuacagcaagcacaccccaaucaaccuggugcgggaucugccccagggcuucucagcccuggagccccugguggaccugcccaucggcaucaacaucacccgguuccagacccugcuggcccugcaccggagcuaccugaccccaggcgacagcagcagcggguggacagcaggcgcggcugcuuacuacgugggcuaccugcagccccggaccuuccugcugaaguacaacgagaacggcaccaucaccgacgccguggacugcgcccuggacccucugagcgagaccaagugcacccugaagagcuucaccguggagaagggcaucuaccagaccagcaacuuccgggugcagcccaccgagagcaucgugcgguuccccaacaucaccaaccugugccccuucggcgagguguucaacgccacccgguucgccagcguguacgccuggaaccggaagcggaucagcaacugcguggccgacuacagcgugcuguacaacagcgccagcuucagcaccuucaagugcuacggcgugagccccaccaagcugaacgaccugugcuucaccaacguguacgccgacagcuucgugauccguggcgacgaggugcggcagaucgcacccggccagacaggcaccaucgccgacuacaacuacaagcugcccgacgacuucaccggcugcgugaucgccuggaacagcaacaaccucgacagcaaggugggcggcaacuacaacuaccuguaccggcuguuccggaagagcaaccugaagcccuucgagcgggacaucagcaccgagaucuaccaagccggcuccaccccuugcaacggcgugaagggcuucaacugcuacuucccucugcagagcuacggcuuccagcccaccuacggcgugggcuaccagcccuaccgggugguggugcugagcuucgagcugcugcacgccccagccaccguguguggccccaagaagagcaccaaccuggugaagaacaagugcgugaacuucaacuucaacggccuuaccggcaccggcgugcugaccgagagcaacaagaaauuccugcccuuucagcaguucggccgggacaucgccgacaccaccgacgcugugcgggauccccagacccuggagauccuggacaucaccccuugcagcuucggcggcgugagcgugaucaccccaggcaccaacaccagcaaccagguggccgugcuguaccagggcgugaacugcaccgaggugcccguggccauccacgccgaccagcugacacccaccuggcgggucuacagcaccggcagcaacguguuccagacccgggccgguugccugaucggcgccgaguacgugaacaacagcuacgagugcgacauccccaucggcgccggcaucugugccagcuaccagacccagaccaauucaccccggagggcaaggagcguggccagccagagcaucaucgccuacaccaugagccugggcgccgagaacagcguggccuacagcaacaacagcaucgccauccccaccaacuucaccaucagcgugaccaccgagauucugcccgugagcaugaccaagaccagcguggacugcaccauguacaucugcggcgacagcaccgagugcagcaaccugcugcugcaguacggcagcuucugcacccagcugaaccgggcccugaccggcaucgccguggagcaggacaagaacacccaggagguguucgcccaggugaagcagaucuacaagaccccucccaucaaggacuucggcggcuucaacuucagccagauccugcccgaccccagcaagcccagcaagcggagcuucaucgaggaccugcuguucaacaaggugacccuagccgacgccggcuucaucaagcaguacggcgacugccucggcgacauagccgcccgggaccugaucugcgcccagaaguucaacggccugaccgugcugccuccccugcugaccgacgagaugaucgcccaguacaccagcgcccuguuagccggaaccaucaccagcggcuggacuuucggcgcuggagccgcucugcagauccccuucgccaugcagauggccuaccgguucaacggcaucggcgugacccagaacgugcuguacgagaaccagaagcugaucgccaaccaguucaacagcgccaucggcaagauccaggacagccugagcagcaccgcuagcgcccugggcaagcugcaggacguggugaaccagaacgcccaggcccugaacacccuggugaagcagcugagcagcaacuucggcgccaucagcagcgugcugaacgacauccugagccggcuggacaaggucgaggccgaggugcagaucgaccggcugaucacuggccggcugcagagccugcagaccuacgugacccagcagcugauccgggccgccgagauucgggccagcgccaaccuggccgccaucaagaugagcgagugcgugcugggccagagcaagcggguggacuucugcggcaagggcuaccaccugaugagcuuuccccagagcgcaccccacggagugguguuccugcacgugaccuacgugcccgcccaggagaagaacuucaccaccgccccagccaucugccacgacggcaaggcccacuuuccccgggagggcguguucgugagcaacggcacccacugguucgugacccagcggaacuucuacgagccccagaucaucaccaccgacaacaccuucgugagcggcaacugcgacguggugaucggcaucgugaacaacaccguguacgauccccugcagcccgagcuggacagcuucaaggaggagcuggacaaguacuucaagaaucacaccagccccgacguggaccugggcgacaucagcggcaucaacgccagcguggugaacauccagaaggagaucgaucggcugaacgagguggccaagaaccugaacgagagccugaucgaccugcaggagcugggcaaguacgagcaguacaucaaguggcccugguacaucuggcugggcuucaucgccggccugaucgccaucgugauggugaccaucaugcugugcugcaugaccagcugcugcagcugccugaagggcuguugcagcugcggcagcugcugcaaguucgacgaggacgacagcgagcccgugcugaagggcgugaagcugcacuacaccugaggacuaguuauaagacugacuagcccgaugggccucccaacgggcccuccuccccuccuugcaccgagauuaauagaucucaaaggcucuuuucagagccaccaaaaaaaaaaaaaaaaaaaaaaaaaaaaaaaaaaaaaaaaaaaaaaaaaaaaaaaaaaaaaaaaaaaaaaaaaaaaaaaaaaaaaaaaaaaaaaaaaaaaa

SEQ ID NO: 24342 - RNA, 4041 nt, Artificial Sequence
  SARS-CoV-2/Wuhan/WIV05/2019__EPI_ISL_402128 spike protein mRNA gc (1-1273)(S13I_W152C_L452R_D614G)
aggagaaagcuuaccauguucguguuccuggugcugcugccccuggugagcauccagugcgugaaccugaccacccggacccagcugccaccagccuacaccaacagcuucacccggggcgucuacuaccccgacaagguguuccggagcagcguccugcacagcacccaggaccuguuccugcccuucuucagcaacgugaccugguuccacgccauccacgugagcggcaccaacggcaccaagcgguucgacaaccccgugcugcccuucaacgacggcguguacuucgccagcaccgagaagagcaacaucauccggggcuggaucuucggcaccacccuggacagcaagacccagagccugcugaucgugaauaacgccaccaacguggugaucaaggugugcgaguuccaguucugcaacgaccccuuccugggcguguacuaccacaagaacaacaagagcugcauggagagcgaguuccggguguacagcagcgccaacaacugcaccuucgaguacgugagccagcccuuccugauggaccuggagggcaagcagggcaacuucaagaaccugcgggaguucguguucaagaacaucgacggcuacuucaagaucuacagcaagcacaccccaaucaaccuggugcgggaucugccccagggcuucucagcccuggagccccugguggaccugcccaucggcaucaacaucacccgguuccagacccugcuggcccugcaccggagcuaccugaccccaggcgacagcagcagcggguggacagcaggcgcggcugcuuacuacgugggcuaccugcagccccggaccuuccugcugaaguacaacgagaacggcaccaucaccgacgccguggacugcgcccuggacccucugagcgagaccaagugcacccugaagagcuucaccguggagaagggcaucuaccagaccagcaacuuccgggugcagcccaccgagagcaucgugcgguuccccaacaucaccaaccugugccccuucggcgagguguucaacgccacccgguucgccagcguguacgccuggaaccggaagcggaucagcaacugcguggccgacuacagcgugcuguacaacagcgccagcuucagcaccuucaagugcuacggcgugagccccaccaagcugaacgaccugugcuucaccaacguguacgccgacagcuucgugauccguggcgacgaggugcggcagaucgcacccggccagacaggcaagaucgccgacuacaacuacaagcugcccgacgacuucaccggcugcgugaucgccuggaacagcaacaaccucgacagcaaggugggcggcaacuacaacuaccgcuaccggcuguuccggaagagcaaccugaagcccuucgagcgggacaucagcaccgagaucuaccaagccggcuccaccccuugcaacggcguggagggcuucaacugcuacuucccucugcagagcuacggcuuccagcccaccaacggcgugggcuaccagcccuaccgggugguggugcugagcuucgagcugcugcacgccccagccaccguguguggccccaagaagagcaccaaccuggugaagaacaagugcgugaacuucaacuucaacggccuuaccggcaccggcgugcugaccgagagcaacaagaaauuccugcccuuucagcaguucggccgggacaucgccgacaccaccgacgcugugcgggauccccagacccuggagauccuggacaucaccccuugcagcuucggcggcgugagcgugaucaccccaggcaccaacaccagcaaccagguggccgugcuguaccagggcgugaacugcaccgaggugcccguggccauccacgccgaccagcugacacccaccuggcgggucuacagcaccggcagcaacguguuccagacccgggccgguugccugaucggcgccgagcacgugaacaacagcuacgagugcgacauccccaucggcgccggcaucugugccagcuaccagacccagaccaauucaccccggagggcaaggagcguggccagccagagcaucaucgccuacaccaugagccugggcgccgagaacagcguggccuacagcaacaacagcaucgccauccccaccaacuucaccaucagcgugaccaccgagauucugcccgugagcaugaccaagaccagcguggacugcaccauguacaucugcggcgacagcaccgagugcagcaaccugcugcugcaguacggcagcuucugcacccagcugaaccgggcccugaccggcaucgccguggagcaggacaagaacacccaggagguguucgcccaggugaagcagaucuacaagaccccucccaucaaggacuucggcggcuucaacuucagccagauccugcccgaccccagcaagcccagcaagcggagcuucaucgaggaccugcuguucaacaaggugacccuagccgacgccggcuucaucaagcaguacggcgacugccucggcgacauagccgcccgggaccugaucugcgcccagaaguucaacggccugaccgugcugccuccccugcugaccgacgagaugaucgcccaguacaccagcgcccuguuagccggaaccaucaccagcggcuggacuuucggcgcuggagccgcucugcagauccccuucgccaugcagauggccuaccgguucaacggcaucggcgugacccagaacgugcuguacgagaaccagaagcugaucgccaaccaguucaacagcgccaucggcaagauccaggacagccugagcagcaccgcuagcgcccugggcaagcugcaggacguggugaaccagaacgcccaggcccugaacacccuggugaagcagcugagcagcaacuucggcgccaucagcagcgugcugaacgacauccugagccggcuggacaaggucgaggccgaggugcagaucgaccggcugaucacuggccggcugcagagccugcagaccuacgugacccagcagcugauccgggccgccgagauucgggccagcgccaaccuggccgccaccaagaugagcgagugcgugcugggccagagcaagcggguggacuucugcggcaagggcuaccaccugaugagcuuuccccagagcgcaccccacggagugguguuccugcacgugaccuacgugcccgcccaggagaagaacuucaccaccgccccagccaucugccacgacggcaaggcccacuuuccccgggagggcguguucgugagcaacggcacccacugguucgugacccagcggaacuucuacgagccccagaucaucaccaccgacaacaccuucgugagcggcaacugcgacguggugaucggcaucgugaacaacaccguguacgauccccugcagcccgagcuggacagcuucaaggaggagcuggacaaguacuucaagaaucacaccagccccgacguggaccugggcgacaucagcggcaucaacgccagcguggugaacauccagaaggagaucgaucggcugaacgagguggccaagaaccugaacgagagccugaucgaccugcaggagcugggcaaguacgagcaguacaucaaguggcccugguacaucuggcugggcuucaucgccggccugaucgccaucgugauggugaccaucaugcugugcugcaugaccagcugcugcagcugccugaagggcuguugcagcugcggcagcugcugcaaguucgacgaggacgacagcgagcccgugcugaagggcgugaagcugcacuacaccugaggacuaguuauaagacugacuagcccgaugggccucccaacgggcccuccuccccuccuugcaccgagauuaauagaucucaaaggcucuuuucagagccaccaaaaaaaaaaaaaaaaaaaaaaaaaaaaaaaaaaaaaaaaaaaaaaaaaaaaaaaaaaaaaaaaaaaaaaaaaaaaaaaaaaaaaaaaaaaaaaaaaaaaa

SEQ ID NO: 24343 - RNA, 4041 nt, Artificial Sequence
  SARS-CoV-2/Wuhan/WIV05/2019__EPI_ISL_402128 spike protein mRNA gc (1-1273)
aggagaaagcuuaccauguucguguuccuggugcugcugccccuggugagcagccagugcgugaaccugaccacccggacccagcugcccccugccuacaccaacagcuucacccggggcguguacuaccccgacaagguguuccggagcagcgugcugcacagcacccaggaccuguuccugcccuucuucagcaacgugaccugguuccacgccauccacgugagcggcaccaacggcaccaagcgguucgacaacccagugcugcccuucaacgacggcguguacuucgccagcaccgagaagucaaacaucauccggggcuggaucuucggcaccacccuggacagcaagacacagagccugcugaucgugaacaacgccaccaacguggugaucaaggugugcgaguuucaguucugcaacgaccccuuccugggcguguacuaccacaagaacaacaagagcuggauggagagcgaguuccgggucuacagcagcgcuaacaauugcaccuucgaguacgugagccagcccuuccugauggaccucgagggcaagcagggcaacuucaagaaccugcgggaguucguguucaagaacaucgauggcuacuucaagaucuacagcaagcacacccccaucaaccuggugcgggaccugccccagggauucagcgcccuggagccucugguggaccugcccaucggcaucaacaucaccagguuccagacccugcuggcccugcaccggagcuaccugacccccggcgacagcagcagcggcuggaccgccggcgccgccgcauacuacgugggcuaccugcagccacggaccuuccugcugaaguacaacgagaacggcaccaucaccgacgccguggacugcgcccuggacccccugagcgagaccaagugcacccuaaagagcuucaccguggagaagggcaucuaccagaccagcaacuuccgggugcagcccacugagagcaucgugcgguuccccaacauuaccaaccugugucccuucggcgagguguucaacgccacccgguucgccagcguguacgccuggaaccggaagcggaucagcaacugcguggccgacuacagcgugcuguacaacagcgccagcuucagcaccuucaagugcuacggcgugagcccuaccaagcugaacgaccugugcuucaccaacguguacgcugacagcuucgugauccggggcgacgaggugcggcagaucgcccccggccagaccggcaagaucgccgacuacaacuacaagcugcccgacgacuucaccggcugcgugaucgccuggaacagcaacaaccuggacagcaaggugggcggcaacuacaacuaccuguaccggcuguuccguaagagcaaccugaagccauucgagcgggacaucagcaccgagaucuaccaggccggcagcacccccugcaacgguguggagggcuuuaacugcuacuucccccugcagagcuacggcuuccagcccaccaacggcgugggcuaccagcccuaccgggugguggugcugagcuucgagcugcugcacgcccccgccaccgugugcggcccuaaaaagagcaccaaccuggugaagaacaagugcgugaacuucaauuucaacggccugaccggcaccggcgugcugaccgagagcaacaagaaguuccugcccuuccagcaguucggccgggauaucgccgacaccaccgacgcagugcgggacccccagacccuggagauccuggacaucaccccaugcagcuucggcggcgugagcgucaucacccccggcacaaacaccagcaaccagguggccgugcuguaccaggacgugaacugcaccgaggugcccguggccauccacgccgaccagcugacccccaccuggcggguguacagcaccggaagcaacguguuccagacccgggccggcugccugaucggcgccgagcacgugaacaacuccuacgagugcgacauccccaucggcgcuggcaucugcgccagcuaccagacccagaccaacagcccccggcgggcccggagcguggccagccagagcaucaucgccuacaccaugagcuuaggcgccgagaacagcguggccuacagcaacaacagcaucgcgaucccuaccaacuucaccaucagcgugaccaccgagauacugcccgugagcaugaccaagaccagcguggacuguaccauguacaucugcggcgacagcaccgagugcagcaaccugcugcugcaguacggcagcuucugcacccagcugaaccgggcccugaccggcaucgccguggagcaggacaagaacacccaagagguguucgcccaggugaagcagaucuacaagacucccccaaucaaggacuucggcggcuucaacuucagccagauccugcccgaccccagcaagcccagcaagcggagcuucaucgaggaccugcuguucaacaaggugacccuggccgacgccggcuucaucaagcaguacggcgauugccugggcgacaucgccgcucgggaccugaucugcgcccagaaguucaacgggcugaccgugcugcccccucugcugaccgacgagaugaucgcccaguacaccagcgcccugcuugccggcaccaucaccagcggcuggaccuucggcgccggcgcagcccugcagauccccuucgccaugcagauggccuaccgguucaacggcaucggcgugacccagaacgugcuguacgagaaccagaagcugaucgccaaccaguucaacagcgccaucggcaagauccaggacagccugagcagcaccgccagcgcccugggcaagcugcaggacguggugaaccagaacgcucaggcccugaacacccuggugaagcagcugagcagcaacuucggcgccaucagcucagugcugaaugacauccugagcaggcuggacaagguggaggccgaggugcagaucgaccggcugaucaccggccggcugcagagccugcagaccuacgugacccagcagcugauccgggccgccgagauccgggccagcgccaaccuggcagccaccaagaugagcgagugcgugcugggccagagcaagcggguggacuuuugcggcaagggcuaccaccugaugagcuucccccagagcgccccacacggcgugguguuccuccacgucacauacgugcccgcccaggagaagaacuucaccaccgcccccgccauuugccacgacggcaaggcucacuucccccgggagggcguguucgugagcaacggaacccacugguucgugacccagcggaacuucuacgagccccagaucaucaccaccgacaacaccuucgugagcggcaacugcgacguggugaucggcaucgugaacaacaccguguacgacccccugcagccugagcuggacagcuucaaggaggagcuggacaaguacuucaagaaccacaccagccccgauguggaccugggcgacaucagcggcaucaacgccagcguggugaacauccagaaggagaucgaccggcugaacgagguggccaagaaccugaacgagagccugaucgaccugcaggagcugggcaaguacgagcaguacaucaaguggcccugguacaucuggcugggcuucaucgccggccugaucgccaucgugauggugaccaucaugcugugcugcaugaccagcugcuguagcugccugaagggcugcugcagcugcggcagcugcugcaaguucgacgaggacgacagcgagccagugcugaagggcgugaagcugcacuacaccugaggacuaguuauaagacugacuagcccgaugggccucccaacgggcccuccuccccuccuugcaccgagauuaauagaucucaaaggcucuuuucagagccaccaaaaaaaaaaaaaaaaaaaaaaaaaaaaaaaaaaaaaaaaaaaaaaaaaaaaaaaaaaaaaaaaaaaaaaaaaaaaaaaaaaaaaaaaaaaaaaaaaaaaa

SEQ ID NO: 24344 - RNA, 4041 nt, Artificial Sequence
  SARS-CoV-2/Wuhan/WIV05/2019__EPI_ISL_402128 spike protein mRNA gc (1-1273)(D614G)
aggagaaagcuuaccauguucguguuccuggugcugcugccccuggugagcagccagugcgugaaccugaccacccggacccagcugcccccugccuacaccaacagcuucacccggggcguguacuaccccgacaagguguuccggagcagcgugcugcacagcacccaggaccuguuccugcccuucuucagcaacgugaccugguuccacgccauccacgugagcggcaccaacggcaccaagcgguucgacaacccagugcugcccuucaacgacggcguguacuucgccagcaccgagaagucaaacaucauccggggcuggaucuucggcaccacccuggacagcaagacacagagccugcugaucgugaacaacgccaccaacguggugaucaaggugugcgaguuucaguucugcaacgaccccuuccugggcguguacuaccacaagaacaacaagagcuggauggagagcgaguuccgggucuacagcagcgcuaacaauugcaccuucgaguacgugagccagcccuuccugauggaccucgagggcaagcagggcaacuucaagaaccugcgggaguucguguucaagaacaucgauggcuacuucaagaucuacagcaagcacacccccaucaaccuggugcgggaccugccccagggauucagcgcccuggagccucugguggaccugcccaucggcaucaacaucaccagguuccagacccugcuggcccugcaccggagcuaccugacccccggcgacagcagcagcggcuggaccgccggcgccgccgcauacuacgugggcuaccugcagccacggaccuuccugcugaaguacaacgagaacggcaccaucaccgacgccguggacugcgcccuggacccccugagcgagaccaagugcacccuaaagagcuucaccguggagaagggcaucuaccagaccagcaacuuccgggugcagcccacugagagcaucgugcgguuccccaacauuaccaaccugugucccuucggcgagguguucaacgccacccgguucgccagcguguacgccuggaaccggaagcggaucagcaacugcguggccgacuacagcgugcuguacaacagcgccagcuucagcaccuucaagugcuacggcgugagcccuaccaagcugaacgaccugugcuucaccaacguguacgcugacagcuucgugauccggggcgacgaggugcggcagaucgcccccggccagaccggcaagaucgccgacuacaacuacaagcugcccgacgacuucaccggcugcgugaucgccuggaacagcaacaaccuggacagcaaggugggcggcaacuacaacuaccuguaccggcuguuccguaagagcaaccugaagccauucgagcgggacaucagcaccgagaucuaccaggccggcagcacccccugcaacgguguggagggcuuuaacugcuacuucccccugcagagcuacggcuuccagcccaccaacggcgugggcuaccagcccuaccgggugguggugcugagcuucgagcugcugcacgcccccgccaccgugugcggcccuaaaaagagcaccaaccuggugaagaacaagugcgugaacuucaauuucaacggccugaccggcaccggcgugcugaccgagagcaacaagaaguuccugcccuuccagcaguucggccgggauaucgccgacaccaccgacgcagugcgggacccccagacccuggagauccuggacaucaccccaugcagcuucggcggcgugagcgucaucacccccggcacaaacaccagcaaccagguggccgugcuguaccagggagugaacugcaccgaggugcccguggccauccacgccgaccagcugacccccaccuggcggguguacagcaccggcagcaacguguuccagacccgggccggcugccugaucggcgccgagcacgugaacaacuccuacgagugcgacauccccaucggcgcuggcaucugcgccagcuaccagacccagaccaacagcccccggcgggcccggagcguggccagccagagcaucaucgccuacaccaugagcuuaggcgccgagaacagcguggccuacagcaacaacagcaucgcgaucccuaccaacuucaccaucagcgugaccaccgagauacugcccgugagcaugaccaagaccagcguggacuguaccauguacaucugcggcgacagcaccgagugcagcaaccugcugcugcaguacggcagcuucugcacccagcugaaccgggcccugaccggcaucgccguggagcaggacaagaacacccaagagguguucgcccaggugaagcagaucuacaagacucccccaaucaaggacuucggcggcuucaacuucagccagauccugcccgaccccagcaagcccagcaagcggagcuucaucgaggaccugcuguucaacaaggugacccuggccgacgccggcuucaucaagcaguacggcgacugccugggggauaucgccgcucgggaccugaucugcgcccagaaguucaacggccugaccgugcugcccccucugcugaccgacgagaugaucgcccaguacaccagcgcccugcuugccggcaccaucaccagcggcuggaccuucggcgccggcgcagcccugcagauccccuucgccaugcagauggccuaccgguucaacggcaucggcgugacccagaacgugcuguacgagaaccagaagcugaucgccaaccaguucaacagcgccaucggcaagauccaggacagccugagcagcaccgccagcgcccugggcaagcugcaggacguggugaaccagaacgcucaggcccugaacacccuggugaagcagcugagcagcaacuucggcgccaucagcucagugcugaaugacauccugagcaggcuggacaagguggaggccgaggugcagaucgaccggcugaucaccggccggcugcagagccugcagaccuacgugacccagcagcugauccgggccgccgagauccgggccagcgccaaccuggcagccaccaagaugagcgagugcgugcugggccagagcaagcggguggacuuuugcggcaagggcuaccaccugaugagcuucccccagagcgccccacacggcgugguguuccuccacgucacauacgugcccgcccaggagaagaacuucaccaccgcccccgccauuugccacgacggcaaggcucacuucccccgggagggaguguucgugagcaacggcacccacugguucgugacccagcggaacuucuacgagccccagaucaucaccaccgacaacaccuucgugagcggcaacugcgacguggugaucggcaucgugaacaacaccguguacgacccccugcagccugagcuggacagcuucaaggaggagcuggacaaguacuucaagaaccacaccagccccgacguggaucugggcgacaucagcggcaucaacgccagcguggugaacauccagaaggagaucgaccggcugaacgagguggccaagaaccugaacgagagccugaucgaccugcaggagcugggcaaguacgagcaguacaucaaguggcccugguacaucuggcugggcuucaucgccggccugaucgccaucgugauggugaccaucaugcugugcugcaugaccagcugcuguagcugccugaagggcugcugcagcugcggcagcugcugcaaguucgacgaggacgacagcgagccagugcugaagggcgugaagcugcacuacaccugaggacuaguuauaagacugacuagcccgaugggccucccaacgggcccuccuccccuccuugcaccgagauuaauagaucucaaaggcucuuuucagagccaccaaaaaaaaaaaaaaaaaaaaaaaaaaaaaaaaaaaaaaaaaaaaaaaaaaaaaaaaaaaaaaaaaaaaaaaaaaaaaaaaaaaaaaaaaaaaaaaaaaaaa

SEQ ID NO: 24345 - RNA, 4041 nt, Artificial Sequence
  SARS-CoV-2/Wuhan/WIV05/2019__EPI_ISL_402128 spike protein mRNA gc (1-1273)(A222V_D614G)
aggagaaagcuuaccauguucguguuccuggugcugcugccccuggugagcagccagugcgugaaccugaccacccggacccagcugcccccugccuacaccaacagcuucacccggggcguguacuaccccgacaagguguuccggagcagcgugcugcacagcacccaggaccuguuccugcccuucuucagcaacgugaccugguuccacgccauccacgugagcggcaccaacggcaccaagcgguucgacaacccagugcugcccuucaacgacggcguguacuucgccagcaccgagaagucaaacaucauccggggcuggaucuucggcaccacccuggacagcaagacacagagccugcugaucgugaacaacgccaccaacguggugaucaaggugugcgaguuucaguucugcaacgaccccuuccugggcguguacuaccacaagaacaacaagagcuggauggagagcgaguuccgggucuacagcagcgcuaacaauugcaccuucgaguacgugagccagcccuuccugauggaccucgagggcaagcagggcaacuucaagaaccugcgggaguucguguucaagaacaucgauggcuacuucaagaucuacagcaagcacacccccaucaaccuggugcgggaccugccccagggauucagcgugcuggagccucugguggaccugcccaucggcaucaacaucaccagguuccagacccugcuggcccugcaccggagcuaccugacccccggcgacagcagcagcggcuggaccgccggcgccgccgccuacuacgugggcuaccugcagccacggaccuuccugcugaaguacaacgagaacggcaccaucaccgacgcaguggacugcgcccuggacccccugagcgagaccaagugcacccuaaagagcuucaccguggagaagggcaucuaccagaccagcaacuuccgggugcagcccacugagagcaucgugcgguuccccaacauuaccaaccugugucccuucggcgagguguucaacgccacccgguucgccagcguguacgccuggaaccggaagcggaucagcaacugcguggccgacuacagcgugcuguacaacagcgccagcuucagcaccuucaagugcuacggcgugagcccuaccaagcugaacgaccugugcuucaccaacguguacgccgacagcuucgugauccggggcgacgaggugcggcagaucgcucccggccagaccggcaagaucgccgacuacaacuacaagcugcccgacgacuucaccggcugcgugaucgccuggaacagcaacaaccuggacagcaaggugggcggcaacuacaacuaccuguaccggcuguuccguaagagcaaccugaagccauucgagcgggacaucagcaccgagaucuaccaggccggcagcacccccugcaacgguguggagggcuuuaacugcuacuucccccugcagagcuacggcuuccagcccaccaacggcgugggcuaccagcccuaccgggugguggugcugagcuucgagcugcugcacgcccccgccaccgugugcggcccuaaaaagagcaccaaccuggugaagaacaagugcgugaacuucaauuucaacggccugaccggcaccggcgugcugaccgagagcaacaagaaguuccugcccuuccagcaguucggccgggauaucgccgacaccaccgacgccgugcgggacccccagacccuggagauccuggacaucaccccaugcagcuucggcggcgucagcgugaucacccccggcacaaacaccagcaaccagguggcagugcuguaccagggagugaacugcaccgaggugcccguggccauccacgccgaccagcugacccccaccuggcggguguacagcaccggcagcaacguguuccagacccgggccggcugccugaucggcgccgagcacgugaacaacuccuacgagugcgacauccccaucggcgccggcaucugcgcuagcuaccagacccagaccaacagcccccggcgggcccggagcguggccagccagagcaucaucgccuacaccaugagcuuaggcgccgagaacagcguggccuacagcaacaacagcaucgccaucccuaccaacuucaccaucagcgugaccaccgagauacugcccgugagcaugaccaagaccagcguggacuguaccauguacaucugcggcgacagcaccgagugcagcaaccugcugcugcaguacggcagcuucugcacccagcugaaccgggcgcugaccggcaucgccguggagcaggacaagaacacccaagagguguucgcccaggugaagcagaucuacaagacucccccaaucaaggacuucggcggcuucaacuucagccagauccugcccgaccccagcaagcccagcaagcggagcuucaucgaggaccugcuguucaacaaggugacccuggccgacgccggcuucaucaagcaguacggcgacugccugggggauaucgccgcccgggaccugaucugcgcucagaaguucaacggccugaccgugcugcccccucugcugaccgacgagaugaucgcccaguacaccagcgcccugcuugccggcaccaucaccagcggcuggaccuucggcgccggcgccgcacugcagauccccuucgccaugcagauggccuaccgguucaacggcaucggcgugacccagaacgugcuguacgagaaccagaagcugaucgccaaccaguucaacagcgccaucggcaagauccaggacagccugagcagcaccgccagcgcccugggcaagcugcaggacguggugaaccagaacgcccaggcucugaacacccuggugaagcagcugagcagcaacuucggcgccaucagcucagugcugaaugacauccugagcaggcuggacaagguggaggccgaggugcagaucgaccggcugaucaccggccggcugcagagccugcagaccuacgugacccagcagcugauccgggccgccgagauccgggccagcgccaaccuggccgcaaccaagaugagcgagugcgugcugggccagagcaagcggguggacuuuugcggcaagggcuaccaccugaugagcuucccccagagcgccccacacggcguggucuuccuccacgugacauacgugcccgcccaggagaagaacuucaccaccgcccccgccauuugccacgacggcaaggcccacuucccccgggagggaguguucgugagcaacggcacccacugguucgugacccagcggaacuucuacgagccccagaucaucaccaccgacaacaccuucgugagcggcaacugcgacguggugaucggcaucgugaacaacaccguguacgacccccugcagccugagcuggacagcuucaaggaggagcuggacaaguacuucaagaaccacaccagccccgacguggaucugggcgacaucagcggcaucaacgcuagcguggugaacauccagaaggagaucgaccggcugaacgagguggccaagaaccugaacgagagccugaucgaccugcaggagcugggcaaguacgagcaguacaucaaguggcccugguacaucuggcugggcuucaucgccggccugaucgccaucgugauggugaccaucaugcugugcugcaugaccagcugcuguagcugccugaagggcugcugcagcugcggcagcugcugcaaguucgacgaggacgacagcgagccagugcugaagggcgugaagcugcacuacaccugaggacuaguuauaagacugacuagcccgaugggccucccaacgggcccuccuccccuccuugcaccgagauuaauagaucucaaaggcucuuuucagagccaccaaaaaaaaaaaaaaaaaaaaaaaaaaaaaaaaaaaaaaaaaaaaaaaaaaaaaaaaaaaaaaaaaaaaaaaaaaaaaaaaaaaaaaaaaaaaaaaaaaaaa

SEQ ID NO: 24346 - RNA, 4041 nt, Artificial Sequence
  SARS-CoV-2/Wuhan/WIV05/2019__EPI_ISL_402128 spike protein mRNA gc (1-1273)(N439K_D614G)
aggagaaagcuuaccauguucguguuccuggugcugcugccccuggugagcagccagugcgugaaccugaccacccggacccagcugcccccugccuacaccaacagcuucacccggggcguguacuaccccgacaagguguuccggagcagcgugcugcacagcacccaggaccuguuccugcccuucuucagcaacgugaccugguuccacgccauccacgugagcggcaccaacggcaccaagcgguucgacaacccagugcugcccuucaacgacggcguguacuucgccagcaccgagaagucaaacaucauccggggcuggaucuucggcaccacccuggacagcaagacacagagccugcugaucgugaacaacgccaccaacguggugaucaaggugugcgaguuucaguucugcaacgaccccuuccugggcguguacuaccacaagaacaacaagagcuggauggagagcgaguuccgggucuacagcagcgcuaacaauugcaccuucgaguacgugagccagcccuuccugauggaccucgagggcaagcagggcaacuucaagaaccugcgggaguucguguucaagaacaucgauggcuacuucaagaucuacagcaagcacacccccaucaaccuggugcgggaccugccccagggauucagcgcccuggagccucugguggaccugcccaucggcaucaacaucaccagguuccagacccugcuggcccugcaccggagcuaccugacccccggcgacagcagcagcggcuggaccgccggcgccgccgcauacuacgugggcuaccugcagccacggaccuuccugcugaaguacaacgagaacggcaccaucaccgacgccguggacugcgcccuggacccccugagcgagaccaagugcacccuaaagagcuucaccguggagaagggcaucuaccagaccagcaacuuccgggugcagcccacugagagcaucgugcgguuccccaacauuaccaaccugugucccuucggcgagguguucaacgccacccgguucgccagcguguacgccuggaaccggaagcggaucagcaacugcguggccgacuacagcgugcuguacaacagcgccagcuucagcaccuucaagugcuacggcgugagcccuaccaagcugaacgaccugugcuucaccaacguguacgcugacagcuucgugauccggggcgacgaggugcggcagaucgcccccggccagaccggcaagaucgccgacuacaacuacaagcugcccgacgacuucaccggcugcgugaucgccuggaacagcaagaaccuggacagcaaggugggcggcaacuacaacuaccuguaccggcuguuccguaagagcaaccugaagccauucgagcgggacaucagcaccgagaucuaccaggccggcagcacccccugcaacgguguggagggcuuuaacugcuacuucccccugcagagcuacggcuuccagcccaccaacggcgugggcuaccagcccuaccgggugguggugcugagcuucgagcugcugcacgcccccgccaccgugugcggcccuaaaaagagcaccaaccuggugaagaacaagugcgugaacuucaacuucaauggccugaccggcaccggcgugcugaccgagagcaacaagaaguuccugcccuuccagcaguucggccgggauaucgccgacaccaccgacgcagugcgggacccccagacccuggagauccuggacaucaccccaugcagcuucggcggcgugagcgucaucacccccggcacaaacaccagcaaccagguggccgugcuguaccagggagugaacugcaccgaggugcccguggccauccacgccgaccagcugacccccaccuggcggguguacagcaccggcagcaacguguuccagacccgggccggcugccugaucggcgccgagcacgugaacaacuccuacgagugcgacauccccaucggcgcuggcaucugcgccagcuaccagacccagaccaacagcccccggcgggcccggagcguggccagccagagcaucaucgccuacaccaugagcuuaggcgccgagaacagcguggccuacagcaacaacagcaucgcgaucccuaccaacuucaccaucagcgugaccaccgagauacugcccgugagcaugaccaagaccagcguggacuguaccauguacaucugcggcgacagcaccgagugcagcaaccugcugcugcaguacggcagcuucugcacccagcugaaccgggcccugaccggcaucgccguggagcaggacaagaacacccaagagguguucgcccaggugaagcagaucuacaagacucccccaaucaaggacuucggcggcuucaacuucagccagauccugcccgaccccagcaagcccagcaagcggagcuucaucgaggaccugcuguucaacaaggugacccuggccgacgccggcuucaucaagcaguacggcgacugccugggggauaucgccgcucgggaccugaucugcgcccagaaguucaacggccugaccgugcugcccccucugcugaccgacgagaugaucgcccaguacaccagcgcccugcuugccggcaccaucaccagcggcuggaccuucggcgccggcgcagcccugcagauccccuucgccaugcagauggccuaccgguucaacggcaucggcgugacccagaacgugcuguacgagaaccagaagcugaucgccaaccaguucaacagcgccaucggcaagauccaggacagccugagcagcaccgccagcgcccugggcaagcugcaggacguggugaaccagaacgcucaggcccugaacacccuggugaagcagcugagcagcaacuucggcgccaucagcucagugcugaacgacauccugagcaggcuggacaagguggaggccgaggugcagaucgaccggcugaucaccggccggcugcagagccugcagaccuacgugacccagcagcugauccgggccgccgagauccgggccagcgccaaucuggcagccaccaagaugagcgagugcgugcugggccagagcaagcggguggacuuuugcggcaagggcuaccaccugaugagcuucccccagagcgccccacacggcgugguguuccuccacgucacauacgugcccgcccaggagaagaacuucaccaccgcccccgccauuugccacgacggcaaggcucacuucccccgggagggaguguucgugagcaacggcacccacugguucgugacccagcggaacuucuacgagccccagaucaucaccaccgacaacaccuucgugagcggcaacugcgacguggugaucggcaucgugaacaacaccguguacgacccccugcagccugagcuggacagcuucaaggaggagcuggacaaguacuucaagaaccacaccagccccgacguggaucugggcgacaucagcggcaucaacgccagcguggugaacauccagaaggagaucgaccggcugaacgagguggccaagaaccugaacgagagccugaucgaccugcaggagcugggcaaguacgagcaguacaucaaguggcccugguacaucuggcugggcuucaucgccggccugaucgccaucgugauggugaccaucaugcugugcugcaugaccagcugcuguagcugccugaagggcugcugcagcugcggcagcugcugcaaguucgacgaggacgacagcgagccagugcugaagggcgugaagcugcacuacaccugaggacuaguuauaagacugacuagcccgaugggccucccaacgggcccuccuccccuccuugcaccgagauuaauagaucucaaaggcucuuuucagagccaccaaaaaaaaaaaaaaaaaaaaaaaaaaaaaaaaaaaaaaaaaaaaaaaaaaaaaaaaaaaaaaaaaaaaaaaaaaaaaaaaaaaaaaaaaaaaaaaaaaaaa

SEQ ID NO: 24347 - RNA, 4041 nt, Artificial Sequence
  SARS-CoV-2/Wuhan/WIV05/2019__EPI_ISL_402128 spike protein mRNA gc (1-1273)(S477N_D614G)
aggagaaagcuuaccauguucguguuccuggugcugcugccccuggugagcagccagugcgugaaccugaccacccggacccagcugcccccugccuacaccaacagcuucacccggggcguguacuaccccgacaagguguuccggagcagcgugcugcacagcacccaggaccuguuccugcccuucuucagcaacgugaccugguuccacgccauccacgugagcggcaccaacggcaccaagcgguucgacaacccagugcugcccuucaacgacggcguguacuucgccagcaccgagaagucaaacaucauccggggcuggaucuucggcaccacccuggacagcaagacacagagccugcugaucgugaacaacgccaccaacguggugaucaaggugugcgaguuucaguucugcaacgaccccuuccugggcguguacuaccacaagaacaacaagagcuggauggagagcgaguuccgggucuacagcagcgcuaacaauugcaccuucgaguacgugagccagcccuuccugauggaccucgagggcaagcagggcaacuucaagaaccugcgggaguucguguucaagaacaucgauggcuacuucaagaucuacagcaagcacacccccaucaaccuggugcgggaccugccccagggauucagcgcccuggagccucugguggaccugcccaucggcaucaacaucaccagguuccagacccugcuggcccugcaccggagcuaccugacccccggcgacagcagcagcggcuggaccgccggcgccgccgcauacuacgugggcuaccugcagccacggaccuuccugcugaaguacaacgagaacggcaccaucaccgacgccguggacugcgcccuggacccccugagcgagaccaagugcacccuaaagagcuucaccguggagaagggcaucuaccagaccagcaacuuccgggugcagcccacugagagcaucgugcgguuccccaacauuaccaaccugugucccuucggcgagguguucaacgccacccgguucgccagcguguacgccuggaaccggaagcggaucagcaacugcguggccgacuacagcgugcuguacaacagcgccagcuucagcaccuucaagugcuacggcgugagcccuaccaagcugaacgaccugugcuucaccaacguguacgcugacagcuucgugauccggggcgacgaggugcggcagaucgcccccggccagaccggcaagaucgccgacuacaacuacaagcugcccgacgacuucaccggcugcgugaucgccuggaacagcaacaaccuggacagcaaggugggcggcaacuacaacuaccuguaccggcuguuccguaagagcaaccugaagccauucgagcgggacaucagcaccgagaucuaccaggccggcaacacccccugcaacgguguggagggcuuuaacugcuacuucccccugcagagcuacggcuuccagcccaccaacggcgugggcuaccagcccuaccgggugguggugcugagcuucgagcugcugcacgcccccgccaccgugugcggcccuaaaaagagcaccaaccuggugaagaacaagugcgugaauuucaacuucaacggccugaccggcaccggcgugcugaccgagagcaacaagaaguuccugcccuuccagcaguucggccgggauaucgccgacaccaccgacgcagugcgggacccccagacccuggagauccuggacaucaccccaugcagcuucggcggcgugagcgucaucacccccggcacaaacaccagcaaccagguggccgugcuguaccagggagugaacugcaccgaggugcccguggccauccacgccgaccagcugacccccaccuggcggguguacagcaccggcagcaacguguuccagacccgggccggcugccugaucggcgccgagcacgugaacaacagcuacgagugcgacauccccaucggcgcuggcaucugcgccuccuaccagacccagaccaacagcccccggcgggcccggagcguggccagccagagcaucaucgccuacaccaugagcuuaggcgccgagaacagcguggccuacagcaacaacagcaucgcgaucccuaccaacuucaccaucagcgugaccaccgagauacugcccgugagcaugaccaagaccagcguggacuguaccauguacaucugcggcgacagcaccgagugcagcaaccugcugcugcaguacggcagcuucugcacccagcugaaccgggcccugaccggcaucgccguggagcaggacaagaacacccaagagguguucgcccaggugaagcagaucuacaagacucccccaaucaaggacuucggcggcuucaacuucagccagauccugcccgaccccagcaagcccagcaagcggagcuucaucgaggaccugcuguucaacaaggugacccuggccgacgccggcuucaucaagcaguacggcgacugccugggggauaucgccgcucgggaccugaucugcgcccagaaguucaacggccugaccgugcugcccccucugcugaccgacgagaugaucgcccaguacaccagcgcccugcuugccggcaccaucaccagcggcuggaccuucggcgccggcgcagcccugcagauccccuucgccaugcagauggccuaccgguucaacggcaucggcgugacccagaacgugcuguacgagaaccagaagcugaucgccaaccaguucaacagcgccaucggcaagauccaggacagccugagcagcaccgccagcgcccugggcaagcugcaggacguggugaaccagaacgcucaggcccugaacacccuggugaagcagcugagcagcaauuucggcgccaucagcagcgugcugaacgacauccugucaaggcuggacaagguggaggccgaggugcagaucgaccggcugaucaccggccggcugcagagccugcagaccuacgugacccagcagcugauccgggccgccgagauccgggccagcgccaaccuggcagccaccaagaugagcgagugcgugcugggccagagcaagcggguggacuuuugcggcaagggcuaccaccugaugagcuucccccagagcgccccacacggcgugguguuccuccacgucacauacgugcccgcccaggagaagaacuucaccaccgcccccgccauuugccacgacggcaaggcucacuucccccgggagggaguguucgugagcaacggcacccacugguucgugacccagcggaacuucuacgagccccagaucaucaccaccgacaacaccuucgugagcggcaacugcgacguggugaucggcaucgugaacaacaccguguacgacccccugcagccugagcuggacagcuucaaggaggagcuggacaaguacuucaagaaccacaccagccccgacguggaucugggcgacaucagcggcaucaacgccagcguggugaacauccagaaggagaucgaccggcugaacgagguggccaagaaccugaacgagagccugaucgaccugcaggagcugggcaaguacgagcaguacaucaaguggcccugguacaucuggcugggcuucaucgccggccugaucgccaucgugauggugaccaucaugcugugcugcaugaccagcugcuguagcugccugaagggcugcugcagcugcggcagcugcugcaaguucgacgaggacgacagcgagccagugcugaagggcgugaagcugcacuacaccugaggacuaguuauaagacugacuagcccgaugggccucccaacgggcccuccuccccuccuugcaccgagauuaauagaucucaaaggcucuuuucagagccaccaaaaaaaaaaaaaaaaaaaaaaaaaaaaaaaaaaaaaaaaaaaaaaaaaaaaaaaaaaaaaaaaaaaaaaaaaaaaaaaaaaaaaaaaaaaaaaaaaaaaa

SEQ ID NO: 24348 - RNA, 4041 nt, Artificial Sequence
  SARS-CoV-2/Wuhan/WIV05/2019__EPI_ISL_402128 spike protein mRNA gc (1-1273)(N501Y_D614G)
aggagaaagcuuaccauguucguguuccuggugcugcugccccuggugagcagccagugcgugaaccugaccacccggacccagcugcccccugccuacaccaacagcuucacccggggcguguacuaccccgacaagguguuccggagcagcgugcugcacagcacccaggaccuguuccugcccuucuucagcaacgugaccugguuccacgccauccacgugagcggcaccaacggcaccaagcgguucgacaacccagugcugcccuucaacgacggcguguacuucgccagcaccgagaagucaaacaucauccggggcuggaucuucggcaccacccuggacagcaagacacagagccugcugaucgugaacaacgccaccaacguggugaucaaggugugcgaguuucaguucugcaacgaccccuuccugggcguguacuaccacaagaacaacaagagcuggauggagagcgaguuccgggucuacagcagcgcuaacaauugcaccuucgaguacgugagccagcccuuccugauggaccucgagggcaagcagggcaacuucaagaaccugcgggaguucguguucaagaacaucgauggcuacuucaagaucuacagcaagcacacccccaucaaccuggugcgggaccugccccagggauucagcgcccuggagccucugguggaccugcccaucggcaucaacaucaccagguuccagacccugcuggcccugcaccggagcuaccugacccccggcgacagcagcagcggcuggaccgccggcgccgccgcauacuacgugggcuaccugcagccacggaccuuccugcugaaguacaacgagaacggcaccaucaccgacgccguggacugcgcccuggacccccugagcgagaccaagugcacccuaaagagcuucaccguggagaagggcaucuaccagaccagcaacuuccgggugcagcccacugagagcaucgugcgguuccccaacauuaccaaccugugucccuucggcgagguguucaacgccacccgguucgccagcguguacgccuggaaccggaagcggaucagcaacugcguggccgacuacagcgugcuguacaacagcgccagcuucagcaccuucaagugcuacggcgugagcccuaccaagcugaacgaccugugcuucaccaacguguacgcugacagcuucgugauccggggcgacgaggugcggcagaucgcccccggccagaccggcaagaucgccgacuacaacuacaagcugcccgacgacuucaccggcugcgugaucgccuggaacagcaacaaccuggacagcaaggugggcggcaacuacaacuaccuguaccggcuguuccguaagagcaaccugaagccauucgagcgggacaucagcaccgagaucuaccaggccggcagcacccccugcaacgguguggagggcuuuaacugcuacuucccccugcagagcuacggcuuccagcccaccuacggcgugggcuaccagcccuaccgggugguggugcugagcuucgagcugcugcacgcccccgccaccgugugcggcccuaaaaagagcaccaaccuggugaagaacaagugcgugaacuucaacuucaauggccugaccggcaccggcgugcugaccgagagcaacaagaaguuccugcccuuccagcaguucggccgggauaucgccgacaccaccgacgcagugcgggacccccagacccuggagauccuggacaucaccccaugcagcuucggcggcgugagcgucaucacccccggcacaaacaccagcaaccagguggccgugcuguaccagggagugaacugcaccgaggugcccguggccauccacgccgaccagcugacccccaccuggcggguguacagcaccggcagcaacguguuccagacccgggccggcugccugaucggcgccgagcacgugaacaacuccuacgagugcgacauccccaucggcgcuggcaucugcgccagcuaccagacccagaccaacagcccccggcgggcccggagcguggccagccagagcaucaucgccuacaccaugagcuuaggcgccgagaacagcguggccuacagcaacaacagcaucgcgaucccuaccaacuucaccaucagcgugaccaccgagauacugcccgugagcaugaccaagaccagcguggacuguaccauguacaucugcggcgacagcaccgagugcagcaaccugcugcugcaguacggcagcuucugcacccagcugaaccgggcccugaccggcaucgccguggagcaggacaagaacacccaagagguguucgcccaggugaagcagaucuacaagacucccccaaucaaggacuucggcggcuucaacuucagccagauccugcccgaccccagcaagcccagcaagcggagcuucaucgaggaccugcuguucaacaaggugacccuggccgacgccggcuucaucaagcaguacggcgacugccugggggauaucgccgcucgggaccugaucugcgcccagaaguucaacggccugaccgugcugcccccucugcugaccgacgagaugaucgcccaguacaccagcgcccugcuugccggcaccaucaccagcggcuggaccuucggcgccggcgcagcccugcagauccccuucgccaugcagauggccuaccgguucaacggcaucggcgugacccagaacgugcuguacgagaaccagaagcugaucgccaaccaguucaacagcgccaucggcaagauccaggacagccugagcagcaccgccagcgcccugggcaagcugcaggacguggugaaccagaacgcucaggcccugaacacccuggugaagcagcugagcagcaacuucggcgccaucagcucagugcugaacgacauccugagcaggcuggacaagguggaggccgaggugcagaucgaccggcugaucaccggccggcugcagagccugcagaccuacgugacccagcagcugauccgggccgccgagauccgggccagcgccaaucuggcagccaccaagaugagcgagugcgugcugggccagagcaagcggguggacuuuugcggcaagggcuaccaccugaugagcuucccccagagcgccccacacggcgugguguuccuccacgucacauacgugcccgcccaggagaagaacuucaccaccgcccccgccauuugccacgacggcaaggcucacuucccccgggagggaguguucgugagcaacggcacccacugguucgugacccagcggaacuucuacgagccccagaucaucaccaccgacaacaccuucgugagcggcaacugcgacguggugaucggcaucgugaacaacaccguguacgacccccugcagccugagcuggacagcuucaaggaggagcuggacaaguacuucaagaaccacaccagccccgacguggaucugggcgacaucagcggcaucaacgccagcguggugaacauccagaaggagaucgaccggcugaacgagguggccaagaaccugaacgagagccugaucgaccugcaggagcugggcaaguacgagcaguacaucaaguggcccugguacaucuggcugggcuucaucgccggccugaucgccaucgugauggugaccaucaugcugugcugcaugaccagcugcuguagcugccugaagggcugcugcagcugcggcagcugcugcaaguucgacgaggacgacagcgagccagugcugaagggcgugaagcugcacuacaccugaggacuaguuauaagacugacuagcccgaugggccucccaacgggcccuccuccccuccuugcaccgagauuaauagaucucaaaggcucuuuucagagccaccaaaaaaaaaaaaaaaaaaaaaaaaaaaaaaaaaaaaaaaaaaaaaaaaaaaaaaaaaaaaaaaaaaaaaaaaaaaaaaaaaaaaaaaaaaaaaaaaaaaaa

SEQ ID NO: 24349 - RNA, 4035 nt, Artificial Sequence
  SARS-CoV-2/Wuhan/WIV05/2019__EPI_ISL_402128 spike protein mRNA gc (1-1273)(H69del_V70del_D614G)
aggagaaagcuuaccauguucguguuccuggugcugcugccccuggugagcagccagugcgugaaccugaccacccggacccagcugcccccugccuacaccaacagcuucacccggggcguguacuaccccgacaagguguuccggagcagcgugcugcacagcacccaggaccuguuccugcccuucuucagcaacgugaccugguuccacgccaucagcggcaccaacggcaccaagcgguucgacaacccagugcugcccuucaacgacggcguguacuucgccagcaccgagaagucaaacaucauccggggcuggaucuucggcaccacccuggacagcaagacacagagccugcugaucgugaacaacgccaccaacguggugaucaaggugugcgaguuucaguucugcaacgaccccuuccugggcguguacuaccacaagaacaacaagagcuggauggagagcgaguuccggguguacagcagcgcuaacaauugcaccuucgaguacgucagccagcccuuccugauggaccucgagggcaagcagggcaacuucaagaaccugcgggaguucguguucaagaacaucgauggcuacuucaagaucuacagcaagcacacccccaucaaccuggugcgggaccugccccagggauucagcgcccuggagccucugguggaccugcccaucggcaucaacaucaccagguuccagacccugcuggcccugcaccggagcuaccugacccccggcgacagcagcagcggcuggaccgccggcgccgccgcauacuacgugggcuaccugcagccacggaccuuccugcugaaguacaacgagaacggcaccaucaccgacgccguggacugcgcccuggacccccugagcgagaccaagugcacccuaaagagcuucaccguggagaagggcaucuaccagaccagcaacuuccgggugcagcccacugagagcaucgugcgguuccccaacauuaccaaccugugucccuucggcgagguguucaacgccacccgguucgccagcguguacgccuggaaccggaagcggaucagcaacugcguggccgacuacagcgugcuguacaacagcgccagcuucagcaccuucaagugcuacggcgugagcccuaccaagcugaacgaccugugcuucaccaacguguacgcugacagcuucgugauccggggcgacgaggugcggcagaucgcccccggccagaccggcaagaucgccgacuacaacuacaagcugcccgacgacuucaccggcugcgugaucgccuggaacagcaacaaccuggacagcaaggugggcggcaacuacaacuaccuguaccggcuguuccguaagagcaaccugaagccauucgagcgggacaucagcaccgagaucuaccaggccggcagcacccccugcaacgguguggagggcuuuaacugcuacuucccccugcagagcuacggcuuccagcccaccaacggcgugggcuaccagcccuaccgggugguggugcugagcuucgagcugcugcacgcccccgccaccgugugcggcccuaaaaagagcaccaaccuggugaagaacaagugcgugaacuucaauuucaacggccugaccggcaccggcgugcugaccgagagcaacaagaaguuccugcccuuccagcaguucggccgggauaucgccgacaccaccgacgcagugcgggacccccagacccuggagauccuggacaucaccccaugcagcuucggcggcgugagcgugaucacccccggcacaaacaccagcaaccaggucgccgugcuguaccagggagugaacugcaccgaggugcccguggccauccacgccgaccagcugacccccaccuggcggguguacagcaccggcagcaacguguuccagacccgggccggcugccugaucggcgccgagcacgugaacaacuccuacgagugcgacauccccaucggcgcuggcaucugcgccagcuaccagacccagaccaacagcccccggcgggcccggagcguggccagccagagcaucaucgccuacaccaugagcuuaggcgccgagaacagcguggccuacagcaacaacagcaucgcgaucccuaccaacuucaccaucagcgugaccaccgagauacugcccgugagcaugaccaagaccagcguggacuguaccauguacaucugcggcgacagcaccgagugcagcaaccugcugcugcaguacggcagcuucugcacccagcugaaccgggcccugaccggcaucgccguggagcaggacaagaacacccaagagguguucgcccaggugaagcagaucuacaagacucccccaaucaaggacuucggcggcuucaacuucagccagauccugcccgaccccagcaagcccagcaagcggagcuucaucgaggaccugcuguucaacaaggugacccuggccgacgccggcuucaucaagcaguacggcgacugccugggggauaucgccgcucgggaccugaucugcgcccagaaguucaacggccugaccgugcugcccccucugcugaccgacgagaugaucgcccaguacaccagcgcccugcuugccggcaccaucaccagcggcuggaccuucggcgccggcgcagcccugcagauccccuucgccaugcagauggccuaccgguucaacggcaucggcgugacccagaacgugcuguacgagaaccagaagcugaucgccaaccaguucaacagcgccaucggcaagauccaggacagccugagcagcaccgccagcgcccugggcaagcugcaggacguggugaaccagaacgcucaggcccugaacacccuggugaagcagcugagcagcaacuucggcgccaucagcucagugcugaaugacauccugagcaggcuggacaagguggaggccgaggugcagaucgaccggcugaucaccggccggcugcagagccugcagaccuacgugacccagcagcugauccgggccgccgagauccgggccagcgccaaccuggcagccaccaagaugagcgagugcgugcugggccagagcaagcggguggacuuuugcggcaagggcuaccaccugaugagcuucccccagagcgccccacacggcgugguguuccuccacgugacauacguccccgcccaggagaagaacuucaccaccgcccccgccauuugccacgacggcaaggcucacuucccccgggagggaguguucgugagcaacggcacccacugguucgugacccagcggaacuucuacgagccccagaucaucaccaccgacaacaccuucgugagcggcaacugcgacguggugaucggcaucgugaacaacaccguguacgacccccugcagccugagcuggacagcuucaaggaggagcuggacaaguacuucaagaaccacaccagccccgacguggaucugggcgacaucagcggcaucaacgccagcguggugaacauccagaaggagaucgaccggcugaacgagguggccaagaaccugaacgagagccugaucgaccugcaggagcugggcaaguacgagcaguacaucaaguggcccugguacaucuggcugggcuucaucgccggccugaucgccaucgugauggugaccaucaugcugugcugcaugaccagcugcuguagcugccugaagggcugcugcagcugcggcagcugcugcaaguucgacgaggacgacagcgagccagugcugaagggcgugaagcugcacuacaccugaggacuaguuauaagacugacuagcccgaugggccucccaacgggcccuccuccccuccuugcaccgagauuaauagaucucaaaggcucuuuucagagccaccaaaaaaaaaaaaaaaaaaaaaaaaaaaaaaaaaaaaaaaaaaaaaaaaaaaaaaaaaaaaaaaaaaaaaaaaaaaaaaaaaaaaaaaaaaaaaaaaaaaaa

SEQ ID NO: 24350 - RNA, 4041 nt, Artificial Sequence
  SARS-CoV-2/Wuhan/WIV05/2019__EPI_ISL_402128 spike protein mRNA gc (1-1273)(Y453F_D614G)
aggagaaagcuuaccauguucguguuccuggugcugcugccccuggugagcagccagugcgugaaccugaccacccggacccagcugcccccugccuacaccaacagcuucacccggggcguguacuaccccgacaagguguuccggagcagcgugcugcacagcacccaggaccuguuccugcccuucuucagcaacgugaccugguuccacgccauccacgugagcggcaccaacggcaccaagcgguucgacaacccagugcugcccuucaacgacggcguguacuucgccagcaccgagaagucaaacaucauccggggcuggaucuucggcaccacccuggacagcaagacacagagccugcugaucgugaacaacgccaccaacguggugaucaaggugugcgaguuucaguucugcaacgaccccuuccugggcguguacuaccacaagaacaacaagagcuggauggagagcgaguuccgggucuacagcagcgcuaacaauugcaccuucgaguacgugagccagcccuuccugauggaccucgagggcaagcagggcaacuucaagaaccugcgggaguucguguucaagaacaucgauggcuacuucaagaucuacagcaagcacacccccaucaaccuggugcgggaccugccccagggauucagcgcccuggagccucugguggaccugcccaucggcaucaacaucaccagguuccagacccugcuggcccugcaccggagcuaccugacccccggcgacagcagcagcggcuggaccgccggcgccgccgcauacuacgugggcuaccugcagccacggaccuuccugcugaaguacaacgagaacggcaccaucaccgacgccguggacugcgcccuggacccccugagcgagaccaagugcacccuaaagagcuucaccguggagaagggcaucuaccagaccagcaacuuccgggugcagcccacugagagcaucgugcgguuccccaacauuaccaaccugugucccuucggcgagguguucaacgccacccgguucgccagcguguacgccuggaaccggaagcggaucagcaacugcguggccgacuacagcgugcuguacaacagcgccagcuucagcaccuucaagugcuacggcgugagcccuaccaagcugaacgaccugugcuucaccaacguguacgcugacagcuucgugauccggggcgacgaggugcggcagaucgcccccggccagaccggcaagaucgccgacuacaacuacaagcugcccgacgacuucaccggcugcgugaucgccuggaacagcaacaaccuggacagcaaggugggcggcaacuacaacuaccuguuccggcuguuccguaagagcaaccugaagccauuugagcgggacaucagcaccgagaucuaccaggccggcagcacccccugcaacgguguggagggcuucaacugcuacuucccccugcagagcuacggcuuccagcccaccaacggcgugggcuaccagcccuaccgggugguggugcugagcuucgagcugcugcacgcccccgccaccgugugcggcccuaaaaagagcaccaaccuggugaagaacaagugcgugaacuucaauuucaacggccugaccggcaccggcgugcugaccgagagcaacaagaaguuccugcccuuccagcaguucggccgggauaucgccgacaccaccgacgcagugcgggacccccagacccuggagauccuggacaucaccccaugcagcuucggcggcgugagcgucaucacccccggcacaaacaccagcaaccagguggccgugcuguaccagggagugaacugcaccgaggugcccguggccauccacgccgaccagcugacccccaccuggcggguguacagcaccggcagcaacguguuccagacccgggccggcugccugaucggcgccgagcacgugaacaacuccuacgagugcgacauccccaucggcgcuggcaucugcgccagcuaccagacccagaccaacagcccccggcgggcccggagcguggccagccagagcaucaucgccuacaccaugagcuuaggcgccgagaacagcguggccuacagcaacaacagcaucgcgaucccuaccaacuucaccaucagcgugaccaccgagauacugcccgugagcaugaccaagaccagcguggacuguaccauguacaucugcggcgacagcaccgagugcagcaaccugcugcugcaguacggcagcuucugcacccagcugaaccgggcccugaccggcaucgccguggagcaggacaagaacacccaagagguguucgcccaggugaagcagaucuacaagacucccccaaucaaggacuucggcggcuucaacuucagccagauccugcccgaccccagcaagcccagcaagcggagcuucaucgaggaccugcuguucaacaaggugacccuggccgacgccggcuucaucaagcaguacggcgacugccugggggauaucgccgcucgggaccugaucugcgcccagaaguucaacggccugaccgugcugcccccucugcugaccgacgagaugaucgcccaguacaccagcgcccugcuugccggcaccaucaccagcggcuggaccuucggcgccggcgcagcccugcagauccccuucgccaugcagauggccuaccgguucaacggcaucggcgugacccagaacgugcuguacgagaaccagaagcugaucgccaaccaguucaacagcgccaucggcaagauccaggacagccugagcagcaccgccagcgcccugggcaagcugcaggacguggugaaccagaacgcucaggcccugaacacccuggugaagcagcugagcagcaacuuuggcgccaucagcucagugcugaaugacauccugagcaggcuggacaagguggaggccgaggugcagaucgaccggcugaucaccggccggcugcagagccugcagaccuacgugacccagcagcugauccgggccgccgagauccgggccagcgccaaccuggcagccaccaagaugagcgagugcgugcugggccagagcaagcggguggacuucugcggcaagggcuaccaccugaugagcuucccccagagcgccccacacggcgugguguuccuccacgucacauacgugcccgcccaggagaagaacuucaccaccgcccccgccauuugccacgacggcaaggcucacuucccccgggagggaguguucgugagcaacggcacccacugguucgugacccagcggaacuucuacgagccccagaucaucaccaccgacaacaccuucgugagcggcaacugcgacguggugaucggcaucgugaacaacaccguguacgacccccugcagccugagcuggacagcuucaaggaggagcuggacaaguacuucaagaaccacaccagccccgacguggaucugggcgacaucagcggcaucaacgccagcguggugaacauccagaaggagaucgaccggcugaacgagguggccaagaaccugaacgagagccugaucgaccugcaggagcugggcaaguacgagcaguacaucaaguggcccugguacaucuggcugggcuucaucgccggccugaucgccaucgugauggugaccaucaugcugugcugcaugaccagcugcuguagcugccugaagggcugcugcagcugcggcagcugcugcaaguucgacgaggacgacagcgagccagugcugaagggcgugaagcugcacuacaccugaggacuaguuauaagacugacuagcccgaugggccucccaacgggcccuccuccccuccuugcaccgagauuaauagaucucaaaggcucuuuucagagccaccaaaaaaaaaaaaaaaaaaaaaaaaaaaaaaaaaaaaaaaaaaaaaaaaaaaaaaaaaaaaaaaaaaaaaaaaaaaaaaaaaaaaaaaaaaaaaaaaaaaaa

SEQ ID NO: 24351 - RNA, 4041 nt, Artificial Sequence
  SARS-CoV-2/Wuhan/WIV05/2019__EPI_ISL_402128 spike protein mRNA gc (1-1273)(D614G_I692V)
aggagaaagcuuaccauguucguguuccuggugcugcugccccuggugagcagccagugcgugaaccugaccacccggacccagcugcccccugccuacaccaacagcuucacccggggcguguacuaccccgacaagguguuccggagcagcgugcugcacagcacccaggaccuguuccugcccuucuucagcaacgugaccugguuccacgccauccacgugagcggcaccaacggcaccaagcgguucgacaacccagugcugcccuucaacgacggcguguacuucgccagcaccgagaagucaaacaucauccggggcuggaucuucggcaccacccuggacagcaagacacagagccugcugaucgugaacaacgccaccaacguggugaucaaggugugcgaguuucaguucugcaacgaccccuuccugggcguguacuaccacaagaacaacaagagcuggauggagagcgaguuccgggucuacagcagcgcuaacaauugcaccuucgaguacgugagccagcccuuccugauggaccucgagggcaagcagggcaacuucaagaaccugcgggaguucguguucaagaacaucgauggcuacuucaagaucuacagcaagcacacccccaucaaccuggugcgggaccugccccagggauucagcgcccuggagccucugguggaccugcccaucggcaucaacaucaccagguuccagacccugcuggcccugcaccggagcuaccugacccccggcgacagcagcagcggcuggaccgccggcgccgccgcauacuacgugggcuaccugcagccacggaccuuccugcugaaguacaacgagaacggcaccaucaccgacgccguggacugcgcccuggacccccugagcgagaccaagugcacccuaaagagcuucaccguggagaagggcaucuaccagaccagcaacuuccgggugcagcccacugagagcaucgugcgguuccccaacauuaccaaccugugucccuucggcgagguguucaacgccacccgguucgccagcguguacgccuggaaccggaagcggaucagcaacugcguggccgacuacagcgugcuguacaacagcgccagcuucagcaccuucaagugcuacggcgugagcccuaccaagcugaacgaccugugcuucaccaacguguacgcugacagcuucgugauccggggcgacgaggugcggcagaucgcccccggccagaccggcaagaucgccgacuacaacuacaagcugcccgacgacuucaccggcugcgugaucgccuggaacagcaacaaccuggacagcaaggugggcggcaacuacaacuaccuguaccggcuguuccguaagagcaaccugaagccauucgagcgggacaucagcaccgagaucuaccaggccggcagcacccccugcaacgguguggagggcuuuaacugcuacuucccccugcagagcuacggcuuccagcccaccaacggcgugggcuaccagcccuaccgggugguggugcugagcuucgagcugcugcacgcccccgccaccgugugcggcccuaaaaagagcaccaaccuggugaagaacaagugcgugaacuucaauuucaacggccugaccggcaccggcgugcugaccgagagcaacaagaaguuccugcccuuccagcaguucggccgggauaucgccgacaccaccgacgcagugcgggacccccagacccuggagauccuggacaucaccccaugcagcuucggcggcgugagcgucaucacccccggcacaaacaccagcaaccagguggccgugcuguaccagggagugaacugcaccgaggugcccguggccauccacgccgaccagcugacccccaccuggcggguguacagcaccggcagcaacguguuccagacccgggccggcugccugaucggcgccgagcacgugaacaacuccuacgagugcgacauccccaucggcgcuggcaucugcgccagcuaccagacccagaccaacagcccccggcgggcccggagcguggccagccagagcgugaucgccuacaccaugagcuuaggcgccgagaacagcguggccuacagcaacaacagcaucgcgaucccuaccaacuucaccaucagcgugaccaccgagauccugcccgugagcaugaccaagaccagcguggacuguaccauguacauaugcggcgacagcaccgagugcagcaaccugcugcugcaguacggcagcuucugcacccagcugaaccgggcccugaccggcaucgccguggagcaggacaagaacacccaagagguguucgcccaggugaagcagaucuacaagacucccccaaucaaggacuucggcggcuucaacuucagccagauccugcccgaccccagcaagcccagcaagcggagcuucaucgaggaccugcuguucaacaaggugacccuggccgacgccggcuucaucaagcaguacggcgacugccugggggauaucgccgcucgggaccugaucugcgcccagaaguucaacggccugaccgugcugcccccucugcugaccgacgagaugaucgcccaguacaccagcgcccugcuugccggcaccaucaccagcggcuggaccuucggcgccggcgcagcccugcagauccccuucgccaugcagauggccuaccgguucaacggcaucggcgugacccagaacgugcuguacgagaaccagaagcugaucgccaaccaguucaacagcgccaucggcaagauccaggacagccugagcagcaccgccagcgcccugggcaagcugcaggacguggugaaccagaacgcucaggcccugaacacccuggugaagcagcugagcagcaacuucggcgccaucagcucagugcugaaugacauccugagcaggcuggacaagguggaggccgaggugcagaucgaccggcugaucaccggccggcugcagagccugcagaccuacgugacccagcagcugauccgggccgccgagauccgggccagcgccaaccuggcagccaccaagaugagcgagugcgugcugggccagagcaagcggguggacuuuugcggcaagggcuaccaccugaugagcuucccccagagcgccccacacggcguggucuuccuccacgugacauacgugcccgcccaggagaagaacuucaccaccgcccccgccaucugccacgacggcaaggcucacuucccccgggagggaguguucgugagcaacggcacccacugguucgugacccagcggaacuucuacgagccccagauuaucaccaccgacaacaccuucgugagcggcaacugcgacguggugaucggcaucgugaacaacaccguguacgacccccugcagccugagcuggacagcuucaaggaggagcuggacaaguacuucaagaaccacaccagccccgacguggaucugggcgacaucagcggcaucaacgccagcguggugaacauccagaaggagaucgaccggcugaacgagguggccaagaaccugaacgagagccugaucgaccugcaggagcugggcaaguacgagcaguacaucaaguggcccugguacaucuggcugggcuucaucgccggccugaucgccaucgugauggugaccaucaugcugugcugcaugaccagcugcuguagcugccugaagggcugcugcagcugcggcagcugcugcaaguucgacgaggacgacagcgagccagugcugaagggcgugaagcugcacuacaccugaggacuaguuauaagacugacuagcccgaugggccucccaacgggcccuccuccccuccuugcaccgagauuaauagaucucaaaggcucuuuucagagccaccaaaaaaaaaaaaaaaaaaaaaaaaaaaaaaaaaaaaaaaaaaaaaaaaaaaaaaaaaaaaaaaaaaaaaaaaaaaaaaaaaaaaaaaaaaaaaaaaaaaaa

SEQ ID NO: 24352 - RNA, 4041 nt, Artificial Sequence
  SARS-CoV-2/Wuhan/WIV05/2019__EPI_ISL_402128 spike protein mRNA gc (1-1273)(D614G_M1229I)
aggagaaagcuuaccauguucguguuccuggugcugcugccccuggugagcagccagugcgugaaccugaccacccggacccagcugcccccugccuacaccaacagcuucacccggggcguguacuaccccgacaagguguuccggagcagcgugcugcacagcacccaggaccuguuccugcccuucuucagcaacgugaccugguuccacgccauccacgugagcggcaccaacggcaccaagcgguucgacaacccagugcugcccuucaacgacggcguguacuucgccagcaccgagaagucaaacaucauccggggcuggaucuucggcaccacccuggacagcaagacacagagccugcugaucgugaacaacgccaccaacguggugaucaaggugugcgaguuucaguucugcaacgaccccuuccugggcguguacuaccacaagaacaacaagagcuggauggagagcgaguuccgggucuacagcagcgcuaacaauugcaccuucgaguacgugagccagcccuuccugauggaccucgagggcaagcagggcaacuucaagaaccugcgggaguucguguucaagaacaucgauggcuacuucaagaucuacagcaagcacacccccaucaaccuggugcgggaccugccccagggauucagcgcccuggagccucugguggaccugcccaucggcaucaacaucaccagguuccagacccugcuggcccugcaccggagcuaccugacccccggcgacagcagcagcggcuggaccgccggcgccgccgcauacuacgugggcuaccugcagccacggaccuuccugcugaaguacaacgagaacggcaccaucaccgacgccguggacugcgcccuggacccccugagcgagaccaagugcacccuaaagagcuucaccguggagaagggcaucuaccagaccagcaacuuccgggugcagcccacugagagcaucgugcgguuccccaacauuaccaaccugugucccuucggcgagguguucaacgccacccgguucgccagcguguacgccuggaaccggaagcggaucagcaacugcguggccgacuacagcgugcuguacaacagcgccagcuucagcaccuucaagugcuacggcgugagcccuaccaagcugaacgaccugugcuucaccaacguguacgcugacagcuucgugauccggggcgacgaggugcggcagaucgcccccggccagaccggcaagaucgccgacuacaacuacaagcugcccgacgacuucaccggcugcgugaucgccuggaacagcaacaaccuggacagcaaggugggcggcaacuacaacuaccuguaccggcuguuccguaagagcaaccugaagccauucgagcgggacaucagcaccgagaucuaccaggccggcagcacccccugcaacgguguggagggcuuuaacugcuacuucccccugcagagcuacggcuuccagcccaccaacggcgugggcuaccagcccuaccgggugguggugcugagcuucgagcugcugcacgcccccgccaccgugugcggcccuaaaaagagcaccaaccuggugaagaacaagugcgugaacuucaauuucaacggccugaccggcaccggcgugcugaccgagagcaacaagaaguuccugcccuuccagcaguucggccgggauaucgccgacaccaccgacgcagugcgggacccccagacccuggagauccuggacaucaccccaugcagcuucggcggcgugagcgucaucacccccggcacaaacaccagcaaccagguggccgugcuguaccagggagugaacugcaccgaggugcccguggccauccacgccgaccagcugacccccaccuggcggguguacagcaccggcagcaacguguuccagacccgggccggcugccugaucggcgccgagcacgugaacaacuccuacgagugcgacauccccaucggcgcuggcaucugcgccagcuaccagacccagaccaacagcccccggcgggcccggagcguggccagccagagcaucaucgccuacaccaugagcuuaggcgccgagaacagcguggccuacagcaacaacagcaucgcgaucccuaccaacuucaccaucagcgugaccaccgagauacugcccgugagcaugaccaagaccagcguggacuguaccauguacaucugcggcgacagcaccgagugcagcaaccugcugcugcaguacggcagcuucugcacccagcugaaccgggcccugaccggcaucgccguggagcaggacaagaacacccaagagguguucgcccaggugaagcagaucuacaagacucccccaaucaaggacuucggcggcuucaacuucagccagauccugcccgaccccagcaagcccagcaagcggagcuucaucgaggaccugcuguucaacaaggugacccuggccgacgccggcuucaucaagcaguacggcgacugccugggggauaucgccgcucgggaccugaucugcgcccagaaguucaacggccugaccgugcugcccccucugcugaccgacgagaugaucgcccaguacaccagcgcccugcuugccggcaccaucaccagcggcuggaccuucggcgccggcgcagcccugcagauccccuucgccaugcagauggccuaccgguucaacggcaucggcgugacccagaacgugcuguacgagaaccagaagcugaucgccaaccaguucaacagcgccaucggcaagauccaggacagccugagcagcaccgccagcgcccugggcaagcugcaggacguggugaaccagaacgcucaggcccugaacacccuggugaagcagcugagcagcaacuucggcgccaucagcucagugcugaaugacauccugagcaggcuggacaagguggaggccgaggugcagaucgaccggcugaucaccggccggcugcagagccugcagaccuacgugacccagcagcugauccgggccgccgagauccgggccagcgccaaccuggcagccaccaagaugagcgagugcgugcugggccagagcaagcggguggacuuuugcggcaagggcuaccaccugaugagcuucccccagagcgccccacacggcgugguguuccuccacgucacauacgugcccgcccaggagaagaacuucaccaccgcccccgccauuugccacgacggcaaggcucacuucccccgggagggaguguucgugagcaacggcacccacugguucgugacccagcggaacuucuacgagccccagaucaucaccaccgacaacaccuucgugagcggcaacugcgacguggugaucggcaucgugaacaacaccguguacgacccccugcagccugagcuggacagcuucaaggaggagcuggacaaguacuucaagaaccacaccagccccgacguggaucugggcgacaucagcggcaucaacgccagcguggugaacauccagaaggagaucgaccggcugaacgagguggccaagaaccugaacgagagccugaucgaccugcaggagcugggcaaguacgagcaguacaucaaguggcccugguacaucuggcugggcuucaucgccggccugaucgccaucgugaucgugaccaucaugcugugcugcaugaccagcugcuguagcugccugaagggcugcugcagcugcggcagcugcugcaaguucgacgaggacgacagcgagccagugcugaagggcgugaagcugcacuacaccugaggacuaguuauaagacugacuagcccgaugggccucccaacgggcccuccuccccuccuugcaccgagauuaauagaucucaaaggcucuuuucagagccaccaaaaaaaaaaaaaaaaaaaaaaaaaaaaaaaaaaaaaaaaaaaaaaaaaaaaaaaaaaaaaaaaaaaaaaaaaaaaaaaaaaaaaaaaaaaaaaaaaaaaa

SEQ ID NO: 24353 - RNA, 4035 nt, Artificial Sequence
  SARS-CoV-2/Wuhan/WIV05/2019__EPI_ISL_402128 spike protein mRNA gc (1-1273)(H69del_V70del_A222V_Y453F_S477N_D614G_I692V)
aggagaaagcuuaccauguucguguuccuggugcugcugccccuggugagcagccagugcgugaaccugaccacccggacccagcugcccccugccuacaccaacagcuucacccggggcguguacuaccccgacaagguguuccggagcagcgugcugcacagcacccaggaccuguuccugcccuucuucagcaacgugaccugguuccacgccaucagcggcaccaacggcaccaagcgguucgacaacccagugcugcccuucaacgacggcguguacuucgccagcaccgagaagucaaacaucauccggggcuggaucuucggcaccacccuggacagcaagacacagagccugcugaucgugaacaacgccaccaacguggugaucaaggugugcgaguuucaguucugcaacgaccccuuccugggcguguacuaccacaagaacaacaagagcuggauggagagcgaguuccggguguacagcagcgcuaacaauugcaccuucgaguacgucagccagcccuuccugauggaccucgagggcaagcagggcaacuucaagaaccugcgggaguucguguucaagaacaucgauggcuacuucaagaucuacagcaagcacacccccaucaaccuggugcgggaccugccccagggauucagcgugcuggagccucugguggaccugcccaucggcaucaacaucaccagguuccagacccugcuggcccugcaccggagcuaccugacccccggcgacagcagcagcggcuggaccgccggcgccgccgccuacuacgugggcuaccugcagccacggaccuuccugcugaaguacaacgagaacggcaccaucaccgacgcaguggacugcgcccuggacccccugagcgagaccaagugcacccuaaagagcuucaccguggagaagggcaucuaccagaccagcaacuuccgggugcagcccacugagagcaucgugcgguuccccaacauuaccaaccugugucccuucggcgagguguucaacgccacccgguucgccagcguguacgccuggaaccggaagcggaucagcaacugcguggccgacuacagcgugcuguacaacagcgccagcuucagcaccuucaagugcuacggcgugagcccuaccaagcugaacgaccugugcuucaccaacguguacgccgacagcuucgugauccggggcgacgaggugcggcagaucgcucccggccagaccggcaagaucgccgacuacaacuacaagcugcccgacgacuucaccggcugcgugaucgccuggaacagcaacaaccuggacagcaaggugggcggcaacuacaacuaccuguuccggcuguuccguaagagcaaccugaagccauuugagcgggacaucagcaccgagaucuaccaggccggcaacacccccugcaacgguguggagggcuucaacugcuacuucccccugcagagcuacggcuuccagcccaccaacggcgugggcuaccagcccuaccgggugguggugcugagcuucgagcugcugcacgcccccgccaccgugugcggcccuaaaaagagcaccaaccuggugaagaacaagugcgugaauuucaacuucaacggccugaccggcaccggcgugcugaccgagagcaacaagaaguuccugcccuuccagcaguucggccgggauaucgccgacaccaccgacgccgugcgggacccccagacccuggagauccuggacaucaccccaugcagcuucggcggcgugagcgucaucacccccggcacaaacaccagcaaccagguggcagugcuguaccagggagugaacugcaccgaggugcccguggccauccacgccgaccagcugacccccaccuggcggguguacagcaccggcagcaacguguuccagacccgggccggcugccugaucggcgccgagcacgugaacaacagcuacgagugcgacauccccaucggcgccggcaucugcgcuuccuaccagacccagaccaacagcccccggcgggcccggagcguggccagccagagcgugaucgccuacaccaugagcuuaggcgccgagaacagcguggccuacagcaacaacagcaucgccaucccuaccaacuucaccaucagcgugaccaccgagauccugcccgugagcaugaccaagaccagcguggacuguaccauguacauaugcggcgacagcaccgagugcagcaaccugcugcugcaguacggcagcuucugcacccagcugaaccgggcgcugaccggcaucgccguggagcaggacaagaacacccaagagguguucgcccaggugaagcagaucuacaagacucccccaaucaaggacuucggcggcuucaacuucagccagauccugcccgaccccagcaagcccagcaagcggagcuucaucgaggaccugcuguucaacaaggugacccuggccgacgccggcuucaucaagcaguacggcgacugccugggggauaucgccgcccgggaccugaucugcgcucagaaguucaacggccugaccgugcugcccccucugcugaccgacgagaugaucgcccaguacaccagcgcccugcuugccggcaccaucaccagcggcuggaccuucggcgccggcgccgcacugcagauccccuucgccaugcagauggccuaccgguucaacggcaucggcgugacccagaacgugcuguacgagaaccagaagcugaucgccaaccaguucaacagcgccaucggcaagauccaggacagccugagcagcaccgccagcgcccugggcaagcugcaggacguggugaaccagaacgcccaggcucugaacacccuggugaagcagcugagcagcaauuuuggcgccaucagcagcgugcugaacgacauccugucaaggcuggacaagguggaggccgaggugcagaucgaccggcugaucaccggccggcugcagagccugcagaccuacgugacccagcagcugauccgggccgccgagauccgggccagcgccaaccuggccgcaaccaagaugagcgagugcgugcugggccagagcaagcggguggacuucugcggcaagggcuaccaccugaugagcuucccccagagcgccccacacggcguggucuuccuccacgugacauacgugcccgcccaggagaagaacuucaccaccgcccccgccaucugccacgacggcaaggcccacuucccccgggagggaguguucgugagcaacggcacccacugguucgugacccagcggaacuucuacgagccccagauuaucaccaccgacaacaccuucgugagcggcaacugcgacguggugaucggcaucgugaacaacaccguguacgacccccugcagccugagcuggacagcuucaaggaggagcuggacaaguacuucaagaaccacaccagccccgacguggaucugggcgacaucagcggcaucaacgcuagcguggugaacauccagaaggagaucgaccggcugaacgagguggccaagaaccugaacgagagccugaucgaccugcaggagcugggcaaguacgagcaguacaucaaguggcccugguacaucuggcugggcuucaucgccggccugaucgccaucgugauggugaccaucaugcugugcugcaugaccagcugcuguagcugccugaagggcugcugcagcugcggcagcugcugcaaguucgacgaggacgacagcgagccagugcugaagggcgugaagcugcacuacaccugaggacuaguuauaagacugacuagcccgaugggccucccaacgggcccuccuccccuccuugcaccgagauuaauagaucucaaaggcucuuuucagagccaccaaaaaaaaaaaaaaaaaaaaaaaaaaaaaaaaaaaaaaaaaaaaaaaaaaaaaaaaaaaaaaaaaaaaaaaaaaaaaaaaaaaaaaaaaaaaaaaaaaaaa

SEQ ID NO: 24354 - RNA, 4035 nt, Artificial Sequence
  SARS-CoV-2/Wuhan/WIV05/2019__EPI_ISL_402128 spike protein mRNA gc (1-1273)(H69del_V70del_Y453F_D614G_I692V_M1229I)
aggagaaagcuuaccauguucguguuccuggugcugcugccccuggugagcagccagugcgugaaccugaccacccggacccagcugcccccugccuacaccaacagcuucacccggggcguguacuaccccgacaagguguuccggagcagcgugcugcacagcacccaggaccuguuccugcccuucuucagcaacgugaccugguuccacgccaucagcggcaccaacggcaccaagcgguucgacaacccagugcugcccuucaacgacggcguguacuucgccagcaccgagaagucaaacaucauccggggcuggaucuucggcaccacccuggacagcaagacacagagccugcugaucgugaacaacgccaccaacguggugaucaaggugugcgaguuucaguucugcaacgaccccuuccugggcguguacuaccacaagaacaacaagagcuggauggagagcgaguuccggguguacagcagcgcuaacaauugcaccuucgaguacgucagccagcccuuccugauggaccucgagggcaagcagggcaacuucaagaaccugcgggaguucguguucaagaacaucgauggcuacuucaagaucuacagcaagcacacccccaucaaccuggugcgggaccugccccagggauucagcgcccuggagccucugguggaccugcccaucggcaucaacaucaccagguuccagacccugcuggcccugcaccggagcuaccugacccccggcgacagcagcagcggcuggaccgccggcgccgccgcauacuacgugggcuaccugcagccacggaccuuccugcugaaguacaacgagaacggcaccaucaccgacgccguggacugcgcccuggacccccugagcgagaccaagugcacccuaaagagcuucaccguggagaagggcaucuaccagaccagcaacuuccgggugcagcccacugagagcaucgugcgguuccccaacauuaccaaccugugucccuucggcgagguguucaacgccacccgguucgccagcguguacgccuggaaccggaagcggaucagcaacugcguggccgacuacagcgugcuguacaacagcgccagcuucagcaccuucaagugcuacggcgugagcccuaccaagcugaacgaccugugcuucaccaacguguacgcugacagcuucgugauccggggcgacgaggugcggcagaucgcccccggccagaccggcaagaucgccgacuacaacuacaagcugcccgacgacuucaccggcugcgugaucgccuggaacagcaacaaccuggacagcaaggugggcggcaacuacaacuaccuguuccggcuguuccguaagagcaaccugaagccauuugagcgggacaucagcaccgagaucuaccaggccggcagcacccccugcaacgguguggagggcuucaacugcuacuucccccugcagagcuacggcuuccagcccaccaacggcgugggcuaccagcccuaccgggugguggugcugagcuucgagcugcugcacgcccccgccaccgugugcggcccuaaaaagagcaccaaccuggugaagaacaagugcgugaacuucaauuucaacggccugaccggcaccggcgugcugaccgagagcaacaagaaguuccugcccuuccagcaguucggccgggauaucgccgacaccaccgacgcagugcgggacccccagacccuggagauccuggacaucaccccaugcagcuucggcggcgugagcgugaucacccccggcacaaacaccagcaaccaggucgccgugcuguaccagggagugaacugcaccgaggugcccguggccauccacgccgaccagcugacccccaccuggcggguguacagcaccggcagcaacguguuccagacccgggccggcugccugaucggcgccgagcacgugaacaacuccuacgagugcgacauccccaucggcgcuggcaucugcgccagcuaccagacccagaccaacagcccccggcgggcccggagcguggccagccagagcgugaucgccuacaccaugagcuuaggcgccgagaacagcguggccuacagcaacaacagcaucgcgaucccuaccaacuucaccaucagcgugaccaccgagauccugcccgugagcaugaccaagaccagcguggacuguaccauguacauaugcggcgacagcaccgagugcagcaaccugcugcugcaguacggcagcuucugcacccagcugaaccgggcccugaccggcaucgccguggagcaggacaagaacacccaagagguguucgcccaggugaagcagaucuacaagacucccccaaucaaggacuucggcggcuucaacuucagccagauccugcccgaccccagcaagcccagcaagcggagcuucaucgaggaccugcuguucaacaaggugacccuggccgacgccggcuucaucaagcaguacggcgacugccugggggauaucgccgcucgggaccugaucugcgcccagaaguucaacggccugaccgugcugcccccucugcugaccgacgagaugaucgcccaguacaccagcgcccugcuugccggcaccaucaccagcggcuggaccuucggcgccggcgcagcccugcagauccccuucgccaugcagauggccuaccgguucaacggcaucggcgugacccagaacgugcuguacgagaaccagaagcugaucgccaaccaguucaacagcgccaucggcaagauccaggacagccugagcagcaccgccagcgcccugggcaagcugcaggacguggugaaccagaacgcucaggcccugaacacccuggugaagcagcugagcagcaacuuuggcgccaucagcucagugcugaaugacauccugagcaggcuggacaagguggaggccgaggugcagaucgaccggcugaucaccggccggcugcagagccugcagaccuacgugacccagcagcugauccgggccgccgagauccgggccagcgccaaccuggcagccaccaagaugagcgagugcgugcugggccagagcaagcggguggacuucugcggcaagggcuaccaccugaugagcuucccccagagcgccccacacggcgugguguuccuccacgucacauacgugcccgcccaggagaagaacuucaccaccgcccccgccaucugccacgacggcaaggcucacuucccccgggagggaguguucgugagcaacggcacccacugguucgugacccagcggaacuucuacgagccccagauuaucaccaccgacaacaccuucgugagcggcaacugcgacguggugaucggcaucgugaacaacaccguguacgacccccugcagccugagcuggacagcuucaaggaggagcuggacaaguacuucaagaaccacaccagccccgacguggaucugggcgacaucagcggcaucaacgccagcguggugaacauccagaaggagaucgaccggcugaacgagguggccaagaaccugaacgagagccugaucgaccugcaggagcugggcaaguacgagcaguacaucaaguggcccugguacaucuggcugggcuucaucgccggccugaucgccaucgugaucgugaccaucaugcugugcugcaugaccagcugcuguagcugccugaagggcugcugcagcugcggcagcugcugcaaguucgacgaggacgacagcgagccagugcugaagggcgugaagcugcacuacaccugaggacuaguuauaagacugacuagcccgaugggccucccaacgggcccuccuccccuccuugcaccgagauuaauagaucucaaaggcucuuuucagagccaccaaaaaaaaaaaaaaaaaaaaaaaaaaaaaaaaaaaaaaaaaaaaaaaaaaaaaaaaaaaaaaaaaaaaaaaaaaaaaaaaaaaaaaaaaaaaaaaaaaaaa

SEQ ID NO: 24355 - RNA, 4032 nt, Artificial Sequence
  SARS-CoV-2/Wuhan/WIV05/2019__EPI_ISL_402128 spike protein mRNA gc (1-1273)(H69del_V70del_Y144del_N501Y_A570D_D614G_P681H_T716I_S982 A_D1118H)
aggagaaagcuuaccauguucguguuccuggugcugcugccccuggugagcagccagugcgugaaccugaccacccggacccagcugcccccugccuacaccaacagcuucacccggggcguguacuaccccgacaagguguuccggagcagcgugcugcacagcacccaggaccuguuccugcccuucuucagcaacgugaccugguuccacgccaucagcggcaccaacggcaccaagcgguucgacaacccagugcugcccuucaacgacggcguguacuucgccagcaccgagaagucaaacaucauccggggcuggaucuucggcaccacccuggacagcaagacacagagccugcugaucgugaacaacgccaccaacguggugaucaaggugugcgaguuucaguucugcaacgaccccuuccugggcguguaccacaagaacaacaagagcuggauggagagcgaguuccggguguacagcagcgcuaacaauugcaccuucgaguacgucagccagcccuuccugauggaccucgagggcaagcagggcaacuucaagaaccugcgggaguucguguucaagaacaucgauggcuacuucaagaucuacagcaagcacacccccaucaaccuggugcgggaccugccccagggauucagcgcccuggagccucugguggaccugcccaucggcaucaacaucaccagguuccagacccugcuggcccugcaccggagcuaccugacccccggcgacagcagcagcggcuggaccgccggcgccgccgcauacuacgugggcuaccugcagccacggaccuuccugcugaaguacaacgagaacggcaccaucaccgacgccguggacugcgcccuggacccccugagcgagaccaagugcacccuaaagagcuucaccguggagaagggcaucuaccagaccagcaacuuccgggugcagcccacugagagcaucgugcgguuccccaacauuaccaaccugugucccuucggcgagguguucaacgccacccgguucgccagcguguacgccuggaaccggaagcggaucagcaacugcguggccgacuacagcgugcuguacaacagcgccagcuucagcaccuucaagugcuacggcgugagcccuaccaagcugaacgaccugugcuucaccaacguguacgcugacagcuucgugauccggggcgacgaggugcggcagaucgcccccggccagaccggcaagaucgccgacuacaacuacaagcugcccgacgacuucaccggcugcgugaucgccuggaacagcaacaaccuggacagcaaggugggcggcaacuacaacuaccuguaccggcuguuccguaagagcaaccugaagccauucgagcgggacaucagcaccgagaucuaccaggccggcagcacccccugcaacgguguggagggcuuuaacugcuacuucccccugcagagcuacggcuuccagcccaccuacggcgugggcuaccagcccuaccgggugguggugcugagcuucgagcugcugcacgcccccgccaccgugugcggcccuaaaaagagcaccaaccuggugaagaacaagugcgugaacuucaacuucaauggccugaccggcaccggcgugcugaccgagagcaacaagaaguuccugcccuuccagcaguucggccgggauaucgacgacaccaccgacgccgugcgggacccccagacccuggagauccuggacaucaccccaugcagcuucggcggcgugagcgugaucacccccggcacaaacaccagcaaccaggucgcagugcuguaccagggagugaacugcaccgaggugcccguggccauccacgccgaccagcugacccccaccuggcggguguacagcaccggcagcaacguguuccagacccgggccggcugccugaucggcgccgagcacgugaacaacuccuacgagugcgacauccccaucggcgccggcaucugcgcuagcuaccagacccagaccaacagccaccggcgggcccggagcguggccagccagagcaucaucgccuacaccaugagcuuaggcgccgagaacagcguggccuacagcaacaacagcaucgccauccccaucaacuucaccauaagcgugaccaccgagauccugccugugagcaugaccaagaccagcguggacuguaccauguacaucugcggcgacagcaccgagugcagcaaccugcugcugcaguacggcagcuucugcacccagcugaaccgggcgcugaccggcaucgccguggagcaggacaagaacacccaagagguguucgcccaggugaagcagaucuacaagaccccacccaucaaggacuucggcggcuucaacuucagccagauccugcccgaccccagcaagcccagcaagcggagcuucaucgaggaccugcuguucaacaaggugacucuggccgacgccggcuucaucaagcaguacggcgauugccugggggacaucgccgcccgggaccugaucugcgcucagaaguucaacggccugaccgugcugccuccccugcugaccgacgagaugaucgcccaguacaccagcgcccugcuugccggcaccaucaccagcggcuggaccuucggcgccggcgccgcacugcagauccccuucgccaugcagauggccuaccgguucaacggcaucggcgugacccagaacgugcuguacgagaaccagaagcugaucgccaaccaguucaacagcgccaucggcaagauccaggacagccugagcagcaccgccagcgcccugggcaagcugcaggacguggugaaccagaacgcccaggcucugaacacccuggugaagcagcugagcagcaacuucggcgccaucagcucagugcugaacgacauccuggccaggcuggacaagguggaggccgaggugcagaucgaccggcugaucaccggccggcugcagagccugcagaccuacgugacccagcagcugauccgggccgccgagauucgggccagcgccaaucuggcagccaccaagaugagcgagugcgugcugggccagagcaagcggguggacuuuugcggcaagggcuaccaccugaugagcuucccccagagcgcuccccacggcgugguguuccuccacgugaccuacgucccagcccaggagaagaacuucacaaccgcccccgccaucugccacgacggcaaggcccacuucccccgggagggaguguucgugagcaacggcacccacugguucgugacccagcggaacuucuacgagccccagaucaucaccacccacaacaccuucgugagcggcaacugcgacguggugaucggcaucgugaacaacaccguguacgacccccugcagcccgagcuggacagcuucaaggaggagcuggacaaguacuucaagaaccacaccagcccugacguggaucugggcgacaucagcggcaucaacgccagcguggugaacauccagaaggagaucgaccggcugaacgagguggccaagaaccugaacgagagccugaucgaccugcaggagcugggcaaguacgagcaguacaucaaguggcccugguacaucuggcugggcuucaucgccggccugaucgccaucgugauggugaccaucaugcugugcugcaugaccagcugcuguagcugccugaagggcugcugcagcugcggcagcugcugcaaguucgacgaggacgacagcgagcccgugcugaagggcgugaagcugcacuacaccugaggacuaguuauaagacugacuagcccgaugggccucccaacgggcccuccuccccuccuugcaccgagauuaauagaucucaaaggcucuuuucagagccaccaaaaaaaaaaaaaaaaaaaaaaaaaaaaaaaaaaaaaaaaaaaaaaaaaaaaaaaaaaaaaaaaaaaaaaaaaaaaaaaaaaaaaaaaaaaaaaaaaaaaa

SEQ ID NO: 24356 - RNA, 4041 nt, Artificial Sequence
  SARS-CoV-2/Wuhan/WIV05/2019__EPI_ISL_402128 spike protein mRNA gc (1-1273)(K417N_E484K_N501Y_D614G)
aggagaaagcuuaccauguucguguuccuggugcugcugccccuggugagcagccagugcgugaaccugaccacccggacccagcugcccccugccuacaccaacagcuucacccggggcguguacuaccccgacaagguguuccggagcagcgugcugcacagcacccaggaccuguuccugcccuucuucagcaacgugaccugguuccacgccauccacgugagcggcaccaacggcaccaagcgguucgacaacccagugcugcccuucaacgacggcguguacuucgccagcaccgagaagucaaacaucauccggggcuggaucuucggcaccacccuggacagcaagacacagagccugcugaucgugaacaacgccaccaacguggugaucaaggugugcgaguuucaguucugcaacgaccccuuccugggcguguacuaccacaagaacaacaagagcuggauggagagcgaguuccgggucuacagcagcgcuaacaauugcaccuucgaguacgugagccagcccuuccugauggaccucgagggcaagcagggcaacuucaagaaccugcgggaguucguguucaagaacaucgauggcuacuucaagaucuacagcaagcacacccccaucaaccuggugcgggaccugccccagggauucagcgcccuggagccucugguggaccugcccaucggcaucaacaucaccagguuccagacccugcuggcccugcaccggagcuaccugacccccggcgacagcagcagcggcuggaccgccggcgccgccgcauacuacgugggcuaccugcagccacggaccuuccugcugaaguacaacgagaacggcaccaucaccgacgccguggacugcgcccuggacccccugagcgagaccaagugcacccuaaagagcuucaccguggagaagggcaucuaccagaccagcaacuuccgggugcagcccacugagagcaucgugcgguuccccaacauuaccaaccugugucccuucggcgagguguucaacgccacccgguucgccagcguguacgccuggaaccggaagcggaucagcaacugcguggccgacuacagcgugcuguacaacagcgccagcuucagcaccuucaagugcuacggcgugagcccuaccaagcugaacgaccugugcuucaccaacguguacgcugacagcuucgugauccggggcgacgaggugcggcagaucgcccccggccagaccggcaacaucgccgacuacaacuacaagcugcccgacgacuucaccggcugcgugaucgccuggaacagcaacaaccuggacagcaaggugggcggcaacuacaacuaccuguaccggcuguuccguaagagcaaccugaagccauucgagcgggacaucagcaccgagaucuaccaggccggcagcacccccugcaacggugugaagggcuuuaacugcuacuucccccugcagagcuacggcuuccagcccaccuacggcgugggcuaccagcccuaccgggugguggugcugagcuucgagcugcugcacgcccccgccaccgugugcggcccuaaaaagagcaccaaccuggugaagaacaagugcgugaacuucaauuucaacggccugaccggcaccggcgugcugaccgagagcaacaagaaguuccugcccuuccagcaguucggccgggauaucgccgacaccaccgacgcagugcgggacccccagacccuggagauccuggacaucaccccaugcagcuucggcggcgugagcgucaucacccccggcacaaacaccagcaaccagguggccgugcuguaccagggagugaacugcaccgaggugcccguggccauccacgccgaccagcugacccccaccuggcggguguacagcaccggcagcaacguguuccagacccgggccggcugccugaucggcgccgagcacgugaacaacuccuacgagugcgacauccccaucggcgcuggcaucugcgccagcuaccagacccagaccaacagcccccggcgggcccggagcguggccagccagagcaucaucgccuacaccaugagcuuaggcgccgagaacagcguggccuacagcaacaacagcaucgcgaucccuaccaacuucaccaucagcgugaccaccgagauacugcccgugagcaugaccaagaccagcguggacuguaccauguacaucugcggcgacagcaccgagugcagcaaccugcugcugcaguacggcagcuucugcacccagcugaaccgggcccugaccggcaucgccguggagcaggacaagaacacccaagagguguucgcccaggugaagcagaucuacaagacucccccaaucaaggacuucggcggcuucaacuucagccagauccugcccgaccccagcaagcccagcaagcggagcuucaucgaggaccugcuguucaacaaggugacccuggccgacgccggcuucaucaagcaguacggcgacugccugggggauaucgccgcucgggaccugaucugcgcccagaaguucaacggccugaccgugcugcccccucugcugaccgacgagaugaucgcccaguacaccagcgcccugcuugccggcaccaucaccagcggcuggaccuucggcgccggcgcagcccugcagauccccuucgccaugcagauggccuaccgguucaacggcaucggcgugacccagaacgugcuguacgagaaccagaagcugaucgccaaccaguucaacagcgccaucggcaagauccaggacagccugagcagcaccgccagcgcccugggcaagcugcaggacguggugaaccagaacgcucaggcccugaacacccuggugaagcagcugagcagcaacuucggcgccaucagcucagugcugaaugacauccugagcaggcuggacaagguggaggccgaggugcagaucgaccggcugaucaccggccggcugcagagccugcagaccuacgugacccagcagcugauccgggccgccgagauccgggccagcgccaaccuggcagccaccaagaugagcgagugcgugcugggccagagcaagcggguggacuuuugcggcaagggcuaccaccugaugagcuucccccagagcgccccacacggcgugguguuccuccacgucacauacgugcccgcccaggagaagaacuucaccaccgcccccgccauuugccacgacggcaaggcucacuucccccgggagggaguguucgugagcaacggcacccacugguucgugacccagcggaacuucuacgagccccagaucaucaccaccgacaacaccuucgugagcggcaacugcgacguggugaucggcaucgugaacaacaccguguacgacccccugcagccugagcuggacagcuucaaggaggagcuggacaaguacuucaagaaccacaccagccccgacguggaucugggcgacaucagcggcaucaacgccagcguggugaacauccagaaggagaucgaccggcugaacgagguggccaagaaccugaacgagagccugaucgaccugcaggagcugggcaaguacgagcaguacaucaaguggcccugguacaucuggcugggcuucaucgccggccugaucgccaucgugauggugaccaucaugcugugcugcaugaccagcugcuguagcugccugaagggcugcugcagcugcggcagcugcugcaaguucgacgaggacgacagcgagccagugcugaagggcgugaagcugcacuacaccugaggacuaguuauaagacugacuagcccgaugggccucccaacgggcccuccuccccuccuugcaccgagauuaauagaucucaaaggcucuuuucagagccaccaaaaaaaaaaaaaaaaaaaaaaaaaaaaaaaaaaaaaaaaaaaaaaaaaaaaaaaaaaaaaaaaaaaaaaaaaaaaaaaaaaaaaaaaaaaaaaaaaaaaa

SEQ ID NO: 24357 - RNA, 4032 nt, Artificial Sequence
  SARS-CoV-2/Wuhan/WIV05/2019__EPI_ISL_402128 spike protein mRNA gc (1-1273)(L18F_D80A_D215G_L242del_A243del_L244del_R246I_K417N_E484 K_N501Y_D614G_A701V)
aggagaaagcuuaccauguucguguuccuggugcugcugccccuggugagcagccagugcgugaacuucaccacccggacccagcugcccccugccuacaccaacagcuucacccggggcguguacuaccccgacaagguguuccggagcagcgugcugcacagcacccaggaccuguuccugcccuucuucagcaacgugaccugguuccacgccauccacgugagcggcaccaacggcaccaagcgguucgccaacccagugcugcccuucaacgacggcguguacuucgccagcaccgagaagucaaacaucauccggggcuggaucuuuggcaccacccuggacagcaagacacagagccugcugaucgugaacaacgcuaccaacguggugaucaaggugugcgaguuccaguucugcaacgaccccuuccugggcguguacuaccacaagaacaacaagagcuggauggagagcgaguuccgggucuacagcagcgccaacaauugcaccuucgaguacgugagccagcccuuccugauggaccuggagggcaagcagggcaacuucaagaaccuccgggaguucguguucaagaacaucgacggcuacuucaagaucuacagcaagcacacccccaucaaccuggugcggggacugccccagggcuucagcgcccuggagccucugguggaucugcccaucggcaucaacaucaccagguuccagacccugcacaucagcuaccugacccccggcgacagcagcagcggcuggaccgccggcgccgccgcauacuacgugggcuaccugcagccacggaccuuccugcugaaguacaacgagaacggcaccaucaccgacgccguggacugcgcccuggacccccugagcgagaccaagugcacccuuaagagcuucaccguggagaagggcaucuaccagaccagcaacuuccgggugcagcccacugagagcauugugcgguuccccaacaucaccaaccugugucccuucggcgagguguucaacgccacccgguucgccagcguguacgccuggaaccggaagcggaucagcaacugcguggccgacuacagcgugcuguacaacagcgccagcuucagcaccuucaagugcuacggcgugagcccuaccaagcugaacgaccugugcuucaccaacguguacgcugacagcuucgugauccggggcgacgaggugcggcagaucgcccccggccagaccggcaacaucgccgacuacaacuacaagcugcccgacgacuucaccggcugcgugaucgccuggaacagcaacaaccuggacagcaaggugggcggcaacuacaacuaccuguaccggcuauuccguaagagcaaccugaagccauuugagcgggacaucagcaccgagaucuaccaggccgguagcacccccugcaacggcgugaagggcuucaacugcuacuucccccugcagagcuacggcuuccagcccaccuacggcgugggcuaccagcccuaccgggugguggugcugagcuucgagcugcugcacgcccccgccaccgugugcggcccuaaaaagagcaccaaccuggugaagaacaagugcgugaacuucaauuucaacggccugaccggcaccggcgugcugaccgagagcaacaagaaguuccugcccuuccagcaguucggccgggacaucgccgacaccaccgaugcagugcgggacccccagacccuggagauccuggacaucaccccaugcagcuucggcggcgugagcgucaucacccccggaacaaacaccagcaaccagguggccgugcuguaccagggcgugaacugcaccgaggugcccguggccauccacgccgaccagcugacccccaccuggcggguguacagcaccggcagcaacguguuccagacccgggccggcugccugaucggcgccgagcacgugaacaacuccuacgagugcgacauccccaucggcgcuggcaucugcgccagcuaccagacccagaccaacagcccccggcgggcccggagcguggccagccagagcaucaucgccuacaccaugagccugggcguggagaacagcguggccuacagcaacaacagcaucgccaucccuaccaacuucaccauaagcgugaccaccgagauccugcccgugagcaugaccaagaccagcguggacuguaccauguacaucugcggcgacagcaccgagugcagcaaccuguuacugcaguacggcagcuucugcacccagcugaaccgggcgcugaccggcaucgccguggagcaggacaagaacacccaagagguguucgcccaggugaagcagaucuacaagacucccccaaucaaggacuucggcggcuucaacuucagccagauccugcccgaccccagcaagcccagcaagcggagcuucaucgaggaccugcuguucaacaaggugacccuggccgacgccggcuucaucaagcaguacggggacugccugggcgacaucgccgcccgggaccugaucugcgcucagaaguucaacggccugaccgugcugcccccucugcugaccgaugagaugaucgcccaguacaccagcgcccugcuggccggcaccaucaccagcggcuggaccuucggcgccggcgccgcacugcagauccccuucgccaugcagauggccuaccgguucaacggcaucggcgugacccagaacgugcuguacgagaaccagaagcugaucgccaaccaguucaacagcgccaucggcaagauccaggacagccugagcagcaccgccagcgcccugggcaagcugcaggacguggugaaccagaacgcccaggcucugaacacccuggugaagcagcugagcagcaacuuuggcgccaucagcucagugcugaaugacauccugagccggcuggacaagguggaggccgaggugcagaucgacaggcugaucaccggccggcugcagagccugcagaccuacgugacccagcagcugauccgggccgccgagauucgggccagcgccaaccuggccgcaaccaagaugagcgagugcgugcugggccagagcaagcggguggacuucugcggcaagggcuaccaccugaugagcuucccccagagcgccccacacggcguggucuuccugcacgugacauacgugcccgcccaggagaagaacuucaccaccgcccccgccaucugccacgacggaaaggcccacuucccccgggagggcguguucgugagcaacggcacccacugguucgugacccagcggaacuucuacgagccccagaucaucaccaccgacaacaccuucgugagcggcaacugcgacguggugaucggcaucgugaacaacaccguguacgacccccugcagccugagcuggacagcuucaaggaggagcucgacaaguacuucaagaaccacaccagccccgacguggaccugggcgacaucagcggcaucaacgcuagcguggugaacauccagaaggagaucgaucggcugaacgagguggccaagaaccugaacgagagccugaucgaccugcaggagcugggcaaguacgagcaguacaucaaguggcccugguacaucuggcugggcuucaucgccggccugaucgccaucgugauggugaccaucaugcugugcugcaugaccagcugcuguagcugccugaagggcugcugcagcugcggcagcugcugcaaguucgacgaggacgacagcgagccagugcugaagggcgugaagcugcacuacaccugaggacuaguuauaagacugacuagcccgaugggccucccaacgggcccuccuccccuccuugcaccgagauuaauagaucucaaaggcucuuuucagagccaccaaaaaaaaaaaaaaaaaaaaaaaaaaaaaaaaaaaaaaaaaaaaaaaaaaaaaaaaaaaaaaaaaaaaaaaaaaaaaaaaaaaaaaaaaaaaaaaaaaaaa

SEQ ID NO: 24358 - RNA, 4041 nt, Artificial Sequence
  SARS-CoV-2/Wuhan/WIV05/2019__EPI_ISL_402128 spike protein mRNA gc (1-1273)(E484K_D614G)
aggagaaagcuuaccauguucguguuccuggugcugcugccccuggugagcagccagugcgugaaccugaccacccggacccagcugcccccugccuacaccaacagcuucacccggggcguguacuaccccgacaagguguuccggagcagcgugcugcacagcacccaggaccuguuccugcccuucuucagcaacgugaccugguuccacgccauccacgugagcggcaccaacggcaccaagcgguucgacaacccagugcugcccuucaacgacggcguguacuucgccagcaccgagaagucaaacaucauccggggcuggaucuucggcaccacccuggacagcaagacacagagccugcugaucgugaacaacgccaccaacguggugaucaaggugugcgaguuucaguucugcaacgaccccuuccugggcguguacuaccacaagaacaacaagagcuggauggagagcgaguuccgggucuacagcagcgcuaacaauugcaccuucgaguacgugagccagcccuuccugauggaccucgagggcaagcagggcaacuucaagaaccugcgggaguucguguucaagaacaucgauggcuacuucaagaucuacagcaagcacacccccaucaaccuggugcgggaccugccccagggauucagcgcccuggagccucugguggaccugcccaucggcaucaacaucaccagguuccagacccugcuggcccugcaccggagcuaccugacccccggcgacagcagcagcggcuggaccgccggcgccgccgcauacuacgugggcuaccugcagccacggaccuuccugcugaaguacaacgagaacggcaccaucaccgacgccguggacugcgcccuggacccccugagcgagaccaagugcacccuaaagagcuucaccguggagaagggcaucuaccagaccagcaacuuccgggugcagcccacugagagcaucgugcgguuccccaacauuaccaaccugugucccuucggcgagguguucaacgccacccgguucgccagcguguacgccuggaaccggaagcggaucagcaacugcguggccgacuacagcgugcuguacaacagcgccagcuucagcaccuucaagugcuacggcgugagcccuaccaagcugaacgaccugugcuucaccaacguguacgcugacagcuucgugauccggggcgacgaggugcggcagaucgcccccggccagaccggcaagaucgccgacuacaacuacaagcugcccgacgacuucaccggcugcgugaucgccuggaacagcaacaaccuggacagcaaggugggcggcaacuacaacuaccuguaccggcuguuccguaagagcaaccugaagccauucgagcgggacaucagcaccgagaucuaccaggccggcagcacccccugcaacggugugaagggcuuuaacugcuacuucccccugcagagcuacggcuuccagcccaccaacggcgugggcuaccagcccuaccgggugguggugcugagcuucgagcugcugcacgcccccgccaccgugugcggcccuaaaaagagcaccaaccuggugaagaacaagugcgugaacuucaauuucaacggccugaccggcaccggcgugcugaccgagagcaacaagaaguuccugcccuuccagcaguucggccgggauaucgccgacaccaccgacgcagugcgggacccccagacccuggagauccuggacaucaccccaugcagcuucggcggcgugagcgucaucacccccggcacaaacaccagcaaccagguggccgugcuguaccagggagugaacugcaccgaggugcccguggccauccacgccgaccagcugacccccaccuggcggguguacagcaccggcagcaacguguuccagacccgggccggcugccugaucggcgccgagcacgugaacaacuccuacgagugcgacauccccaucggcgcuggcaucugcgccagcuaccagacccagaccaacagcccccggcgggcccggagcguggccagccagagcaucaucgccuacaccaugagcuuaggcgccgagaacagcguggccuacagcaacaacagcaucgcgaucccuaccaacuucaccaucagcgugaccaccgagauacugcccgugagcaugaccaagaccagcguggacuguaccauguacaucugcggcgacagcaccgagugcagcaaccugcugcugcaguacggcagcuucugcacccagcugaaccgggcccugaccggcaucgccguggagcaggacaagaacacccaagagguguucgcccaggugaagcagaucuacaagacucccccaaucaaggacuucggcggcuucaacuucagccagauccugcccgaccccagcaagcccagcaagcggagcuucaucgaggaccugcuguucaacaaggugacccuggccgacgccggcuucaucaagcaguacggcgacugccugggggauaucgccgcucgggaccugaucugcgcccagaaguucaacggccugaccgugcugcccccucugcugaccgacgagaugaucgcccaguacaccagcgcccugcuugccggcaccaucaccagcggcuggaccuucggcgccggcgcagcccugcagauccccuucgccaugcagauggccuaccgguucaacggcaucggcgugacccagaacgugcuguacgagaaccagaagcugaucgccaaccaguucaacagcgccaucggcaagauccaggacagccugagcagcaccgccagcgcccugggcaagcugcaggacguggugaaccagaacgcucaggcccugaacacccuggugaagcagcugagcagcaacuucggcgccaucagcucagugcugaaugacauccugagcaggcuggacaagguggaggccgaggugcagaucgaccggcugaucaccggccggcugcagagccugcagaccuacgugacccagcagcugauccgggccgccgagauccgggccagcgccaaccuggcagccaccaagaugagcgagugcgugcugggccagagcaagcggguggacuuuugcggcaagggcuaccaccugaugagcuucccccagagcgccccacacggcgugguguuccuccacgucacauacgugcccgcccaggagaagaacuucaccaccgcccccgccauuugccacgacggcaaggcucacuucccccgggagggaguguucgugagcaacggcacccacugguucgugacccagcggaacuucuacgagccccagaucaucaccaccgacaacaccuucgugagcggcaacugcgacguggugaucggcaucgugaacaacaccguguacgacccccugcagccugagcuggacagcuucaaggaggagcuggacaaguacuucaagaaccacaccagccccgacguggaucugggcgacaucagcggcaucaacgccagcguggugaacauccagaaggagaucgaccggcugaacgagguggccaagaaccugaacgagagccugaucgaccugcaggagcugggcaaguacgagcaguacaucaaguggcccugguacaucuggcugggcuucaucgccggccugaucgccaucgugauggugaccaucaugcugugcugcaugaccagcugcuguagcugccugaagggcugcugcagcugcggcagcugcugcaaguucgacgaggacgacagcgagccagugcugaagggcgugaagcugcacuacaccugaggacuaguuauaagacugacuagcccgaugggccucccaacgggcccuccuccccuccuugcaccgagauuaauagaucucaaaggcucuuuucagagccaccaaaaaaaaaaaaaaaaaaaaaaaaaaaaaaaaaaaaaaaaaaaaaaaaaaaaaaaaaaaaaaaaaaaaaaaaaaaaaaaaaaaaaaaaaaaaaaaaaaaaa

SEQ ID NO: 24359 - RNA, 4041 nt, Artificial Sequence
  SARS-CoV-2/Wuhan/WIV05/2019__EPI_ISL_402128 spike protein mRNA gc (1-1273)(L18F_T20N_P26S_D138Y_R190S_K417T_E484K_N501Y_D614G_H655Y _T1027I)
aggagaaagcuuaccauguucguguuccuggugcugcugccccuggugagcagccagugcgugaacuucaccaaccggacccagcugcccagcgccuacaccaacagcuucacccggggcguguacuacccugacaagguguuccggagcagcgugcugcacagcacccaggaccuguuccugcccuucuucagcaacgugaccugguuccacgccauccacgugagcggcaccaacggcaccaagcgguucgacaaccccgugcugccauucaacgacggcguguacuucgccagcaccgagaagucaaacaucauccggggcuggaucuuuggcaccacccuggacagcaagacccagagccugcugaucgugaacaacgccacaaacguggugaucaaggugugcgaguuccaguucugcaacuaccccuuccugggcguguacuaccacaagaacaacaagagcuggauggagagcgaguuccgggucuacagcagcgcuaauaacugcaccuucgaguacgugagccagcccuuccugauggaccuggagggcaagcagggcaacuucaagaaccucagcgaguucguguucaagaacaucgacggcuacuucaagaucuacagcaagcacacccccaucaaccuggugcgggaucugccccagggauucagcgcccuggagccccugguggaccugccuaucggcaucaacaucacccgguuccagacccugcuggcccugcacaggagcuaccugacccccggcgacagcagcagcggcuggaccgccggcgccgccgcauacuacgugggcuaccugcagccccggaccuuccugcugaaguacaacgagaacggcaccaucaccgacgccguggacugcgcccuggacccacugagcgagaccaagugcacccuaaagagcuucaccguggagaagggcaucuaccagaccagcaacuuccgggugcagcccaccgagagcaucgugcgguuccccaacauuacuaaccugugucccuucggcgagguguucaacgccacccgguucgccagcguguacgccuggaaccggaagcggaucagcaacugcguggccgacuacagcgugcuguacaacagcgccagcuucagcaccuucaagugcuacggcgugagccccaccaagcugaacgaccugugcuucaccaacguguacgcugacagcuucgugauccggggcgacgaggugcggcagaucgccccuggccagaccggcaccaucgccgacuacaacuacaagcugcccgacgacuucaccggcugcgugaucgccuggaacagcaacaaccuggacagcaaggugggcggcaacuacaacuaccuguaccggcuguuccguaagagcaaccugaagcccuuugagcgggacaucagcaccgagaucuaccaggccggcagcaccccaugcaacggugugaagggcuucaacugcuacuucccccugcagagcuacggcuuccagcccaccuacggcgugggcuaccagcccuaccgggugguggugcugagcuucgagcugcugcacgcccccgccaccgugugcggccccaaaaagagcaccaaccuggugaagaacaagugcgugaacuucaauuucaacggccugaccggcaccggcgugcugaccgagagcaacaagaaguuccugccuuuccagcaguucggccgggacaucgccgauaccaccgacgcagugcgggacccccagacccuggagauccuggacaucacccccugcagcuucggcggcgugagcgucaucaccccaggcacaaacaccagcaaccagguggccgugcuguaccagggagugaacugcaccgaggugcccguggccauccacgccgaccagcugacccccaccuggcggguguacuccaccggcagcaacguguuccagacccgggccggcugccugaucggcgccgaguacgugaacaacagcuacgagugcgacauccccaucggcgcuggcaucugcgccagcuaccagacccagaccaacagcccccggcgggcccggagcguggccagccagagcaucaucgccuacaccaugagccugggcgccgagaacagcguggccuacagcaacaacagcaucgcgauccccaccaacuucaccaucagcgugaccaccgagauauuaccugugagcaugaccaagaccagcguggacuguaccauguacaucugcggcgacagcaccgagugcagcaaccugcugcugcaguacggcagcuucugcacccagcugaaccgggcccugaccggcaucgccguggagcaggacaagaacacccaagagguguucgcccaggugaagcagaucuacaagacuccacccaucaaggacuucggcggcuucaacuucagccagauccugcccgaccccagcaagcccagcaagcggagcuucaucgaggaccugcuguucaacaaggugacccuggccgacgccggcuucaucaagcaguacggcgacugccugggggacaucgccgcucgggaucugaucugcgcccagaaguucaacggccugaccgugcugccuccccugcugaccgacgagaugaucgcccaguacaccagcgcccugcuggccggcaccaucaccagcggcuggaccuucggcgccggcgcagcccuucagauccccuucgccaugcagauggccuaccgguucaacggcaucggcgugacccagaacgugcuguacgagaaccagaagcugaucgccaaccaguucaacagcgccaucggcaagauccaggacagccugagcagcaccgccagcgcccugggcaagcugcaggacguggugaaccagaacgcucaggcccugaacacccuggugaagcagcugagcucaaacuuuggcgccaucagcagcgugcugaaugacauccugagccggcuggacaagguggaggccgaggugcagaucgacaggcugaucaccggccggcugcagagccugcagaccuacgugacccagcagcugauccgggccgccgagauccgggccagcgccaaccuggcagccauuaagaugagcgagugcgugcugggccagagcaagcggguggacuucugcggcaagggcuaccaccugaugagcuucccccagagcgcuccccacggcgugguguuccugcacgucaccuacgugccagcccaggagaagaacuucacaaccgcccccgccaucugccacgacggcaaggcccacuucccccgggagggaguguucgugagcaacggcacccacugguucgugacccagcggaacuucuacgagccccagaucaucaccaccgacaacaccuucgugagcggcaacugcgacguggugaucggcaucgugaacaacaccguguacgacccccuccagcccgagcuggacagcuucaaggaggagcuggacaaguacuucaagaaccacaccagcccugacguggaccugggcgauaucagcggcaucaacgccagcguggugaacauccagaaggagaucgaccggcugaacgagguggccaagaaccugaacgagagccugaucgaccugcaggagcugggcaaguacgagcaguacaucaaguggcccugguacaucuggcugggcuucaucgccggccugaucgccaucgugauggugaccaucaugcugugcugcaugaccagcugcuguagcugccugaagggcugcugcagcugcggcagcugcugcaaguucgacgaggacgacagcgagcccgugcugaagggcgugaagcugcacuacaccugaggacuaguuauaagacugacuagcccgaugggccucccaacgggcccuccuccccuccuugcaccgagauuaauagaucucaaaggcucuuuucagagccaccaaaaaaaaaaaaaaaaaaaaaaaaaaaaaaaaaaaaaaaaaaaaaaaaaaaaaaaaaaaaaaaaaaaaaaaaaaaaaaaaaaaaaaaaaaaaaaaaaaaaa

SEQ ID NO: 24360 - RNA, 4041 nt, Artificial Sequence
  SARS-CoV-2/Wuhan/WIV05/2019__EPI_ISL_402128 spike protein mRNA gc (1-1273)(S13I_W152C_L452R_D614G)
aggagaaagcuuaccauguucguguuccuggugcugcugccccuggugagcauccagugcgugaaccugaccacccggacccagcugcccccugccuacaccaacagcuucacccggggcguguacuaccccgacaagguguuccggagcagcgugcugcacagcacccaggaccuguuccugcccuucuucagcaacgugaccugguuccacgccauccacgugagcggcaccaacggcaccaagcgguucgacaacccagugcugcccuucaacgacggcguguacuucgccagcaccgagaagucaaacaucauccggggcuggaucuucggcaccacccuggacagcaagacacagagccugcugaucgugaacaacgccaccaacguggugaucaaggugugcgaguuucaguucugcaacgaccccuuccugggcguguacuaccacaagaacaacaagagcugcauggagagcgaguuccgggucuacagcagcgcuaacaauugcaccuucgaguacgugagccagcccuuccugauggaccucgagggcaagcagggcaacuucaagaaccugcgggaguucguguucaagaacaucgauggcuacuucaagaucuacagcaagcacacccccaucaaccuggugcgggaccugccccagggauucagcgcccuggagccucugguggaccugcccaucggcaucaacaucaccagguuccagacccugcuggcccugcaccggagcuaccugacccccggcgacagcagcagcggcuggaccgccggcgccgccgcauacuacgugggcuaccugcagccacggaccuuccugcugaaguacaacgagaacggcaccaucaccgacgccguggacugcgcccuggacccccugagcgagaccaaguguacccuaaagagcuucaccguggagaagggcaucuaccagaccagcaacuuccgggugcagcccacugagagcauugugcgguuccccaacaucaccaaccugugccccuucggcgagguguucaacgccacccgguucgccagcguguacgccuggaaccggaagcggaucagcaacugcguggccgacuacagcgugcuguacaacagcgccagcuucagcaccuucaagugcuacggcgugagcccuaccaagcugaacgaccugugcuucaccaacguguacgcugacagcuucgugauccggggcgacgaggugcggcagaucgcccccggccagaccggcaagaucgccgacuacaacuacaagcugcccgacgacuucaccggcugcgugaucgccuggaacagcaacaaccuggacagcaaggugggcggcaacuacaacuaccgguaccggcuguuccguaagagcaaccugaagccauucgagcgggacaucagcaccgagaucuaccaggccggcagcacccccugcaacgguguggagggcuuuaacugcuacuucccccugcagagcuacggcuuccagcccaccaacggcgugggcuaccagcccuaccgggugguggugcugagcuucgagcugcugcacgcccccgccaccgugugcggcccuaaaaagagcaccaaccuggugaagaacaagugcgugaacuucaauuucaacggccugaccggcaccggcgugcugaccgagagcaacaagaaguuccugcccuuccagcaguucggccgggauaucgccgacaccaccgacgcagugcgggacccccagacccuggagauccuggacaucaccccaugcagcuucggcggcgugagcgucaucacccccggcacaaacaccagcaaccagguggccgugcuguaccagggagugaacugcaccgaggugcccguggccauccacgccgaccagcugacccccaccuggcggguguacagcaccggcagcaacguguuccagacccgggccggcugccugaucggcgccgagcacgugaacaacagcuacgagugcgacauccccaucggcgcuggcaucugugccuccuaccagacccagaccaacagcccccggcgggcccggagcguggccagccagagcaucaucgccuacaccaugagccugggcgccgagaacagcguggccuacagcaacaacagcaucgcgaucccuaccaacuucaccauaagcgugaccaccgagaucuuacccgugagcaugaccaagaccagcguggacugcaccauguacaucugcggcgacagcaccgagugcagcaaccugcugcugcaguacggcagcuucugcacccagcugaaccgggcccugaccggcaucgccguggagcaggacaagaacacccaagagguguucgcccaggugaagcagaucuacaagacucccccaaucaaggacuucggcggcuucaacuucagccagauccugcccgaccccagcaagcccagcaagcggagcuucaucgaggaccugcuguucaacaaggugacccuggccgacgccggcuucaucaagcaguacggcgacugccugggggauaucgccgcucgggaccugaucugcgcccagaaguucaacggccugaccgugcugcccccucugcugaccgacgagaugaucgcccaguacaccagcgcccugcuggccggcaccaucaccagcggcuggaccuucggcgccggcgcagcccuucagauccccuucgccaugcagauggccuacagguucaacggcaucggcgugacccagaacgugcuguacgagaaccagaagcugaucgccaaccaguucaacagcgccaucggcaagauccaggacagccugagcagcaccgccagcgcccugggcaagcugcaggacguggugaaccagaacgcucaggcccugaacacccuggugaagcagcugagcagcaacuucggcgccaucagcagcgugcugaaugacauccugucacggcuggacaagguggaggccgaggugcagaucgaccggcugaucaccggccggcugcagagccugcagaccuacgugacccagcagcugauccgggccgccgagauucgggccagcgccaaccuggcagccaccaagaugagcgagugcgugcugggccagagcaagcggguggacuuuugcggcaagggcuaccaccugaugagcuucccccagagcgccccacacggcgugguguuccugcacgucacauacgugcccgcccaggagaagaacuucaccaccgcccccgccaucugccacgacggcaaggcucacuucccccgggagggaguguucgugagcaacggcacccacugguucgugacccagcggaacuucuacgagccccagaucaucaccaccgacaacaccuucgugagcggcaacugcgacguggugaucggcaucgugaacaacaccguguacgacccccuccagccugagcuggacagcuucaaggaggagcuggacaaguacuucaagaaccacaccagccccgacguggaucugggcgacaucagcggcaucaacgccagcguggugaacauccagaaggagaucgaccggcugaacgagguggccaagaaccugaacgagagccugaucgaccugcaggagcugggcaaguacgagcaguacaucaaguggcccugguacaucuggcugggcuucaucgccggccugaucgccaucgugauggugaccaucaugcugugcugcaugaccagcuguugcagcugccugaagggcugcugcagcugcggcagcugcugcaaguucgacgaggacgacagcgagccagugcugaagggcgugaagcugcacuacaccugaggacuaguuauaagacugacuagcccgaugggccucccaacgggcccuccuccccuccuugcaccgagauuaauagaucucaaaggcucuuuucagagccaccaaaaaaaaaaaaaaaaaaaaaaaaaaaaaaaaaaaaaaaaaaaaaaaaaaaaaaaaaaaaaaaaaaaaaaaaaaaaaaaaaaaaaaaaaaaaaaaaaaaaa

SEQ ID NO: 24361 - RNA, 4041 nt, Artificial Sequence
  SARS-CoV-2/Wuhan/WIV05/2019__EPI_ISL_402128 spike protein mRNA gc mod (1-1273)
aggagaaagcuuaccauguucguguuucuggugcugcugccccugguguccagccagugugugaaccugaccaccagaacacagcugccuccagccuacaccaacagcuucaccagaggcguguacuaccccgacaagguguucagauccagcgugcugcacucuacccaggaccuguuccugccuuucuucagcaacgugaccugguuccacgccauccacguguccggcaccaauggcaccaagagauucgacaaccccgugcugcccuucaacgacgggguguacuuugccagcaccgagaaguccaacaucaucagaggcuggaucuucggcaccacacuggacagcaagacccagagccugcugaucgugaacaacgccaccaacguggucaucaaagugugcgaguuccaguucugcaacgaccccuuccugggcgucuacuaccacaagaacaacaagagcuggauggaaagcgaguuccggguguacagcagcgccaacaacugcaccuucgaguacgugucccagccuuuccugauggaccuggaaggcaagcagggcaacuucaagaaccugcgcgaguucguguucaagaacaucgacggcuacuucaaaaucuacagcaagcacaccccuaucaaccucgugcgggaucugccucagggcuucucugcucuggaaccccugguggaucugcccaucggcaucaacaucacccgguuucagacacugcuggcccugcacagaagcuaccugacaccuggcgauagcagcagcggauggacagcuggugccgccgcuuacuaugugggcuaccugcagccuagaaccuuccugcugaaguacaacgagaacggcaccaucaccgacgccguggauugugcucuggauccucugagcgagacaaagugcacccugaaguccuucaccguggaaaagggcaucuaccagaccagcaacuuccgggugcagcccaccgaauccaucgugcgguuccccaauaucaccaaucugugccccuucggcgagguguucaaugccaccagauucgccucuguguacgccuggaaccggaagcggaucagcaauugcguggccgacuacuccgugcuguacaacuccgccagcuucagcaccuucaagugcuacggcguguccccuaccaagcugaacgaccugugcuucacaaacguguacgccgacagcuucgugauccggggagaugaagugcggcagauugccccuggacagacaggcaagaucgccgacuacaacuacaagcugcccgacgacuucaccggcugugugauugccuggaacagcaacaaccuggacuccaaagucggcggcaacuacaauuaccuguaccggcuguuccggaaguccaaucugaagcccuucgagcgggacaucagcaccgaaaucuaucaggccggcagcaccccuugcaacggcguggaaggcuucaacugcuacuucccacugcaguccuacggcuuucagcccacaaauggcgugggcuaucagcccuacagagugguggugcugagcuucgaacugcugcaugcuccugccacagugugcggcccuaagaaaagcaccaaucucgugaagaacaaaugcgugaacuucaacuucaacggccugaccggcaccggcgugcugacagagagcaacaagaaguuccugccauuccagcaguuuggccgggauaucgccgauaccacagacgccguuagagauccccagacacuggaaauccuggacaucaccccaugcagcuucggcggagugucugugaucaccccuggcaccaacaccagcaaucagguggcagugcuguaccaggacgugaacuguaccgaagugcccguggccauucacgccgaucagcugacaccuacauggcggguguacuccaccggcagcaauguguuucagaccagagccggcugucugaucggagccgagcacgugaacaauagcuacgagugcgacauccccaucggcgcuggcaucugugccagcuaccagacacagacaaacagccccagacgggcuagaagcguggccagccagagcaucauugccuacacaaugucucugggcgccgagaacagcguggccuacuccaacaacucuaucgcuauccccaccaacuucaccaucagcgugaccaccgagauccugccuguguccaugaccaagaccagcguggacugcaccauguacaucugcggcgauuccaccgagugcuccaaccugcugcugcaguacggcagcuucugcacccagcugaauagagcccugacagggaucgccguggaacaggacaagaacacccaagagguguucgcccaagugaagcaaaucuacaagaccccuccuaucaaggacuucggcggcuucaauuucagccagauucugcccgauccuagcaagcccagcaagcggagcuucaucgaggaccugcuguucaacaaagugacacuggccgacgccggcuucaucaagcaguauggcgauugucugggcgacauugccgccagggaucugauuugcgcccagaaguuuaacggacugacagugcugccuccucugcugaccgaugagaugaucgcccaguacacaucugcccugcuggccggcacaaucacaagcggcuggacauuuggagcuggcgccgcucugcagauccccuuugcuaugcagauggccuaccgguucaacggcaucggagugacccagaaugugcuguacgagaaccagaagcugaucgccaaccaguucaacagcgccaucggcaagauccaggacagccugagcagcacagcaagcgcccugggaaagcugcaggacguggucaaccagaaugcccaggcacugaacacccuggucaagcagcuguccuccaacuucggcgccaucagcucugugcugaacgauauccugagcagacuggacaaggucgaggccgaggugcagaucgacagacugaucacaggcagacugcagagccuccagacauacgugacccagcagcugaucagagccgccgagauuagagccucugccaaucuggccgccaccaagaugucugagugugugcugggccagagcaagagaguggacuuuugcggcaagggcuaccaccugaugagcuucccucagucugccccucacggcgugguguuucugcacgugacauaugugcccgcucaagagaagaauuucaccaccgcuccagccaucugccacgacggcaaagcccacuuuccuagagaaggcguguucguguccaacggcacccauugguucgugacacagcggaacuucuacgagccccagaucaucaccaccgacaacaccuucgugucuggcaacugcgacguugugaucggcauugugaacaauaccguguacgacccucugcagcccgagcuggacagcuucaaagaggaacuggacaaguacuuuaagaaccacacaagccccgacguggaccugggcgauaucagcggaaucaaugccagcgucgugaacauccagaaagagaucgaccggcugaacgagguggccaagaaucugaacgagagccugaucgaccugcaagaacuggggaaguacgagcaguacaucaaguggcccugguacaucuggcugggcuuuaucgccggacugauugccaucgugauggucacaaucaugcuguguugcaugaccagcugcuguagcugccugaagggcuguuguagcuguggcagcugcugcaaguucgacgaggacgauucugagcccgugcugaagggcgugaaacugcacuacaccugaggacuaguuauaagacugacuagcccgaugggccucccaacgggcccuccuccccuccuugcaccgagauuaauagaucucaaaggcucuuuucagagccaccaaaaaaaaaaaaaaaaaaaaaaaaaaaaaaaaaaaaaaaaaaaaaaaaaaaaaaaaaaaaaaaaaaaaaaaaaaaaaaaaaaaaaaaaaaaaaaaaaaaaa

SEQ ID NO: 24362 - RNA, 4041 nt, Artificial Sequence
  SARS-CoV-2/Wuhan/WIV05/2019__EPI_ISL_402128 spike protein mRNA gc mod (1-1273)(D614G)
aggagaaagcuuaccauguucguguuucuggugcugcugccccugguguccagccagugugugaaccugaccaccagaacacagcugccuccagccuacaccaacagcuucaccagaggcguguacuaccccgacaagguguucagauccagcgugcugcacucuacccaggaccuguuccugccuuucuucagcaacgugaccugguuccacgccauccacguguccggcaccaauggcaccaagagauucgacaaccccgugcugcccuucaacgacgggguguacuuugccagcaccgagaaguccaacaucaucagaggcuggaucuucggcaccacacuggacagcaagacccagagccugcugaucgugaacaacgccaccaacguggucaucaaagugugcgaguuccaguucugcaacgaccccuuccugggcgucuacuaccacaagaacaacaagagcuggauggaaagcgaguuccggguguacagcagcgccaacaacugcaccuucgaguacgugucccagccuuuccugauggaccuggaaggcaagcagggcaacuucaagaaccugcgcgaguucguguucaagaacaucgacggcuacuucaaaaucuacagcaagcacaccccuaucaaccucgugcgggaucugccucagggcuucucugcucuggaaccccugguggaucugcccaucggcaucaacaucacccgguuucagacacugcuggcccugcacagaagcuaccugacaccuggcgauagcagcagcggauggacagcuggugccgccgcuuacuaugugggcuaccugcagccuagaaccuuccugcugaaguacaacgagaacggcaccaucaccgacgccguggauugugcucuggauccucugagcgagacaaagugcacccugaaguccuucaccguggaaaagggcaucuaccagaccagcaacuuccgggugcagcccaccgaauccaucgugcgguuccccaauaucaccaaucugugccccuucggcgagguguucaaugccaccagauucgccucuguguacgccuggaaccggaagcggaucagcaauugcguggccgacuacuccgugcuguacaacuccgccagcuucagcaccuucaagugcuacggcguguccccuaccaagcugaacgaccugugcuucacaaacguguacgccgacagcuucgugauccggggagaugaagugcggcagauugccccuggacagacaggcaagaucgccgacuacaacuacaagcugcccgacgacuucaccggcugugugauugccuggaacagcaacaaccuggacuccaaagucggcggcaacuacaauuaccuguaccggcuguuccggaaguccaaucugaagcccuucgagcgggacaucagcaccgaaaucuaucaggccggcagcaccccuugcaacggcguggaaggcuucaacugcuacuucccacugcaguccuacggcuuucagcccacaaauggcgugggcuaucagcccuacagagugguggugcugagcuucgaacugcugcaugcuccugccacagugugcggcccuaagaaaagcaccaaucucgugaagaacaaaugcgugaacuucaacuucaacggccugaccggcaccggcgugcugacagagagcaacaagaaguuccugccauuccagcaguuuggccgggauaucgccgauaccacagacgccguuagagauccccagacacuggaaauccuggacaucaccccaugcagcuucggcggagugucugugaucaccccuggcaccaacaccagcaaucagguggcagugcuguaccagggcgugaacuguaccgaagugcccguggccauucacgccgaucagcugacaccuacauggcggguguacuccaccggcagcaauguguuucagaccagagccggcugucugaucggagccgagcacgugaacaauagcuacgagugcgacauccccaucggcgcuggcaucugugccagcuaccagacacagacaaacagccccagacgggcuagaagcguggccagccagagcaucauugccuacacaaugucucugggcgccgagaacagcguggccuacuccaacaacucuaucgcuauccccaccaacuucaccaucagcgugaccaccgagauccugccuguguccaugaccaagaccagcguggacugcaccauguacaucugcggcgauuccaccgagugcuccaaccugcugcugcaguacggcagcuucugcacccagcugaauagagcccugacagggaucgccguggaacaggacaagaacacccaagagguguucgcccaagugaagcaaaucuacaagaccccuccuaucaaggacuucggcggcuucaauuucagccagauucugcccgauccuagcaagcccagcaagcggagcuucaucgaggaccugcuguucaacaaagugacacuggccgacgccggcuucaucaagcaguauggcgauugucugggcgacauugccgccagggaucugauuugcgcccagaaguuuaacggacugacagugcugccuccucugcugaccgaugagaugaucgcccaguacacaucugcccugcuggccggcacaaucacaagcggcuggacauuuggagcuggcgccgcucugcagauccccuuugcuaugcagauggccuaccgguucaacggcaucggagugacccagaaugugcuguacgagaaccagaagcugaucgccaaccaguucaacagcgccaucggcaagauccaggacagccugagcagcacagcaagcgcccugggaaagcugcaggacguggucaaccagaaugcccaggcacugaacacccuggucaagcagcuguccuccaacuucggcgccaucagcucugugcugaacgauauccugagcagacuggacaaggucgaggccgaggugcagaucgacagacugaucacaggcagacugcagagccuccagacauacgugacccagcagcugaucagagccgccgagauuagagccucugccaaucuggccgccaccaagaugucugagugugugcugggccagagcaagagaguggacuuuugcggcaagggcuaccaccugaugagcuucccucagucugccccucacggcgugguguuucugcacgugacauaugugcccgcucaagagaagaauuucaccaccgcuccagccaucugccacgacggcaaagcccacuuuccuagagaaggcguguucguguccaacggcacccauugguucgugacacagcggaacuucuacgagccccagaucaucaccaccgacaacaccuucgugucuggcaacugcgacguugugaucggcauugugaacaauaccguguacgacccucugcagcccgagcuggacagcuucaaagaggaacuggacaaguacuuuaagaaccacacaagccccgacguggaccugggcgauaucagcggaaucaaugccagcgucgugaacauccagaaagagaucgaccggcugaacgagguggccaagaaucugaacgagagccugaucgaccugcaagaacuggggaaguacgagcaguacaucaaguggcccugguacaucuggcugggcuuuaucgccggacugauugccaucgugauggucacaaucaugcuguguugcaugaccagcugcuguagcugccugaagggcuguuguagcuguggcagcugcugcaaguucgacgaggacgauucugagcccgugcugaagggcgugaaacugcacuacaccugaggacuaguuauaagacugacuagcccgaugggccucccaacgggcccuccuccccuccuugcaccgagauuaauagaucucaaaggcucuuuucagagccaccaaaaaaaaaaaaaaaaaaaaaaaaaaaaaaaaaaaaaaaaaaaaaaaaaaaaaaaaaaaaaaaaaaaaaaaaaaaaaaaaaaaaaaaaaaaaaaaaaaaaa

SEQ ID NO: 24363 - RNA, 4041 nt, Artificial Sequence
  SARS-CoV-2/Wuhan/WIV05/2019__EPI_ISL_402128 spike protein mRNA gc mod (1-1273)(A222V_D614G)
aggagaaagcuuaccauguucguguuucuggugcugcugccccugguguccagccagugugugaaccugaccaccagaacacagcugccuccagccuacaccaacagcuucaccagaggcguguacuaccccgacaagguguucagauccagcgugcugcacucuacccaggaccuguuccugccuuucuucagcaacgugaccugguuccacgccauccacguguccggcaccaauggcaccaagagauucgacaaccccgugcugcccuucaacgacgggguguacuuugccagcaccgagaaguccaacaucaucagaggcuggaucuucggcaccacacuggacagcaagacccagagccugcugaucgugaacaacgccaccaacguggucaucaaagugugcgaguuccaguucugcaacgaccccuuccugggcgucuacuaccacaagaacaacaagagcuggauggaaagcgaguuccggguguacagcagcgccaacaacugcaccuucgaguacgugucccagccuuuccugauggaccuggaaggcaagcagggcaacuucaagaaccugcgcgaguucguguucaagaacaucgacggcuacuucaaaaucuacagcaagcacaccccuaucaaccucgugcgggaucugccucagggcuucucugugcuggaaccccugguggaucugcccaucggcaucaacaucacccgguuucagacacugcuggcccugcacagaagcuaccugacaccuggcgauagcagcagcggauggacagcuggugccgccgcuuacuaugugggcuaccugcagccuagaaccuuccugcugaaguacaacgagaacggcaccaucaccgacgccguggauugugcucuggauccucugagcgagacaaagugcacccugaaguccuucaccguggaaaagggcaucuaccagaccagcaacuuccgggugcagcccaccgaauccaucgugcgguuccccaauaucaccaaucugugccccuucggcgagguguucaaugccaccagauucgccucuguguacgccuggaaccggaagcggaucagcaauugcguggccgacuacuccgugcuguacaacuccgccagcuucagcaccuucaagugcuacggcguguccccuaccaagcugaacgaccugugcuucacaaacguguacgccgacagcuucgugauccggggagaugaagugcggcagauugccccuggacagacaggcaagaucgccgacuacaacuacaagcugcccgacgacuucaccggcugugugauugccuggaacagcaacaaccuggacuccaaagucggcggcaacuacaauuaccuguaccggcuguuccggaaguccaaucugaagcccuucgagcgggacaucagcaccgaaaucuaucaggccggcagcaccccuugcaacggcguggaaggcuucaacugcuacuucccacugcaguccuacggcuuucagcccacaaauggcgugggcuaucagcccuacagagugguggugcugagcuucgaacugcugcaugcuccugccacagugugcggcccuaagaaaagcaccaaucucgugaagaacaaaugcgugaacuucaacuucaacggccugaccggcaccggcgugcugacagagagcaacaagaaguuccugccauuccagcaguuuggccgggauaucgccgauaccacagacgccguuagagauccccagacacuggaaauccuggacaucaccccaugcagcuucggcggagugucugugaucaccccuggcaccaacaccagcaaucagguggcagugcuguaccagggcgugaacuguaccgaagugcccguggccauucacgccgaucagcugacaccuacauggcggguguacuccaccggcagcaauguguuucagaccagagccggcugucugaucggagccgagcacgugaacaauagcuacgagugcgacauccccaucggcgcuggcaucugugccagcuaccagacacagacaaacagccccagacgggcuagaagcguggccagccagagcaucauugccuacacaaugucucugggcgccgagaacagcguggccuacuccaacaacucuaucgcuauccccaccaacuucaccaucagcgugaccaccgagauccugccuguguccaugaccaagaccagcguggacugcaccauguacaucugcggcgauuccaccgagugcuccaaccugcugcugcaguacggcagcuucugcacccagcugaauagagcccugacagggaucgccguggaacaggacaagaacacccaagagguguucgcccaagugaagcaaaucuacaagaccccuccuaucaaggacuucggcggcuucaauuucagccagauucugcccgauccuagcaagcccagcaagcggagcuucaucgaggaccugcuguucaacaaagugacacuggccgacgccggcuucaucaagcaguauggcgauugucugggcgacauugccgccagggaucugauuugcgcccagaaguuuaacggacugacagugcugccuccucugcugaccgaugagaugaucgcccaguacacaucugcccugcuggccggcacaaucacaagcggcuggacauuuggagcuggcgccgcucugcagauccccuuugcuaugcagauggccuaccgguucaacggcaucggagugacccagaaugugcuguacgagaaccagaagcugaucgccaaccaguucaacagcgccaucggcaagauccaggacagccugagcagcacagcaagcgcccugggaaagcugcaggacguggucaaccagaaugcccaggcacugaacacccuggucaagcagcuguccuccaacuucggcgccaucagcucugugcugaacgauauccugagcagacuggacaaggucgaggccgaggugcagaucgacagacugaucacaggcagacugcagagccuccagacauacgugacccagcagcugaucagagccgccgagauuagagccucugccaaucuggccgccaccaagaugucugagugugugcugggccagagcaagagaguggacuuuugcggcaagggcuaccaccugaugagcuucccucagucugccccucacggcgugguguuucugcacgugacauaugugcccgcucaagagaagaauuucaccaccgcuccagccaucugccacgacggcaaagcccacuuuccuagagaaggcguguucguguccaacggcacccauugguucgugacacagcggaacuucuacgagccccagaucaucaccaccgacaacaccuucgugucuggcaacugcgacguugugaucggcauugugaacaauaccguguacgacccucugcagcccgagcuggacagcuucaaagaggaacuggacaaguacuuuaagaaccacacaagccccgacguggaccugggcgauaucagcggaaucaaugccagcgucgugaacauccagaaagagaucgaccggcugaacgagguggccaagaaucugaacgagagccugaucgaccugcaagaacuggggaaguacgagcaguacaucaaguggcccugguacaucuggcugggcuuuaucgccggacugauugccaucgugauggucacaaucaugcuguguugcaugaccagcugcuguagcugccugaagggcuguuguagcuguggcagcugcugcaaguucgacgaggacgauucugagcccgugcugaagggcgugaaacugcacuacaccugaggacuaguuauaagacugacuagcccgaugggccucccaacgggcccuccuccccuccuugcaccgagauuaauagaucucaaaggcucuuuucagagccaccaaaaaaaaaaaaaaaaaaaaaaaaaaaaaaaaaaaaaaaaaaaaaaaaaaaaaaaaaaaaaaaaaaaaaaaaaaaaaaaaaaaaaaaaaaaaaaaaaaaaa

SEQ ID NO: 24364 - RNA, 4041 nt, Artificial Sequence
  SARS-CoV-2/Wuhan/WIV05/2019__EPI_ISL_402128 spike protein mRNA gc mod (1-1273)(N439K_D614G)
aggagaaagcuuaccauguucguguuucuggugcugcugccccugguguccagccagugugugaaccugaccaccagaacacagcugccuccagccuacaccaacagcuucaccagaggcguguacuaccccgacaagguguucagauccagcgugcugcacucuacccaggaccuguuccugccuuucuucagcaacgugaccugguuccacgccauccacguguccggcaccaauggcaccaagagauucgacaaccccgugcugcccuucaacgacgggguguacuuugccagcaccgagaaguccaacaucaucagaggcuggaucuucggcaccacacuggacagcaagacccagagccugcugaucgugaacaacgccaccaacguggucaucaaagugugcgaguuccaguucugcaacgaccccuuccugggcgucuacuaccacaagaacaacaagagcuggauggaaagcgaguuccggguguacagcagcgccaacaacugcaccuucgaguacgugucccagccuuuccugauggaccuggaaggcaagcagggcaacuucaagaaccugcgcgaguucguguucaagaacaucgacggcuacuucaaaaucuacagcaagcacaccccuaucaaccucgugcgggaucugccucagggcuucucugcucuggaaccccugguggaucugcccaucggcaucaacaucacccgguuucagacacugcuggcccugcacagaagcuaccugacaccuggcgauagcagcagcggauggacagcuggugccgccgcuuacuaugugggcuaccugcagccuagaaccuuccugcugaaguacaacgagaacggcaccaucaccgacgccguggauugugcucuggauccucugagcgagacaaagugcacccugaaguccuucaccguggaaaagggcaucuaccagaccagcaacuuccgggugcagcccaccgaauccaucgugcgguuccccaauaucaccaaucugugccccuucggcgagguguucaaugccaccagauucgccucuguguacgccuggaaccggaagcggaucagcaauugcguggccgacuacuccgugcuguacaacuccgccagcuucagcaccuucaagugcuacggcguguccccuaccaagcugaacgaccugugcuucacaaacguguacgccgacagcuucgugauccggggagaugaagugcggcagauugccccuggacagacaggcaagaucgccgacuacaacuacaagcugcccgacgacuucaccggcugugugauugccuggaacagcaagaaccuggacuccaaagucggcggcaacuacaauuaccuguaccggcuguuccggaaguccaaucugaagcccuucgagcgggacaucagcaccgaaaucuaucaggccggcagcaccccuugcaacggcguggaaggcuucaacugcuacuucccacugcaguccuacggcuuucagcccacaaauggcgugggcuaucagcccuacagagugguggugcugagcuucgaacugcugcaugcuccugccacagugugcggcccuaagaaaagcaccaaucucgugaagaacaaaugcgugaacuucaacuucaacggccugaccggcaccggcgugcugacagagagcaacaagaaguuccugccauuccagcaguuuggccgggauaucgccgauaccacagacgccguuagagauccccagacacuggaaauccuggacaucaccccaugcagcuucggcggagugucugugaucaccccuggcaccaacaccagcaaucagguggcagugcuguaccagggcgugaacuguaccgaagugcccguggccauucacgccgaucagcugacaccuacauggcggguguacuccaccggcagcaauguguuucagaccagagccggcugucugaucggagccgagcacgugaacaauagcuacgagugcgacauccccaucggcgcuggcaucugugccagcuaccagacacagacaaacagccccagacgggcuagaagcguggccagccagagcaucauugccuacacaaugucucugggcgccgagaacagcguggccuacuccaacaacucuaucgcuauccccaccaacuucaccaucagcgugaccaccgagauccugccuguguccaugaccaagaccagcguggacugcaccauguacaucugcggcgauuccaccgagugcuccaaccugcugcugcaguacggcagcuucugcacccagcugaauagagcccugacagggaucgccguggaacaggacaagaacacccaagagguguucgcccaagugaagcaaaucuacaagaccccuccuaucaaggacuucggcggcuucaauuucagccagauucugcccgauccuagcaagcccagcaagcggagcuucaucgaggaccugcuguucaacaaagugacacuggccgacgccggcuucaucaagcaguauggcgauugucugggcgacauugccgccagggaucugauuugcgcccagaaguuuaacggacugacagugcugccuccucugcugaccgaugagaugaucgcccaguacacaucugcccugcuggccggcacaaucacaagcggcuggacauuuggagcuggcgccgcucugcagauccccuuugcuaugcagauggccuaccgguucaacggcaucggagugacccagaaugugcuguacgagaaccagaagcugaucgccaaccaguucaacagcgccaucggcaagauccaggacagccugagcagcacagcaagcgcccugggaaagcugcaggacguggucaaccagaaugcccaggcacugaacacccuggucaagcagcuguccuccaacuucggcgccaucagcucugugcugaacgauauccugagcagacuggacaaggucgaggccgaggugcagaucgacagacugaucacaggcagacugcagagccuccagacauacgugacccagcagcugaucagagccgccgagauuagagccucugccaaucuggccgccaccaagaugucugagugugugcugggccagagcaagagaguggacuuuugcggcaagggcuaccaccugaugagcuucccucagucugccccucacggcgugguguuucugcacgugacauaugugcccgcucaagagaagaauuucaccaccgcuccagccaucugccacgacggcaaagcccacuuuccuagagaaggcguguucguguccaacggcacccauugguucgugacacagcggaacuucuacgagccccagaucaucaccaccgacaacaccuucgugucuggcaacugcgacguugugaucggcauugugaacaauaccguguacgacccucugcagcccgagcuggacagcuucaaagaggaacuggacaaguacuuuaagaaccacacaagccccgacguggaccugggcgauaucagcggaaucaaugccagcgucgugaacauccagaaagagaucgaccggcugaacgagguggccaagaaucugaacgagagccugaucgaccugcaagaacuggggaaguacgagcaguacaucaaguggcccugguacaucuggcugggcuuuaucgccggacugauugccaucgugauggucacaaucaugcuguguugcaugaccagcugcuguagcugccugaagggcuguuguagcuguggcagcugcugcaaguucgacgaggacgauucugagcccgugcugaagggcgugaaacugcacuacaccugaggacuaguuauaagacugacuagcccgaugggccucccaacgggcccuccuccccuccuugcaccgagauuaauagaucucaaaggcucuuuucagagccaccaaaaaaaaaaaaaaaaaaaaaaaaaaaaaaaaaaaaaaaaaaaaaaaaaaaaaaaaaaaaaaaaaaaaaaaaaaaaaaaaaaaaaaaaaaaaaaaaaaaaa

SEQ ID NO: 24365 - RNA, 4041 nt, Artificial Sequence
  SARS-CoV-2/Wuhan/WIV05/2019__EPI_ISL_402128 spike protein mRNA gc mod (1-1273)(S477N_D614G)
aggagaaagcuuaccauguucguguuucuggugcugcugccccugguguccagccagugugugaaccugaccaccagaacacagcugccuccagccuacaccaacagcuucaccagaggcguguacuaccccgacaagguguucagauccagcgugcugcacucuacccaggaccuguuccugccuuucuucagcaacgugaccugguuccacgccauccacguguccggcaccaauggcaccaagagauucgacaaccccgugcugcccuucaacgacgggguguacuuugccagcaccgagaaguccaacaucaucagaggcuggaucuucggcaccacacuggacagcaagacccagagccugcugaucgugaacaacgccaccaacguggucaucaaagugugcgaguuccaguucugcaacgaccccuuccugggcgucuacuaccacaagaacaacaagagcuggauggaaagcgaguuccggguguacagcagcgccaacaacugcaccuucgaguacgugucccagccuuuccugauggaccuggaaggcaagcagggcaacuucaagaaccugcgcgaguucguguucaagaacaucgacggcuacuucaaaaucuacagcaagcacaccccuaucaaccucgugcgggaucugccucagggcuucucugcucuggaaccccugguggaucugcccaucggcaucaacaucacccgguuucagacacugcuggcccugcacagaagcuaccugacaccuggcgauagcagcagcggauggacagcuggugccgccgcuuacuaugugggcuaccugcagccuagaaccuuccugcugaaguacaacgagaacggcaccaucaccgacgccguggauugugcucuggauccucugagcgagacaaagugcacccugaaguccuucaccguggaaaagggcaucuaccagaccagcaacuuccgggugcagcccaccgaauccaucgugcgguuccccaauaucaccaaucugugccccuucggcgagguguucaaugccaccagauucgccucuguguacgccuggaaccggaagcggaucagcaauugcguggccgacuacuccgugcuguacaacuccgccagcuucagcaccuucaagugcuacggcguguccccuaccaagcugaacgaccugugcuucacaaacguguacgccgacagcuucgugauccggggagaugaagugcggcagauugccccuggacagacaggcaagaucgccgacuacaacuacaagcugcccgacgacuucaccggcugugugauugccuggaacagcaacaaccuggacuccaaagucggcggcaacuacaauuaccuguaccggcuguuccggaaguccaaucugaagcccuucgagcgggacaucagcaccgaaaucuaucaggccggcaacaccccuugcaacggcguggaaggcuucaacugcuacuucccacugcaguccuacggcuuucagcccacaaauggcgugggcuaucagcccuacagagugguggugcugagcuucgaacugcugcaugcuccugccacagugugcggcccuaagaaaagcaccaaucucgugaagaacaaaugcgugaacuucaacuucaacggccugaccggcaccggcgugcugacagagagcaacaagaaguuccugccauuccagcaguuuggccgggauaucgccgauaccacagacgccguuagagauccccagacacuggaaauccuggacaucaccccaugcagcuucggcggagugucugugaucaccccuggcaccaacaccagcaaucagguggcagugcuguaccagggcgugaacuguaccgaagugcccguggccauucacgccgaucagcugacaccuacauggcggguguacuccaccggcagcaauguguuucagaccagagccggcugucugaucggagccgagcacgugaacaauagcuacgagugcgacauccccaucggcgcuggcaucugugccagcuaccagacacagacaaacagccccagacgggcuagaagcguggccagccagagcaucauugccuacacaaugucucugggcgccgagaacagcguggccuacuccaacaacucuaucgcuauccccaccaacuucaccaucagcgugaccaccgagauccugccuguguccaugaccaagaccagcguggacugcaccauguacaucugcggcgauuccaccgagugcuccaaccugcugcugcaguacggcagcuucugcacccagcugaauagagcccugacagggaucgccguggaacaggacaagaacacccaagagguguucgcccaagugaagcaaaucuacaagaccccuccuaucaaggacuucggcggcuucaauuucagccagauucugcccgauccuagcaagcccagcaagcggagcuucaucgaggaccugcuguucaacaaagugacacuggccgacgccggcuucaucaagcaguauggcgauugucugggcgacauugccgccagggaucugauuugcgcccagaaguuuaacggacugacagugcugccuccucugcugaccgaugagaugaucgcccaguacacaucugcccugcuggccggcacaaucacaagcggcuggacauuuggagcuggcgccgcucugcagauccccuuugcuaugcagauggccuaccgguucaacggcaucggagugacccagaaugugcuguacgagaaccagaagcugaucgccaaccaguucaacagcgccaucggcaagauccaggacagccugagcagcacagcaagcgcccugggaaagcugcaggacguggucaaccagaaugcccaggcacugaacacccuggucaagcagcuguccuccaacuucggcgccaucagcucugugcugaacgauauccugagcagacuggacaaggucgaggccgaggugcagaucgacagacugaucacaggcagacugcagagccuccagacauacgugacccagcagcugaucagagccgccgagauuagagccucugccaaucuggccgccaccaagaugucugagugugugcugggccagagcaagagaguggacuuuugcggcaagggcuaccaccugaugagcuucccucagucugccccucacggcgugguguuucugcacgugacauaugugcccgcucaagagaagaauuucaccaccgcuccagccaucugccacgacggcaaagcccacuuuccuagagaaggcguguucguguccaacggcacccauugguucgugacacagcggaacuucuacgagccccagaucaucaccaccgacaacaccuucgugucuggcaacugcgacguugugaucggcauugugaacaauaccguguacgacccucugcagcccgagcuggacagcuucaaagaggaacuggacaaguacuuuaagaaccacacaagccccgacguggaccugggcgauaucagcggaaucaaugccagcgucgugaacauccagaaagagaucgaccggcugaacgagguggccaagaaucugaacgagagccugaucgaccugcaagaacuggggaaguacgagcaguacaucaaguggcccugguacaucuggcugggcuuuaucgccggacugauugccaucgugauggucacaaucaugcuguguugcaugaccagcugcuguagcugccugaagggcuguuguagcuguggcagcugcugcaaguucgacgaggacgauucugagcccgugcugaagggcgugaaacugcacuacaccugaggacuaguuauaagacugacuagcccgaugggccucccaacgggcccuccuccccuccuugcaccgagauuaauagaucucaaaggcucuuuucagagccaccaaaaaaaaaaaaaaaaaaaaaaaaaaaaaaaaaaaaaaaaaaaaaaaaaaaaaaaaaaaaaaaaaaaaaaaaaaaaaaaaaaaaaaaaaaaaaaaaaaaaa

SEQ ID NO: 24366 - RNA, 4041 nt, Artificial Sequence
  SARS-CoV-2/Wuhan/WIV05/2019__EPI_ISL_402128 spike protein mRNA gc mod (1-1273)(N501Y_D614G)
aggagaaagcuuaccauguucguguuucuggugcugcugccccugguguccagccagugugugaaccugaccaccagaacacagcugccuccagccuacaccaacagcuucaccagaggcguguacuaccccgacaagguguucagauccagcgugcugcacucuacccaggaccuguuccugccuuucuucagcaacgugaccugguuccacgccauccacguguccggcaccaauggcaccaagagauucgacaaccccgugcugcccuucaacgacgggguguacuuugccagcaccgagaaguccaacaucaucagaggcuggaucuucggcaccacacuggacagcaagacccagagccugcugaucgugaacaacgccaccaacguggucaucaaagugugcgaguuccaguucugcaacgaccccuuccugggcgucuacuaccacaagaacaacaagagcuggauggaaagcgaguuccggguguacagcagcgccaacaacugcaccuucgaguacgugucccagccuuuccugauggaccuggaaggcaagcagggcaacuucaagaaccugcgcgaguucguguucaagaacaucgacggcuacuucaaaaucuacagcaagcacaccccuaucaaccucgugcgggaucugccucagggcuucucugcucuggaaccccugguggaucugcccaucggcaucaacaucacccgguuucagacacugcuggcccugcacagaagcuaccugacaccuggcgauagcagcagcggauggacagcuggugccgccgcuuacuaugugggcuaccugcagccuagaaccuuccugcugaaguacaacgagaacggcaccaucaccgacgccguggauugugcucuggauccucugagcgagacaaagugcacccugaaguccuucaccguggaaaagggcaucuaccagaccagcaacuuccgggugcagcccaccgaauccaucgugcgguuccccaauaucaccaaucugugccccuucggcgagguguucaaugccaccagauucgccucuguguacgccuggaaccggaagcggaucagcaauugcguggccgacuacuccgugcuguacaacuccgccagcuucagcaccuucaagugcuacggcguguccccuaccaagcugaacgaccugugcuucacaaacguguacgccgacagcuucgugauccggggagaugaagugcggcagauugccccuggacagacaggcaagaucgccgacuacaacuacaagcugcccgacgacuucaccggcugugugauugccuggaacagcaacaaccuggacuccaaagucggcggcaacuacaauuaccuguaccggcuguuccggaaguccaaucugaagcccuucgagcgggacaucagcaccgaaaucuaucaggccggcagcaccccuugcaacggcguggaaggcuucaacugcuacuucccacugcaguccuacggcuuucagcccacauacggcgugggcuaucagcccuacagagugguggugcugagcuucgaacugcugcaugcuccugccacagugugcggcccuaagaaaagcaccaaucucgugaagaacaaaugcgugaacuucaacuucaacggccugaccggcaccggcgugcugacagagagcaacaagaaguuccugccauuccagcaguuuggccgggauaucgccgauaccacagacgccguuagagauccccagacacuggaaauccuggacaucaccccaugcagcuucggcggagugucugugaucaccccuggcaccaacaccagcaaucagguggcagugcuguaccagggcgugaacuguaccgaagugcccguggccauucacgccgaucagcugacaccuacauggcggguguacuccaccggcagcaauguguuucagaccagagccggcugucugaucggagccgagcacgugaacaauagcuacgagugcgacauccccaucggcgcuggcaucugugccagcuaccagacacagacaaacagccccagacgggcuagaagcguggccagccagagcaucauugccuacacaaugucucugggcgccgagaacagcguggccuacuccaacaacucuaucgcuauccccaccaacuucaccaucagcgugaccaccgagauccugccuguguccaugaccaagaccagcguggacugcaccauguacaucugcggcgauuccaccgagugcuccaaccugcugcugcaguacggcagcuucugcacccagcugaauagagcccugacagggaucgccguggaacaggacaagaacacccaagagguguucgcccaagugaagcaaaucuacaagaccccuccuaucaaggacuucggcggcuucaauuucagccagauucugcccgauccuagcaagcccagcaagcggagcuucaucgaggaccugcuguucaacaaagugacacuggccgacgccggcuucaucaagcaguauggcgauugucugggcgacauugccgccagggaucugauuugcgcccagaaguuuaacggacugacagugcugccuccucugcugaccgaugagaugaucgcccaguacacaucugcccugcuggccggcacaaucacaagcggcuggacauuuggagcuggcgccgcucugcagauccccuuugcuaugcagauggccuaccgguucaacggcaucggagugacccagaaugugcuguacgagaaccagaagcugaucgccaaccaguucaacagcgccaucggcaagauccaggacagccugagcagcacagcaagcgcccugggaaagcugcaggacguggucaaccagaaugcccaggcacugaacacccuggucaagcagcuguccuccaacuucggcgccaucagcucugugcugaacgauauccugagcagacuggacaaggucgaggccgaggugcagaucgacagacugaucacaggcagacugcagagccuccagacauacgugacccagcagcugaucagagccgccgagauuagagccucugccaaucuggccgccaccaagaugucugagugugugcugggccagagcaagagaguggacuuuugcggcaagggcuaccaccugaugagcuucccucagucugccccucacggcgugguguuucugcacgugacauaugugcccgcucaagagaagaauuucaccaccgcuccagccaucugccacgacggcaaagcccacuuuccuagagaaggcguguucguguccaacggcacccauugguucgugacacagcggaacuucuacgagccccagaucaucaccaccgacaacaccuucgugucuggcaacugcgacguugugaucggcauugugaacaauaccguguacgacccucugcagcccgagcuggacagcuucaaagaggaacuggacaaguacuuuaagaaccacacaagccccgacguggaccugggcgauaucagcggaaucaaugccagcgucgugaacauccagaaagagaucgaccggcugaacgagguggccaagaaucugaacgagagccugaucgaccugcaagaacuggggaaguacgagcaguacaucaaguggcccugguacaucuggcugggcuuuaucgccggacugauugccaucgugauggucacaaucaugcuguguugcaugaccagcugcuguagcugccugaagggcuguuguagcuguggcagcugcugcaaguucgacgaggacgauucugagcccgugcugaagggcgugaaacugcacuacaccugaggacuaguuauaagacugacuagcccgaugggccucccaacgggcccuccuccccuccuugcaccgagauuaauagaucucaaaggcucuuuucagagccaccaaaaaaaaaaaaaaaaaaaaaaaaaaaaaaaaaaaaaaaaaaaaaaaaaaaaaaaaaaaaaaaaaaaaaaaaaaaaaaaaaaaaaaaaaaaaaaaaaaaaa

SEQ ID NO: 24367 - RNA, 4035 nt, Artificial Sequence
  SARS-CoV-2/Wuhan/WIV05/2019__EPI_ISL_402128 spike protein mRNA gc mod (1-1273)(H69del_V70del_D614G)
aggagaaagcuuaccauguucguguuucuggugcugcugccccugguguccagccagugugugaaccugaccaccagaacacagcugccuccagccuacaccaacagcuucaccagaggcguguacuaccccgacaagguguucagauccagcgugcugcacucuacccaggaccuguuccugccuuucuucagcaacgugaccugguuccacgccaucuccggcaccaauggcaccaagagauucgacaaccccgugcugcccuucaacgacgggguguacuuugccagcaccgagaaguccaacaucaucagaggcuggaucuucggcaccacacuggacagcaagacccagagccugcugaucgugaacaacgccaccaacguggucaucaaagugugcgaguuccaguucugcaacgaccccuuccugggcgucuacuaccacaagaacaacaagagcuggauggaaagcgaguuccggguguacagcagcgccaacaacugcaccuucgaguacgugucccagccuuuccugauggaccuggaaggcaagcagggcaacuucaagaaccugcgcgaguucguguucaagaacaucgacggcuacuucaaaaucuacagcaagcacaccccuaucaaccucgugcgggaucugccucagggcuucucugcucuggaaccccugguggaucugcccaucggcaucaacaucacccgguuucagacacugcuggcccugcacagaagcuaccugacaccuggcgauagcagcagcggauggacagcuggugccgccgcuuacuaugugggcuaccugcagccuagaaccuuccugcugaaguacaacgagaacggcaccaucaccgacgccguggauugugcucuggauccucugagcgagacaaagugcacccugaaguccuucaccguggaaaagggcaucuaccagaccagcaacuuccgggugcagcccaccgaauccaucgugcgguuccccaauaucaccaaucugugccccuucggcgagguguucaaugccaccagauucgccucuguguacgccuggaaccggaagcggaucagcaauugcguggccgacuacuccgugcuguacaacuccgccagcuucagcaccuucaagugcuacggcguguccccuaccaagcugaacgaccugugcuucacaaacguguacgccgacagcuucgugauccggggagaugaagugcggcagauugccccuggacagacaggcaagaucgccgacuacaacuacaagcugcccgacgacuucaccggcugugugauugccuggaacagcaacaaccuggacuccaaagucggcggcaacuacaauuaccuguaccggcuguuccggaaguccaaucugaagcccuucgagcgggacaucagcaccgaaaucuaucaggccggcagcaccccuugcaacggcguggaaggcuucaacugcuacuucccacugcaguccuacggcuuucagcccacaaauggcgugggcuaucagcccuacagagugguggugcugagcuucgaacugcugcaugcuccugccacagugugcggcccuaagaaaagcaccaaucucgugaagaacaaaugcgugaacuucaacuucaacggccugaccggcaccggcgugcugacagagagcaacaagaaguuccugccauuccagcaguuuggccgggauaucgccgauaccacagacgccguuagagauccccagacacuggaaauccuggacaucaccccaugcagcuucggcggagugucugugaucaccccuggcaccaacaccagcaaucagguggcagugcuguaccagggcgugaacuguaccgaagugcccguggccauucacgccgaucagcugacaccuacauggcggguguacuccaccggcagcaauguguuucagaccagagccggcugucugaucggagccgagcacgugaacaauagcuacgagugcgacauccccaucggcgcuggcaucugugccagcuaccagacacagacaaacagccccagacgggcuagaagcguggccagccagagcaucauugccuacacaaugucucugggcgccgagaacagcguggccuacuccaacaacucuaucgcuauccccaccaacuucaccaucagcgugaccaccgagauccugccuguguccaugaccaagaccagcguggacugcaccauguacaucugcggcgauuccaccgagugcuccaaccugcugcugcaguacggcagcuucugcacccagcugaauagagcccugacagggaucgccguggaacaggacaagaacacccaagagguguucgcccaagugaagcaaaucuacaagaccccuccuaucaaggacuucggcggcuucaauuucagccagauucugcccgauccuagcaagcccagcaagcggagcuucaucgaggaccugcuguucaacaaagugacacuggccgacgccggcuucaucaagcaguauggcgauugucugggcgacauugccgccagggaucugauuugcgcccagaaguuuaacggacugacagugcugccuccucugcugaccgaugagaugaucgcccaguacacaucugcccugcuggccggcacaaucacaagcggcuggacauuuggagcuggcgccgcucugcagauccccuuugcuaugcagauggccuaccgguucaacggcaucggagugacccagaaugugcuguacgagaaccagaagcugaucgccaaccaguucaacagcgccaucggcaagauccaggacagccugagcagcacagcaagcgcccugggaaagcugcaggacguggucaaccagaaugcccaggcacugaacacccuggucaagcagcuguccuccaacuucggcgccaucagcucugugcugaacgauauccugagcagacuggacaaggucgaggccgaggugcagaucgacagacugaucacaggcagacugcagagccuccagacauacgugacccagcagcugaucagagccgccgagauuagagccucugccaaucuggccgccaccaagaugucugagugugugcugggccagagcaagagaguggacuuuugcggcaagggcuaccaccugaugagcuucccucagucugccccucacggcgugguguuucugcacgugacauaugugcccgcucaagagaagaauuucaccaccgcuccagccaucugccacgacggcaaagcccacuuuccuagagaaggcguguucguguccaacggcacccauugguucgugacacagcggaacuucuacgagccccagaucaucaccaccgacaacaccuucgugucuggcaacugcgacguugugaucggcauugugaacaauaccguguacgacccucugcagcccgagcuggacagcuucaaagaggaacuggacaaguacuuuaagaaccacacaagccccgacguggaccugggcgauaucagcggaaucaaugccagcgucgugaacauccagaaagagaucgaccggcugaacgagguggccaagaaucugaacgagagccugaucgaccugcaagaacuggggaaguacgagcaguacaucaaguggcccugguacaucuggcugggcuuuaucgccggacugauugccaucgugauggucacaaucaugcuguguugcaugaccagcugcuguagcugccugaagggcuguuguagcuguggcagcugcugcaaguucgacgaggacgauucugagcccgugcugaagggcgugaaacugcacuacaccugaggacuaguuauaagacugacuagcccgaugggccucccaacgggcccuccuccccuccuugcaccgagauuaauagaucucaaaggcucuuuucagagccaccaaaaaaaaaaaaaaaaaaaaaaaaaaaaaaaaaaaaaaaaaaaaaaaaaaaaaaaaaaaaaaaaaaaaaaaaaaaaaaaaaaaaaaaaaaaaaaaaaaaaa

SEQ ID NO: 24368 - RNA, 4041 nt, Artificial Sequence
  SARS-CoV-2/Wuhan/WIV05/2019__EPI_ISL_402128 spike protein mRNA gc mod (1-1273)(Y453F_D614G)
aggagaaagcuuaccauguucguguuucuggugcugcugccccugguguccagccagugugugaaccugaccaccagaacacagcugccuccagccuacaccaacagcuucaccagaggcguguacuaccccgacaagguguucagauccagcgugcugcacucuacccaggaccuguuccugccuuucuucagcaacgugaccugguuccacgccauccacguguccggcaccaauggcaccaagagauucgacaaccccgugcugcccuucaacgacgggguguacuuugccagcaccgagaaguccaacaucaucagaggcuggaucuucggcaccacacuggacagcaagacccagagccugcugaucgugaacaacgccaccaacguggucaucaaagugugcgaguuccaguucugcaacgaccccuuccugggcgucuacuaccacaagaacaacaagagcuggauggaaagcgaguuccggguguacagcagcgccaacaacugcaccuucgaguacgugucccagccuuuccugauggaccuggaaggcaagcagggcaacuucaagaaccugcgcgaguucguguucaagaacaucgacggcuacuucaaaaucuacagcaagcacaccccuaucaaccucgugcgggaucugccucagggcuucucugcucuggaaccccugguggaucugcccaucggcaucaacaucacccgguuucagacacugcuggcccugcacagaagcuaccugacaccuggcgauagcagcagcggauggacagcuggugccgccgcuuacuaugugggcuaccugcagccuagaaccuuccugcugaaguacaacgagaacggcaccaucaccgacgccguggauugugcucuggauccucugagcgagacaaagugcacccugaaguccuucaccguggaaaagggcaucuaccagaccagcaacuuccgggugcagcccaccgaauccaucgugcgguuccccaauaucaccaaucugugccccuucggcgagguguucaaugccaccagauucgccucuguguacgccuggaaccggaagcggaucagcaauugcguggccgacuacuccgugcuguacaacuccgccagcuucagcaccuucaagugcuacggcguguccccuaccaagcugaacgaccugugcuucacaaacguguacgccgacagcuucgugauccggggagaugaagugcggcagauugccccuggacagacaggcaagaucgccgacuacaacuacaagcugcccgacgacuucaccggcugugugauugccuggaacagcaacaaccuggacuccaaagucggcggcaacuacaauuaccuguuccggcuguuccggaaguccaaucugaagcccuucgagcgggacaucagcaccgaaaucuaucaggccggcagcaccccuugcaacggcguggaaggcuucaacugcuacuucccacugcaguccuacggcuuucagcccacaaauggcgugggcuaucagcccuacagagugguggugcugagcuucgaacugcugcaugcuccugccacagugugcggcccuaagaaaagcaccaaucucgugaagaacaaaugcgugaacuucaacuucaacggccugaccggcaccggcgugcugacagagagcaacaagaaguuccugccauuccagcaguuuggccgggauaucgccgauaccacagacgccguuagagauccccagacacuggaaauccuggacaucaccccaugcagcuucggcggagugucugugaucaccccuggcaccaacaccagcaaucagguggcagugcuguaccagggcgugaacuguaccgaagugcccguggccauucacgccgaucagcugacaccuacauggcggguguacuccaccggcagcaauguguuucagaccagagccggcugucugaucggagccgagcacgugaacaauagcuacgagugcgacauccccaucggcgcuggcaucugugccagcuaccagacacagacaaacagccccagacgggcuagaagcguggccagccagagcaucauugccuacacaaugucucugggcgccgagaacagcguggccuacuccaacaacucuaucgcuauccccaccaacuucaccaucagcgugaccaccgagauccugccuguguccaugaccaagaccagcguggacugcaccauguacaucugcggcgauuccaccgagugcuccaaccugcugcugcaguacggcagcuucugcacccagcugaauagagcccugacagggaucgccguggaacaggacaagaacacccaagagguguucgcccaagugaagcaaaucuacaagaccccuccuaucaaggacuucggcggcuucaauuucagccagauucugcccgauccuagcaagcccagcaagcggagcuucaucgaggaccugcuguucaacaaagugacacuggccgacgccggcuucaucaagcaguauggcgauugucugggcgacauugccgccagggaucugauuugcgcccagaaguuuaacggacugacagugcugccuccucugcugaccgaugagaugaucgcccaguacacaucugcccugcuggccggcacaaucacaagcggcuggacauuuggagcuggcgccgcucugcagauccccuuugcuaugcagauggccuaccgguucaacggcaucggagugacccagaaugugcuguacgagaaccagaagcugaucgccaaccaguucaacagcgccaucggcaagauccaggacagccugagcagcacagcaagcgcccugggaaagcugcaggacguggucaaccagaaugcccaggcacugaacacccuggucaagcagcuguccuccaacuucggcgccaucagcucugugcugaacgauauccugagcagacuggacaaggucgaggccgaggugcagaucgacagacugaucacaggcagacugcagagccuccagacauacgugacccagcagcugaucagagccgccgagauuagagccucugccaaucuggccgccaccaagaugucugagugugugcugggccagagcaagagaguggacuuuugcggcaagggcuaccaccugaugagcuucccucagucugccccucacggcgugguguuucugcacgugacauaugugcccgcucaagagaagaauuucaccaccgcuccagccaucugccacgacggcaaagcccacuuuccuagagaaggcguguucguguccaacggcacccauugguucgugacacagcggaacuucuacgagccccagaucaucaccaccgacaacaccuucgugucuggcaacugcgacguugugaucggcauugugaacaauaccguguacgacccucugcagcccgagcuggacagcuucaaagaggaacuggacaaguacuuuaagaaccacacaagccccgacguggaccugggcgauaucagcggaaucaaugccagcgucgugaacauccagaaagagaucgaccggcugaacgagguggccaagaaucugaacgagagccugaucgaccugcaagaacuggggaaguacgagcaguacaucaaguggcccugguacaucuggcugggcuuuaucgccggacugauugccaucgugauggucacaaucaugcuguguugcaugaccagcugcuguagcugccugaagggcuguuguagcuguggcagcugcugcaaguucgacgaggacgauucugagcccgugcugaagggcgugaaacugcacuacaccugaggacuaguuauaagacugacuagcccgaugggccucccaacgggcccuccuccccuccuugcaccgagauuaauagaucucaaaggcucuuuucagagccaccaaaaaaaaaaaaaaaaaaaaaaaaaaaaaaaaaaaaaaaaaaaaaaaaaaaaaaaaaaaaaaaaaaaaaaaaaaaaaaaaaaaaaaaaaaaaaaaaaaaaa

SEQ ID NO: 24369 - RNA, 4041 nt, Artificial Sequence
  SARS-CoV-2/Wuhan/WIV05/2019__EPI_ISL_402128 spike protein mRNA gc mod (1-1273)(D614G_I692V)
aggagaaagcuuaccauguucguguuucuggugcugcugccccugguguccagccagugugugaaccugaccaccagaacacagcugccuccagccuacaccaacagcuucaccagaggcguguacuaccccgacaagguguucagauccagcgugcugcacucuacccaggaccuguuccugccuuucuucagcaacgugaccugguuccacgccauccacguguccggcaccaauggcaccaagagauucgacaaccccgugcugcccuucaacgacgggguguacuuugccagcaccgagaaguccaacaucaucagaggcuggaucuucggcaccacacuggacagcaagacccagagccugcugaucgugaacaacgccaccaacguggucaucaaagugugcgaguuccaguucugcaacgaccccuuccugggcgucuacuaccacaagaacaacaagagcuggauggaaagcgaguuccggguguacagcagcgccaacaacugcaccuucgaguacgugucccagccuuuccugauggaccuggaaggcaagcagggcaacuucaagaaccugcgcgaguucguguucaagaacaucgacggcuacuucaaaaucuacagcaagcacaccccuaucaaccucgugcgggaucugccucagggcuucucugcucuggaaccccugguggaucugcccaucggcaucaacaucacccgguuucagacacugcuggcccugcacagaagcuaccugacaccuggcgauagcagcagcggauggacagcuggugccgccgcuuacuaugugggcuaccugcagccuagaaccuuccugcugaaguacaacgagaacggcaccaucaccgacgccguggauugugcucuggauccucugagcgagacaaagugcacccugaaguccuucaccguggaaaagggcaucuaccagaccagcaacuuccgggugcagcccaccgaauccaucgugcgguuccccaauaucaccaaucugugccccuucggcgagguguucaaugccaccagauucgccucuguguacgccuggaaccggaagcggaucagcaauugcguggccgacuacuccgugcuguacaacuccgccagcuucagcaccuucaagugcuacggcguguccccuaccaagcugaacgaccugugcuucacaaacguguacgccgacagcuucgugauccggggagaugaagugcggcagauugccccuggacagacaggcaagaucgccgacuacaacuacaagcugcccgacgacuucaccggcugugugauugccuggaacagcaacaaccuggacuccaaagucggcggcaacuacaauuaccuguaccggcuguuccggaaguccaaucugaagcccuucgagcgggacaucagcaccgaaaucuaucaggccggcagcaccccuugcaacggcguggaaggcuucaacugcuacuucccacugcaguccuacggcuuucagcccacaaauggcgugggcuaucagcccuacagagugguggugcugagcuucgaacugcugcaugcuccugccacagugugcggcccuaagaaaagcaccaaucucgugaagaacaaaugcgugaacuucaacuucaacggccugaccggcaccggcgugcugacagagagcaacaagaaguuccugccauuccagcaguuuggccgggauaucgccgauaccacagacgccguuagagauccccagacacuggaaauccuggacaucaccccaugcagcuucggcggagugucugugaucaccccuggcaccaacaccagcaaucagguggcagugcuguaccagggcgugaacuguaccgaagugcccguggccauucacgccgaucagcugacaccuacauggcggguguacuccaccggcagcaauguguuucagaccagagccggcugucugaucggagccgagcacgugaacaauagcuacgagugcgacauccccaucggcgcuggcaucugugccagcuaccagacacagacaaacagccccagacgggcuagaagcguggccagccagagcgugauugccuacacaaugucucugggcgccgagaacagcguggccuacuccaacaacucuaucgcuauccccaccaacuucaccaucagcgugaccaccgagauccugccuguguccaugaccaagaccagcguggacugcaccauguacaucugcggcgauuccaccgagugcuccaaccugcugcugcaguacggcagcuucugcacccagcugaauagagcccugacagggaucgccguggaacaggacaagaacacccaagagguguucgcccaagugaagcaaaucuacaagaccccuccuaucaaggacuucggcggcuucaauuucagccagauucugcccgauccuagcaagcccagcaagcggagcuucaucgaggaccugcuguucaacaaagugacacuggccgacgccggcuucaucaagcaguauggcgauugucugggcgacauugccgccagggaucugauuugcgcccagaaguuuaacggacugacagugcugccuccucugcugaccgaugagaugaucgcccaguacacaucugcccugcuggccggcacaaucacaagcggcuggacauuuggagcuggcgccgcucugcagauccccuuugcuaugcagauggccuaccgguucaacggcaucggagugacccagaaugugcuguacgagaaccagaagcugaucgccaaccaguucaacagcgccaucggcaagauccaggacagccugagcagcacagcaagcgcccugggaaagcugcaggacguggucaaccagaaugcccaggcacugaacacccuggucaagcagcuguccuccaacuucggcgccaucagcucugugcugaacgauauccugagcagacuggacaaggucgaggccgaggugcagaucgacagacugaucacaggcagacugcagagccuccagacauacgugacccagcagcugaucagagccgccgagauuagagccucugccaaucuggccgccaccaagaugucugagugugugcugggccagagcaagagaguggacuuuugcggcaagggcuaccaccugaugagcuucccucagucugccccucacggcgugguguuucugcacgugacauaugugcccgcucaagagaagaauuucaccaccgcuccagccaucugccacgacggcaaagcccacuuuccuagagaaggcguguucguguccaacggcacccauugguucgugacacagcggaacuucuacgagccccagaucaucaccaccgacaacaccuucgugucuggcaacugcgacguugugaucggcauugugaacaauaccguguacgacccucugcagcccgagcuggacagcuucaaagaggaacuggacaaguacuuuaagaaccacacaagccccgacguggaccugggcgauaucagcggaaucaaugccagcgucgugaacauccagaaagagaucgaccggcugaacgagguggccaagaaucugaacgagagccugaucgaccugcaagaacuggggaaguacgagcaguacaucaaguggcccugguacaucuggcugggcuuuaucgccggacugauugccaucgugauggucacaaucaugcuguguugcaugaccagcugcuguagcugccugaagggcuguuguagcuguggcagcugcugcaaguucgacgaggacgauucugagcccgugcugaagggcgugaaacugcacuacaccugaggacuaguuauaagacugacuagcccgaugggccucccaacgggcccuccuccccuccuugcaccgagauuaauagaucucaaaggcucuuuucagagccaccaaaaaaaaaaaaaaaaaaaaaaaaaaaaaaaaaaaaaaaaaaaaaaaaaaaaaaaaaaaaaaaaaaaaaaaaaaaaaaaaaaaaaaaaaaaaaaaaaaaaa

SEQ ID NO: 24370 - RNA, 4041 nt, Artificial Sequence
  SARS-CoV-2/Wuhan/WIV05/2019__EPI_ISL_402128 spike protein mRNA gc mod (1-1273)(D614G_M1229I)
aggagaaagcuuaccauguucguguuucuggugcugcugccccugguguccagccagugugugaaccugaccaccagaacacagcugccuccagccuacaccaacagcuucaccagaggcguguacuaccccgacaagguguucagauccagcgugcugcacucuacccaggaccuguuccugccuuucuucagcaacgugaccugguuccacgccauccacguguccggcaccaauggcaccaagagauucgacaaccccgugcugcccuucaacgacgggguguacuuugccagcaccgagaaguccaacaucaucagaggcuggaucuucggcaccacacuggacagcaagacccagagccugcugaucgugaacaacgccaccaacguggucaucaaagugugcgaguuccaguucugcaacgaccccuuccugggcgucuacuaccacaagaacaacaagagcuggauggaaagcgaguuccggguguacagcagcgccaacaacugcaccuucgaguacgugucccagccuuuccugauggaccuggaaggcaagcagggcaacuucaagaaccugcgcgaguucguguucaagaacaucgacggcuacuucaaaaucuacagcaagcacaccccuaucaaccucgugcgggaucugccucagggcuucucugcucuggaaccccugguggaucugcccaucggcaucaacaucacccgguuucagacacugcuggcccugcacagaagcuaccugacaccuggcgauagcagcagcggauggacagcuggugccgccgcuuacuaugugggcuaccugcagccuagaaccuuccugcugaaguacaacgagaacggcaccaucaccgacgccguggauugugcucuggauccucugagcgagacaaagugcacccugaaguccuucaccguggaaaagggcaucuaccagaccagcaacuuccgggugcagcccaccgaauccaucgugcgguuccccaauaucaccaaucugugccccuucggcgagguguucaaugccaccagauucgccucuguguacgccuggaaccggaagcggaucagcaauugcguggccgacuacuccgugcuguacaacuccgccagcuucagcaccuucaagugcuacggcguguccccuaccaagcugaacgaccugugcuucacaaacguguacgccgacagcuucgugauccggggagaugaagugcggcagauugccccuggacagacaggcaagaucgccgacuacaacuacaagcugcccgacgacuucaccggcugugugauugccuggaacagcaacaaccuggacuccaaagucggcggcaacuacaauuaccuguaccggcuguuccggaaguccaaucugaagcccuucgagcgggacaucagcaccgaaaucuaucaggccggcagcaccccuugcaacggcguggaaggcuucaacugcuacuucccacugcaguccuacggcuuucagcccacaaauggcgugggcuaucagcccuacagagugguggugcugagcuucgaacugcugcaugcuccugccacagugugcggcccuaagaaaagcaccaaucucgugaagaacaaaugcgugaacuucaacuucaacggccugaccggcaccggcgugcugacagagagcaacaagaaguuccugccauuccagcaguuuggccgggauaucgccgauaccacagacgccguuagagauccccagacacuggaaauccuggacaucaccccaugcagcuucggcggagugucugugaucaccccuggcaccaacaccagcaaucagguggcagugcuguaccagggcgugaacuguaccgaagugcccguggccauucacgccgaucagcugacaccuacauggcggguguacuccaccggcagcaauguguuucagaccagagccggcugucugaucggagccgagcacgugaacaauagcuacgagugcgacauccccaucggcgcuggcaucugugccagcuaccagacacagacaaacagccccagacgggcuagaagcguggccagccagagcaucauugccuacacaaugucucugggcgccgagaacagcguggccuacuccaacaacucuaucgcuauccccaccaacuucaccaucagcgugaccaccgagauccugccuguguccaugaccaagaccagcguggacugcaccauguacaucugcggcgauuccaccgagugcuccaaccugcugcugcaguacggcagcuucugcacccagcugaauagagcccugacagggaucgccguggaacaggacaagaacacccaagagguguucgcccaagugaagcaaaucuacaagaccccuccuaucaaggacuucggcggcuucaauuucagccagauucugcccgauccuagcaagcccagcaagcggagcuucaucgaggaccugcuguucaacaaagugacacuggccgacgccggcuucaucaagcaguauggcgauugucugggcgacauugccgccagggaucugauuugcgcccagaaguuuaacggacugacagugcugccuccucugcugaccgaugagaugaucgcccaguacacaucugcccugcuggccggcacaaucacaagcggcuggacauuuggagcuggcgccgcucugcagauccccuuugcuaugcagauggccuaccgguucaacggcaucggagugacccagaaugugcuguacgagaaccagaagcugaucgccaaccaguucaacagcgccaucggcaagauccaggacagccugagcagcacagcaagcgcccugggaaagcugcaggacguggucaaccagaaugcccaggcacugaacacccuggucaagcagcuguccuccaacuucggcgccaucagcucugugcugaacgauauccugagcagacuggacaaggucgaggccgaggugcagaucgacagacugaucacaggcagacugcagagccuccagacauacgugacccagcagcugaucagagccgccgagauuagagccucugccaaucuggccgccaccaagaugucugagugugugcugggccagagcaagagaguggacuuuugcggcaagggcuaccaccugaugagcuucccucagucugccccucacggcgugguguuucugcacgugacauaugugcccgcucaagagaagaauuucaccaccgcuccagccaucugccacgacggcaaagcccacuuuccuagagaaggcguguucguguccaacggcacccauugguucgugacacagcggaacuucuacgagccccagaucaucaccaccgacaacaccuucgugucuggcaacugcgacguugugaucggcauugugaacaauaccguguacgacccucugcagcccgagcuggacagcuucaaagaggaacuggacaaguacuuuaagaaccacacaagccccgacguggaccugggcgauaucagcggaaucaaugccagcgucgugaacauccagaaagagaucgaccggcugaacgagguggccaagaaucugaacgagagccugaucgaccugcaagaacuggggaaguacgagcaguacaucaaguggcccugguacaucuggcugggcuuuaucgccggacugauugccaucgugaucgucacaaucaugcuguguugcaugaccagcugcuguagcugccugaagggcuguuguagcuguggcagcugcugcaaguucgacgaggacgauucugagcccgugcugaagggcgugaaacugcacuacaccugaggacuaguuauaagacugacuagcccgaugggccucccaacgggcccuccuccccuccuugcaccgagauuaauagaucucaaaggcucuuuucagagccaccaaaaaaaaaaaaaaaaaaaaaaaaaaaaaaaaaaaaaaaaaaaaaaaaaaaaaaaaaaaaaaaaaaaaaaaaaaaaaaaaaaaaaaaaaaaaaaaaaaaaa

SEQ ID NO: 24371 - RNA, 4035 nt, Artificial Sequence
  SARS-CoV-2/Wuhan/WIV05/2019__EPI_ISL_402128 spike protein mRNA gc mod (1-1273)(H69del_V70del_A222V_Y453F_S477N_D614G_I692V)
aggagaaagcuuaccauguucguguuucuggugcugcugccccugguguccagccagugugugaaccugaccaccagaacacagcugccuccagccuacaccaacagcuucaccagaggcguguacuaccccgacaagguguucagauccagcgugcugcacucuacccaggaccuguuccugccuuucuucagcaacgugaccugguuccacgccaucuccggcaccaauggcaccaagagauucgacaaccccgugcugcccuucaacgacgggguguacuuugccagcaccgagaaguccaacaucaucagaggcuggaucuucggcaccacacuggacagcaagacccagagccugcugaucgugaacaacgccaccaacguggucaucaaagugugcgaguuccaguucugcaacgaccccuuccugggcgucuacuaccacaagaacaacaagagcuggauggaaagcgaguuccggguguacagcagcgccaacaacugcaccuucgaguacgugucccagccuuuccugauggaccuggaaggcaagcagggcaacuucaagaaccugcgcgaguucguguucaagaacaucgacggcuacuucaaaaucuacagcaagcacaccccuaucaaccucgugcgggaucugccucagggcuucucugugcuggaaccccugguggaucugcccaucggcaucaacaucacccgguuucagacacugcuggcccugcacagaagcuaccugacaccuggcgauagcagcagcggauggacagcuggugccgccgcuuacuaugugggcuaccugcagccuagaaccuuccugcugaaguacaacgagaacggcaccaucaccgacgccguggauugugcucuggauccucugagcgagacaaagugcacccugaaguccuucaccguggaaaagggcaucuaccagaccagcaacuuccgggugcagcccaccgaauccaucgugcgguuccccaauaucaccaaucugugccccuucggcgagguguucaaugccaccagauucgccucuguguacgccuggaaccggaagcggaucagcaauugcguggccgacuacuccgugcuguacaacuccgccagcuucagcaccuucaagugcuacggcguguccccuaccaagcugaacgaccugugcuucacaaacguguacgccgacagcuucgugauccggggagaugaagugcggcagauugccccuggacagacaggcaagaucgccgacuacaacuacaagcugcccgacgacuucaccggcugugugauugccuggaacagcaacaaccuggacuccaaagucggcggcaacuacaauuaccuguuccggcuguuccggaaguccaaucugaagcccuucgagcgggacaucagcaccgaaaucuaucaggccggcaacaccccuugcaacggcguggaaggcuucaacugcuacuucccacugcaguccuacggcuuucagcccacaaauggcgugggcuaucagcccuacagagugguggugcugagcuucgaacugcugcaugcuccugccacagugugcggcccuaagaaaagcaccaaucucgugaagaacaaaugcgugaacuucaacuucaacggccugaccggcaccggcgugcugacagagagcaacaagaaguuccugccauuccagcaguuuggccgggauaucgccgauaccacagacgccguuagagauccccagacacuggaaauccuggacaucaccccaugcagcuucggcggagugucugugaucaccccuggcaccaacaccagcaaucagguggcagugcuguaccagggcgugaacuguaccgaagugcccguggccauucacgccgaucagcugacaccuacauggcggguguacuccaccggcagcaauguguuucagaccagagccggcugucugaucggagccgagcacgugaacaauagcuacgagugcgacauccccaucggcgcuggcaucugugccagcuaccagacacagacaaacagccccagacgggcuagaagcguggccagccagagcgugauugccuacacaaugucucugggcgccgagaacagcguggccuacuccaacaacucuaucgcuauccccaccaacuucaccaucagcgugaccaccgagauccugccuguguccaugaccaagaccagcguggacugcaccauguacaucugcggcgauuccaccgagugcuccaaccugcugcugcaguacggcagcuucugcacccagcugaauagagcccugacagggaucgccguggaacaggacaagaacacccaagagguguucgcccaagugaagcaaaucuacaagaccccuccuaucaaggacuucggcggcuucaauuucagccagauucugcccgauccuagcaagcccagcaagcggagcuucaucgaggaccugcuguucaacaaagugacacuggccgacgccggcuucaucaagcaguauggcgauugucugggcgacauugccgccagggaucugauuugcgcccagaaguuuaacggacugacagugcugccuccucugcugaccgaugagaugaucgcccaguacacaucugcccugcuggccggcacaaucacaagcggcuggacauuuggagcuggcgccgcucugcagauccccuuugcuaugcagauggccuaccgguucaacggcaucggagugacccagaaugugcuguacgagaaccagaagcugaucgccaaccaguucaacagcgccaucggcaagauccaggacagccugagcagcacagcaagcgcccugggaaagcugcaggacguggucaaccagaaugcccaggcacugaacacccuggucaagcagcuguccuccaacuucggcgccaucagcucugugcugaacgauauccugagcagacuggacaaggucgaggccgaggugcagaucgacagacugaucacaggcagacugcagagccuccagacauacgugacccagcagcugaucagagccgccgagauuagagccucugccaaucuggccgccaccaagaugucugagugugugcugggccagagcaagagaguggacuuuugcggcaagggcuaccaccugaugagcuucccucagucugccccucacggcgugguguuucugcacgugacauaugugcccgcucaagagaagaauuucaccaccgcuccagccaucugccacgacggcaaagcccacuuuccuagagaaggcguguucguguccaacggcacccauugguucgugacacagcggaacuucuacgagccccagaucaucaccaccgacaacaccuucgugucuggcaacugcgacguugugaucggcauugugaacaauaccguguacgacccucugcagcccgagcuggacagcuucaaagaggaacuggacaaguacuuuaagaaccacacaagccccgacguggaccugggcgauaucagcggaaucaaugccagcgucgugaacauccagaaagagaucgaccggcugaacgagguggccaagaaucugaacgagagccugaucgaccugcaagaacuggggaaguacgagcaguacaucaaguggcccugguacaucuggcugggcuuuaucgccggacugauugccaucgugauggucacaaucaugcuguguugcaugaccagcugcuguagcugccugaagggcuguuguagcuguggcagcugcugcaaguucgacgaggacgauucugagcccgugcugaagggcgugaaacugcacuacaccugaggacuaguuauaagacugacuagcccgaugggccucccaacgggcccuccuccccuccuugcaccgagauuaauagaucucaaaggcucuuuucagagccaccaaaaaaaaaaaaaaaaaaaaaaaaaaaaaaaaaaaaaaaaaaaaaaaaaaaaaaaaaaaaaaaaaaaaaaaaaaaaaaaaaaaaaaaaaaaaaaaaaaaaa

SEQ ID NO: 24372 - RNA, 4035 nt, Artificial Sequence
  SARS-CoV-2/Wuhan/WIV05/2019__EPI_ISL_402128 spike protein mRNA gc mod (1-1273)(H69del_V70del_Y453F_D614G_I692V_M1229I)
aggagaaagcuuaccauguucguguuucuggugcugcugccccugguguccagccagugugugaaccugaccaccagaacacagcugccuccagccuacaccaacagcuucaccagaggcguguacuaccccgacaagguguucagauccagcgugcugcacucuacccaggaccuguuccugccuuucuucagcaacgugaccugguuccacgccaucuccggcaccaauggcaccaagagauucgacaaccccgugcugcccuucaacgacgggguguacuuugccagcaccgagaaguccaacaucaucagaggcuggaucuucggcaccacacuggacagcaagacccagagccugcugaucgugaacaacgccaccaacguggucaucaaagugugcgaguuccaguucugcaacgaccccuuccugggcgucuacuaccacaagaacaacaagagcuggauggaaagcgaguuccggguguacagcagcgccaacaacugcaccuucgaguacgugucccagccuuuccugauggaccuggaaggcaagcagggcaacuucaagaaccugcgcgaguucguguucaagaacaucgacggcuacuucaaaaucuacagcaagcacaccccuaucaaccucgugcgggaucugccucagggcuucucugcucuggaaccccugguggaucugcccaucggcaucaacaucacccgguuucagacacugcuggcccugcacagaagcuaccugacaccuggcgauagcagcagcggauggacagcuggugccgccgcuuacuaugugggcuaccugcagccuagaaccuuccugcugaaguacaacgagaacggcaccaucaccgacgccguggauugugcucuggauccucugagcgagacaaagugcacccugaaguccuucaccguggaaaagggcaucuaccagaccagcaacuuccgggugcagcccaccgaauccaucgugcgguuccccaauaucaccaaucugugccccuucggcgagguguucaaugccaccagauucgccucuguguacgccuggaaccggaagcggaucagcaauugcguggccgacuacuccgugcuguacaacuccgccagcuucagcaccuucaagugcuacggcguguccccuaccaagcugaacgaccugugcuucacaaacguguacgccgacagcuucgugauccggggagaugaagugcggcagauugccccuggacagacaggcaagaucgccgacuacaacuacaagcugcccgacgacuucaccggcugugugauugccuggaacagcaacaaccuggacuccaaagucggcggcaacuacaauuaccuguuccggcuguuccggaaguccaaucugaagcccuucgagcgggacaucagcaccgaaaucuaucaggccggcagcaccccuugcaacggcguggaaggcuucaacugcuacuucccacugcaguccuacggcuuucagcccacaaauggcgugggcuaucagcccuacagagugguggugcugagcuucgaacugcugcaugcuccugccacagugugcggcccuaagaaaagcaccaaucucgugaagaacaaaugcgugaacuucaacuucaacggccugaccggcaccggcgugcugacagagagcaacaagaaguuccugccauuccagcaguuuggccgggauaucgccgauaccacagacgccguuagagauccccagacacuggaaauccuggacaucaccccaugcagcuucggcggagugucugugaucaccccuggcaccaacaccagcaaucagguggcagugcuguaccagggcgugaacuguaccgaagugcccguggccauucacgccgaucagcugacaccuacauggcggguguacuccaccggcagcaauguguuucagaccagagccggcugucugaucggagccgagcacgugaacaauagcuacgagugcgacauccccaucggcgcuggcaucugugccagcuaccagacacagacaaacagccccagacgggcuagaagcguggccagccagagcgugauugccuacacaaugucucugggcgccgagaacagcguggccuacuccaacaacucuaucgcuauccccaccaacuucaccaucagcgugaccaccgagauccugccuguguccaugaccaagaccagcguggacugcaccauguacaucugcggcgauuccaccgagugcuccaaccugcugcugcaguacggcagcuucugcacccagcugaauagagcccugacagggaucgccguggaacaggacaagaacacccaagagguguucgcccaagugaagcaaaucuacaagaccccuccuaucaaggacuucggcggcuucaauuucagccagauucugcccgauccuagcaagcccagcaagcggagcuucaucgaggaccugcuguucaacaaagugacacuggccgacgccggcuucaucaagcaguauggcgauugucugggcgacauugccgccagggaucugauuugcgcccagaaguuuaacggacugacagugcugccuccucugcugaccgaugagaugaucgcccaguacacaucugcccugcuggccggcacaaucacaagcggcuggacauuuggagcuggcgccgcucugcagauccccuuugcuaugcagauggccuaccgguucaacggcaucggagugacccagaaugugcuguacgagaaccagaagcugaucgccaaccaguucaacagcgccaucggcaagauccaggacagccugagcagcacagcaagcgcccugggaaagcugcaggacguggucaaccagaaugcccaggcacugaacacccuggucaagcagcuguccuccaacuucggcgccaucagcucugugcugaacgauauccugagcagacuggacaaggucgaggccgaggugcagaucgacagacugaucacaggcagacugcagagccuccagacauacgugacccagcagcugaucagagccgccgagauuagagccucugccaaucuggccgccaccaagaugucugagugugugcugggccagagcaagagaguggacuuuugcggcaagggcuaccaccugaugagcuucccucagucugccccucacggcgugguguuucugcacgugacauaugugcccgcucaagagaagaauuucaccaccgcuccagccaucugccacgacggcaaagcccacuuuccuagagaaggcguguucguguccaacggcacccauugguucgugacacagcggaacuucuacgagccccagaucaucaccaccgacaacaccuucgugucuggcaacugcgacguugugaucggcauugugaacaauaccguguacgacccucugcagcccgagcuggacagcuucaaagaggaacuggacaaguacuuuaagaaccacacaagccccgacguggaccugggcgauaucagcggaaucaaugccagcgucgugaacauccagaaagagaucgaccggcugaacgagguggccaagaaucugaacgagagccugaucgaccugcaagaacuggggaaguacgagcaguacaucaaguggcccugguacaucuggcugggcuuuaucgccggacugauugccaucgugaucgucacaaucaugcuguguugcaugaccagcugcuguagcugccugaagggcuguuguagcuguggcagcugcugcaaguucgacgaggacgauucugagcccgugcugaagggcgugaaacugcacuacaccugaggacuaguuauaagacugacuagcccgaugggccucccaacgggcccuccuccccuccuugcaccgagauuaauagaucucaaaggcucuuuucagagccaccaaaaaaaaaaaaaaaaaaaaaaaaaaaaaaaaaaaaaaaaaaaaaaaaaaaaaaaaaaaaaaaaaaaaaaaaaaaaaaaaaaaaaaaaaaaaaaaaaaaaa

SEQ ID NO: 24373 - RNA, 4032 nt, Artificial Sequence
  SARS-CoV-2/Wuhan/WIV05/2019__EPI_ISL_402128 spike protein mRNA gc mod (1-1273)(H69del_V70del_Y144del_N501Y_A570D_D614G_P681H_T716I_S982 A_D1118H)
aggagaaagcuuaccauguucguguuucuggugcugcugccccugguguccagccagugugugaaccugaccaccagaacacagcugccuccagccuacaccaacagcuucaccagaggcguguacuaccccgacaagguguucagauccagcgugcugcacucuacccaggaccuguuccugccuuucuucagcaacgugaccugguuccacgccaucuccggcaccaauggcaccaagagauucgacaaccccgugcugcccuucaacgacgggguguacuuugccagcaccgagaaguccaacaucaucagaggcuggaucuucggcaccacacuggacagcaagacccagagccugcugaucgugaacaacgccaccaacguggucaucaaagugugcgaguuccaguucugcaacgaccccuuccugggcgucuaccacaagaacaacaagagcuggauggaaagcgaguuccggguguacagcagcgccaacaacugcaccuucgaguacgugucccagccuuuccugauggaccuggaaggcaagcagggcaacuucaagaaccugcgcgaguucguguucaagaacaucgacggcuacuucaaaaucuacagcaagcacaccccuaucaaccucgugcgggaucugccucagggcuucucugcucuggaaccccugguggaucugcccaucggcaucaacaucacccgguuucagacacugcuggcccugcacagaagcuaccugacaccuggcgauagcagcagcggauggacagcuggugccgccgcuuacuaugugggcuaccugcagccuagaaccuuccugcugaaguacaacgagaacggcaccaucaccgacgccguggauugugcucuggauccucugagcgagacaaagugcacccugaaguccuucaccguggaaaagggcaucuaccagaccagcaacuuccgggugcagcccaccgaauccaucgugcgguuccccaauaucaccaaucugugccccuucggcgagguguucaaugccaccagauucgccucuguguacgccuggaaccggaagcggaucagcaauugcguggccgacuacuccgugcuguacaacuccgccagcuucagcaccuucaagugcuacggcguguccccuaccaagcugaacgaccugugcuucacaaacguguacgccgacagcuucgugauccggggagaugaagugcggcagauugccccuggacagacaggcaagaucgccgacuacaacuacaagcugcccgacgacuucaccggcugugugauugccuggaacagcaacaaccuggacuccaaagucggcggcaacuacaauuaccuguaccggcuguuccggaaguccaaucugaagcccuucgagcgggacaucagcaccgaaaucuaucaggccggcagcaccccuugcaacggcguggaaggcuucaacugcuacuucccacugcaguccuacggcuuucagcccacauacggcgugggcuaucagcccuacagagugguggugcugagcuucgaacugcugcaugcuccugccacagugugcggcccuaagaaaagcaccaaucucgugaagaacaaaugcgugaacuucaacuucaacggccugaccggcaccggcgugcugacagagagcaacaagaaguuccugccauuccagcaguuuggccgggauaucgacgauaccacagacgccguuagagauccccagacacuggaaauccuggacaucaccccaugcagcuucggcggagugucugugaucaccccuggcaccaacaccagcaaucagguggcagugcuguaccagggcgugaacuguaccgaagugcccguggccauucacgccgaucagcugacaccuacauggcggguguacuccaccggcagcaauguguuucagaccagagccggcugucugaucggagccgagcacgugaacaauagcuacgagugcgacauccccaucggcgcuggcaucugugccagcuaccagacacagacaaacagccacagacgggcuagaagcguggccagccagagcaucauugccuacacaaugucucugggcgccgagaacagcguggccuacuccaacaacucuaucgcuauccccaucaacuucaccaucagcgugaccaccgagauccugccuguguccaugaccaagaccagcguggacugcaccauguacaucugcggcgauuccaccgagugcuccaaccugcugcugcaguacggcagcuucugcacccagcugaauagagcccugacagggaucgccguggaacaggacaagaacacccaagagguguucgcccaagugaagcaaaucuacaagaccccuccuaucaaggacuucggcggcuucaauuucagccagauucugcccgauccuagcaagcccagcaagcggagcuucaucgaggaccugcuguucaacaaagugacacuggccgacgccggcuucaucaagcaguauggcgauugucugggcgacauugccgccagggaucugauuugcgcccagaaguuuaacggacugacagugcugccuccucugcugaccgaugagaugaucgcccaguacacaucugcccugcuggccggcacaaucacaagcggcuggacauuuggagcuggcgccgcucugcagauccccuuugcuaugcagauggccuaccgguucaacggcaucggagugacccagaaugugcuguacgagaaccagaagcugaucgccaaccaguucaacagcgccaucggcaagauccaggacagccugagcagcacagcaagcgcccugggaaagcugcaggacguggucaaccagaaugcccaggcacugaacacccuggucaagcagcuguccuccaacuucggcgccaucagcucugugcugaacgauauccuggccagacuggacaaggucgaggccgaggugcagaucgacagacugaucacaggcagacugcagagccuccagacauacgugacccagcagcugaucagagccgccgagauuagagccucugccaaucuggccgccaccaagaugucugagugugugcugggccagagcaagagaguggacuuuugcggcaagggcuaccaccugaugagcuucccucagucugccccucacggcgugguguuucugcacgugacauaugugcccgcucaagagaagaauuucaccaccgcuccagccaucugccacgacggcaaagcccacuuuccuagagaaggcguguucguguccaacggcacccauugguucgugacacagcggaacuucuacgagccccagaucaucaccacccacaacaccuucgugucuggcaacugcgacguugugaucggcauugugaacaauaccguguacgacccucugcagcccgagcuggacagcuucaaagaggaacuggacaaguacuuuaagaaccacacaagccccgacguggaccugggcgauaucagcggaaucaaugccagcgucgugaacauccagaaagagaucgaccggcugaacgagguggccaagaaucugaacgagagccugaucgaccugcaagaacuggggaaguacgagcaguacaucaaguggcccugguacaucuggcugggcuuuaucgccggacugauugccaucgugauggucacaaucaugcuguguugcaugaccagcugcuguagcugccugaagggcuguuguagcuguggcagcugcugcaaguucgacgaggacgauucugagcccgugcugaagggcgugaaacugcacuacaccugaggacuaguuauaagacugacuagcccgaugggccucccaacgggcccuccuccccuccuugcaccgagauuaauagaucucaaaggcucuuuucagagccaccaaaaaaaaaaaaaaaaaaaaaaaaaaaaaaaaaaaaaaaaaaaaaaaaaaaaaaaaaaaaaaaaaaaaaaaaaaaaaaaaaaaaaaaaaaaaaaaaaaaaa

SEQ ID NO: 24374 - RNA, 4041 nt, Artificial Sequence
  SARS-CoV-2/Wuhan/WIV05/2019__EPI_ISL_402128 spike protein mRNA gc mod (1-1273)(K417N_E484K_N501Y_D614G)
aggagaaagcuuaccauguucguguuucuggugcugcugccccugguguccagccagugugugaaccugaccaccagaacacagcugccuccagccuacaccaacagcuucaccagaggcguguacuaccccgacaagguguucagauccagcgugcugcacucuacccaggaccuguuccugccuuucuucagcaacgugaccugguuccacgccauccacguguccggcaccaauggcaccaagagauucgacaaccccgugcugcccuucaacgacgggguguacuuugccagcaccgagaaguccaacaucaucagaggcuggaucuucggcaccacacuggacagcaagacccagagccugcugaucgugaacaacgccaccaacguggucaucaaagugugcgaguuccaguucugcaacgaccccuuccugggcgucuacuaccacaagaacaacaagagcuggauggaaagcgaguuccggguguacagcagcgccaacaacugcaccuucgaguacgugucccagccuuuccugauggaccuggaaggcaagcagggcaacuucaagaaccugcgcgaguucguguucaagaacaucgacggcuacuucaaaaucuacagcaagcacaccccuaucaaccucgugcgggaucugccucagggcuucucugcucuggaaccccugguggaucugcccaucggcaucaacaucacccgguuucagacacugcuggcccugcacagaagcuaccugacaccuggcgauagcagcagcggauggacagcuggugccgccgcuuacuaugugggcuaccugcagccuagaaccuuccugcugaaguacaacgagaacggcaccaucaccgacgccguggauugugcucuggauccucugagcgagacaaagugcacccugaaguccuucaccguggaaaagggcaucuaccagaccagcaacuuccgggugcagcccaccgaauccaucgugcgguuccccaauaucaccaaucugugccccuucggcgagguguucaaugccaccagauucgccucuguguacgccuggaaccggaagcggaucagcaauugcguggccgacuacuccgugcuguacaacuccgccagcuucagcaccuucaagugcuacggcguguccccuaccaagcugaacgaccugugcuucacaaacguguacgccgacagcuucgugauccggggagaugaagugcggcagauugccccuggacagacaggcaacaucgccgacuacaacuacaagcugcccgacgacuucaccggcugugugauugccuggaacagcaacaaccuggacuccaaagucggcggcaacuacaauuaccuguaccggcuguuccggaaguccaaucugaagcccuucgagcgggacaucagcaccgaaaucuaucaggccggcagcaccccuugcaacggcgugaagggcuucaacugcuacuucccacugcaguccuacggcuuucagcccacauacggcgugggcuaucagcccuacagagugguggugcugagcuucgaacugcugcaugcuccugccacagugugcggcccuaagaaaagcaccaaucucgugaagaacaaaugcgugaacuucaacuucaacggccugaccggcaccggcgugcugacagagagcaacaagaaguuccugccauuccagcaguuuggccgggauaucgccgauaccacagacgccguuagagauccccagacacuggaaauccuggacaucaccccaugcagcuucggcggagugucugugaucaccccuggcaccaacaccagcaaucagguggcagugcuguaccagggcgugaacuguaccgaagugcccguggccauucacgccgaucagcugacaccuacauggcggguguacuccaccggcagcaauguguuucagaccagagccggcugucugaucggagccgagcacgugaacaauagcuacgagugcgacauccccaucggcgcuggcaucugugccagcuaccagacacagacaaacagccccagacgggcuagaagcguggccagccagagcaucauugccuacacaaugucucugggcgccgagaacagcguggccuacuccaacaacucuaucgcuauccccaccaacuucaccaucagcgugaccaccgagauccugccuguguccaugaccaagaccagcguggacugcaccauguacaucugcggcgauuccaccgagugcuccaaccugcugcugcaguacggcagcuucugcacccagcugaauagagcccugacagggaucgccguggaacaggacaagaacacccaagagguguucgcccaagugaagcaaaucuacaagaccccuccuaucaaggacuucggcggcuucaauuucagccagauucugcccgauccuagcaagcccagcaagcggagcuucaucgaggaccugcuguucaacaaagugacacuggccgacgccggcuucaucaagcaguauggcgauugucugggcgacauugccgccagggaucugauuugcgcccagaaguuuaacggacugacagugcugccuccucugcugaccgaugagaugaucgcccaguacacaucugcccugcuggccggcacaaucacaagcggcuggacauuuggagcuggcgccgcucugcagauccccuuugcuaugcagauggccuaccgguucaacggcaucggagugacccagaaugugcuguacgagaaccagaagcugaucgccaaccaguucaacagcgccaucggcaagauccaggacagccugagcagcacagcaagcgcccugggaaagcugcaggacguggucaaccagaaugcccaggcacugaacacccuggucaagcagcuguccuccaacuucggcgccaucagcucugugcugaacgauauccugagcagacuggacaaggucgaggccgaggugcagaucgacagacugaucacaggcagacugcagagccuccagacauacgugacccagcagcugaucagagccgccgagauuagagccucugccaaucuggccgccaccaagaugucugagugugugcugggccagagcaagagaguggacuuuugcggcaagggcuaccaccugaugagcuucccucagucugccccucacggcgugguguuucugcacgugacauaugugcccgcucaagagaagaauuucaccaccgcuccagccaucugccacgacggcaaagcccacuuuccuagagaaggcguguucguguccaacggcacccauugguucgugacacagcggaacuucuacgagccccagaucaucaccaccgacaacaccuucgugucuggcaacugcgacguugugaucggcauugugaacaauaccguguacgacccucugcagcccgagcuggacagcuucaaagaggaacuggacaaguacuuuaagaaccacacaagccccgacguggaccugggcgauaucagcggaaucaaugccagcgucgugaacauccagaaagagaucgaccggcugaacgagguggccaagaaucugaacgagagccugaucgaccugcaagaacuggggaaguacgagcaguacaucaaguggcccugguacaucuggcugggcuuuaucgccggacugauugccaucgugauggucacaaucaugcuguguugcaugaccagcugcuguagcugccugaagggcuguuguagcuguggcagcugcugcaaguucgacgaggacgauucugagcccgugcugaagggcgugaaacugcacuacaccugaggacuaguuauaagacugacuagcccgaugggccucccaacgggcccuccuccccuccuugcaccgagauuaauagaucucaaaggcucuuuucagagccaccaaaaaaaaaaaaaaaaaaaaaaaaaaaaaaaaaaaaaaaaaaaaaaaaaaaaaaaaaaaaaaaaaaaaaaaaaaaaaaaaaaaaaaaaaaaaaaaaaaaaa

SEQ ID NO: 24375 - RNA, 4032 nt, Artificial Sequence
  SARS-CoV-2/Wuhan/WIV05/2019__EPI_ISL_402128 spike protein mRNA gc mod (1-1273)(L18F_D80A_D215G_L242del_A243del_L244del_R246I_K417N_E484 K_N501Y_D614G_A701V)
aggagaaagcuuaccauguucguguuucuggugcugcugccccugguguccagccagugugugaacuucaccaccagaacacagcugccuccagccuacaccaacagcuucaccagaggcguguacuaccccgacaagguguucagauccagcgugcugcacucuacccaggaccuguuccugccuuucuucagcaacgugaccugguuccacgccauccacguguccggcaccaauggcaccaagagauucgccaaccccgugcugcccuucaacgacgggguguacuuugccagcaccgagaaguccaacaucaucagaggcuggaucuucggcaccacacuggacagcaagacccagagccugcugaucgugaacaacgccaccaacguggucaucaaagugugcgaguuccaguucugcaacgaccccuuccugggcgucuacuaccacaagaacaacaagagcuggauggaaagcgaguuccggguguacagcagcgccaacaacugcaccuucgaguacgugucccagccuuuccugauggaccuggaaggcaagcagggcaacuucaagaaccugcgcgaguucguguucaagaacaucgacggcuacuucaaaaucuacagcaagcacaccccuaucaaccucgugcggggccugccucagggcuucucugcucuggaaccccugguggaucugcccaucggcaucaacaucacccgguuucagacacugcacaucagcuaccugacaccuggcgauagcagcagcggauggacagcuggugccgccgcuuacuaugugggcuaccugcagccuagaaccuuccugcugaaguacaacgagaacggcaccaucaccgacgccguggauugugcucuggauccucugagcgagacaaagugcacccugaaguccuucaccguggaaaagggcaucuaccagaccagcaacuuccgggugcagcccaccgaauccaucgugcgguuccccaauaucaccaaucugugccccuucggcgagguguucaaugccaccagauucgccucuguguacgccuggaaccggaagcggaucagcaauugcguggccgacuacuccgugcuguacaacuccgccagcuucagcaccuucaagugcuacggcguguccccuaccaagcugaacgaccugugcuucacaaacguguacgccgacagcuucgugauccggggagaugaagugcggcagauugccccuggacagacaggcaacaucgccgacuacaacuacaagcugcccgacgacuucaccggcugugugauugccuggaacagcaacaaccuggacuccaaagucggcggcaacuacaauuaccuguaccggcuguuccggaaguccaaucugaagcccuucgagcgggacaucagcaccgaaaucuaucaggccggcagcaccccuugcaacggcgugaagggcuucaacugcuacuucccacugcaguccuacggcuuucagcccacauacggcgugggcuaucagcccuacagagugguggugcugagcuucgaacugcugcaugcuccugccacagugugcggcccuaagaaaagcaccaaucucgugaagaacaaaugcgugaacuucaacuucaacggccugaccggcaccggcgugcugacagagagcaacaagaaguuccugccauuccagcaguuuggccgggauaucgccgauaccacagacgccguuagagauccccagacacuggaaauccuggacaucaccccaugcagcuucggcggagugucugugaucaccccuggcaccaacaccagcaaucagguggcagugcuguaccagggcgugaacuguaccgaagugcccguggccauucacgccgaucagcugacaccuacauggcggguguacuccaccggcagcaauguguuucagaccagagccggcugucugaucggagccgagcacgugaacaauagcuacgagugcgacauccccaucggcgcuggcaucugugccagcuaccagacacagacaaacagccccagacgggcuagaagcguggccagccagagcaucauugccuacacaaugucucugggcguggagaacagcguggccuacuccaacaacucuaucgcuauccccaccaacuucaccaucagcgugaccaccgagauccugccuguguccaugaccaagaccagcguggacugcaccauguacaucugcggcgauuccaccgagugcuccaaccugcugcugcaguacggcagcuucugcacccagcugaauagagcccugacagggaucgccguggaacaggacaagaacacccaagagguguucgcccaagugaagcaaaucuacaagaccccuccuaucaaggacuucggcggcuucaauuucagccagauucugcccgauccuagcaagcccagcaagcggagcuucaucgaggaccugcuguucaacaaagugacacuggccgacgccggcuucaucaagcaguauggcgauugucugggcgacauugccgccagggaucugauuugcgcccagaaguuuaacggacugacagugcugccuccucugcugaccgaugagaugaucgcccaguacacaucugcccugcuggccggcacaaucacaagcggcuggacauuuggagcuggcgccgcucugcagauccccuuugcuaugcagauggccuaccgguucaacggcaucggagugacccagaaugugcuguacgagaaccagaagcugaucgccaaccaguucaacagcgccaucggcaagauccaggacagccugagcagcacagcaagcgcccugggaaagcugcaggacguggucaaccagaaugcccaggcacugaacacccuggucaagcagcuguccuccaacuucggcgccaucagcucugugcugaacgauauccugagcagacuggacaaggucgaggccgaggugcagaucgacagacugaucacaggcagacugcagagccuccagacauacgugacccagcagcugaucagagccgccgagauuagagccucugccaaucuggccgccaccaagaugucugagugugugcugggccagagcaagagaguggacuuuugcggcaagggcuaccaccugaugagcuucccucagucugccccucacggcgugguguuucugcacgugacauaugugcccgcucaagagaagaauuucaccaccgcuccagccaucugccacgacggcaaagcccacuuuccuagagaaggcguguucguguccaacggcacccauugguucgugacacagcggaacuucuacgagccccagaucaucaccaccgacaacaccuucgugucuggcaacugcgacguugugaucggcauugugaacaauaccguguacgacccucugcagcccgagcuggacagcuucaaagaggaacuggacaaguacuuuaagaaccacacaagccccgacguggaccugggcgauaucagcggaaucaaugccagcgucgugaacauccagaaagagaucgaccggcugaacgagguggccaagaaucugaacgagagccugaucgaccugcaagaacuggggaaguacgagcaguacaucaaguggcccugguacaucuggcugggcuuuaucgccggacugauugccaucgugauggucacaaucaugcuguguugcaugaccagcugcuguagcugccugaagggcuguuguagcuguggcagcugcugcaaguucgacgaggacgauucugagcccgugcugaagggcgugaaacugcacuacaccugaggacuaguuauaagacugacuagcccgaugggccucccaacgggcccuccuccccuccuugcaccgagauuaauagaucucaaaggcucuuuucagagccaccaaaaaaaaaaaaaaaaaaaaaaaaaaaaaaaaaaaaaaaaaaaaaaaaaaaaaaaaaaaaaaaaaaaaaaaaaaaaaaaaaaaaaaaaaaaaaaaaaaaaa

SEQ ID NO: 24376 - RNA, 4041 nt, Artificial Sequence
  SARS-CoV-2/Wuhan/WIV05/2019__EPI_ISL_402128 spike protein mRNA gc mod (1-1273)(E484K_D614G)
aggagaaagcuuaccauguucguguuucuggugcugcugccccugguguccagccagugugugaaccugaccaccagaacacagcugccuccagccuacaccaacagcuucaccagaggcguguacuaccccgacaagguguucagauccagcgugcugcacucuacccaggaccuguuccugccuuucuucagcaacgugaccugguuccacgccauccacguguccggcaccaauggcaccaagagauucgacaaccccgugcugcccuucaacgacgggguguacuuugccagcaccgagaaguccaacaucaucagaggcuggaucuucggcaccacacuggacagcaagacccagagccugcugaucgugaacaacgccaccaacguggucaucaaagugugcgaguuccaguucugcaacgaccccuuccugggcgucuacuaccacaagaacaacaagagcuggauggaaagcgaguuccggguguacagcagcgccaacaacugcaccuucgaguacgugucccagccuuuccugauggaccuggaaggcaagcagggcaacuucaagaaccugcgcgaguucguguucaagaacaucgacggcuacuucaaaaucuacagcaagcacaccccuaucaaccucgugcgggaucugccucagggcuucucugcucuggaaccccugguggaucugcccaucggcaucaacaucacccgguuucagacacugcuggcccugcacagaagcuaccugacaccuggcgauagcagcagcggauggacagcuggugccgccgcuuacuaugugggcuaccugcagccuagaaccuuccugcugaaguacaacgagaacggcaccaucaccgacgccguggauugugcucuggauccucugagcgagacaaagugcacccugaaguccuucaccguggaaaagggcaucuaccagaccagcaacuuccgggugcagcccaccgaauccaucgugcgguuccccaauaucaccaaucugugccccuucggcgagguguucaaugccaccagauucgccucuguguacgccuggaaccggaagcggaucagcaauugcguggccgacuacuccgugcuguacaacuccgccagcuucagcaccuucaagugcuacggcguguccccuaccaagcugaacgaccugugcuucacaaacguguacgccgacagcuucgugauccggggagaugaagugcggcagauugccccuggacagacaggcaagaucgccgacuacaacuacaagcugcccgacgacuucaccggcugugugauugccuggaacagcaacaaccuggacuccaaagucggcggcaacuacaauuaccuguaccggcuguuccggaaguccaaucugaagcccuucgagcgggacaucagcaccgaaaucuaucaggccggcagcaccccuugcaacggcgugaagggcuucaacugcuacuucccacugcaguccuacggcuuucagcccacaaauggcgugggcuaucagcccuacagagugguggugcugagcuucgaacugcugcaugcuccugccacagugugcggcccuaagaaaagcaccaaucucgugaagaacaaaugcgugaacuucaacuucaacggccugaccggcaccggcgugcugacagagagcaacaagaaguuccugccauuccagcaguuuggccgggauaucgccgauaccacagacgccguuagagauccccagacacuggaaauccuggacaucaccccaugcagcuucggcggagugucugugaucaccccuggcaccaacaccagcaaucagguggcagugcuguaccagggcgugaacuguaccgaagugcccguggccauucacgccgaucagcugacaccuacauggcggguguacuccaccggcagcaauguguuucagaccagagccggcugucugaucggagccgagcacgugaacaauagcuacgagugcgacauccccaucggcgcuggcaucugugccagcuaccagacacagacaaacagccccagacgggcuagaagcguggccagccagagcaucauugccuacacaaugucucugggcgccgagaacagcguggccuacuccaacaacucuaucgcuauccccaccaacuucaccaucagcgugaccaccgagauccugccuguguccaugaccaagaccagcguggacugcaccauguacaucugcggcgauuccaccgagugcuccaaccugcugcugcaguacggcagcuucugcacccagcugaauagagcccugacagggaucgccguggaacaggacaagaacacccaagagguguucgcccaagugaagcaaaucuacaagaccccuccuaucaaggacuucggcggcuucaauuucagccagauucugcccgauccuagcaagcccagcaagcggagcuucaucgaggaccugcuguucaacaaagugacacuggccgacgccggcuucaucaagcaguauggcgauugucugggcgacauugccgccagggaucugauuugcgcccagaaguuuaacggacugacagugcugccuccucugcugaccgaugagaugaucgcccaguacacaucugcccugcuggccggcacaaucacaagcggcuggacauuuggagcuggcgccgcucugcagauccccuuugcuaugcagauggccuaccgguucaacggcaucggagugacccagaaugugcuguacgagaaccagaagcugaucgccaaccaguucaacagcgccaucggcaagauccaggacagccugagcagcacagcaagcgcccugggaaagcugcaggacguggucaaccagaaugcccaggcacugaacacccuggucaagcagcuguccuccaacuucggcgccaucagcucugugcugaacgauauccugagcagacuggacaaggucgaggccgaggugcagaucgacagacugaucacaggcagacugcagagccuccagacauacgugacccagcagcugaucagagccgccgagauuagagccucugccaaucuggccgccaccaagaugucugagugugugcugggccagagcaagagaguggacuuuugcggcaagggcuaccaccugaugagcuucccucagucugccccucacggcgugguguuucugcacgugacauaugugcccgcucaagagaagaauuucaccaccgcuccagccaucugccacgacggcaaagcccacuuuccuagagaaggcguguucguguccaacggcacccauugguucgugacacagcggaacuucuacgagccccagaucaucaccaccgacaacaccuucgugucuggcaacugcgacguugugaucggcauugugaacaauaccguguacgacccucugcagcccgagcuggacagcuucaaagaggaacuggacaaguacuuuaagaaccacacaagccccgacguggaccugggcgauaucagcggaaucaaugccagcgucgugaacauccagaaagagaucgaccggcugaacgagguggccaagaaucugaacgagagccugaucgaccugcaagaacuggggaaguacgagcaguacaucaaguggcccugguacaucuggcugggcuuuaucgccggacugauugccaucgugauggucacaaucaugcuguguugcaugaccagcugcuguagcugccugaagggcuguuguagcuguggcagcugcugcaaguucgacgaggacgauucugagcccgugcugaagggcgugaaacugcacuacaccugaggacuaguuauaagacugacuagcccgaugggccucccaacgggcccuccuccccuccuugcaccgagauuaauagaucucaaaggcucuuuucagagccaccaaaaaaaaaaaaaaaaaaaaaaaaaaaaaaaaaaaaaaaaaaaaaaaaaaaaaaaaaaaaaaaaaaaaaaaaaaaaaaaaaaaaaaaaaaaaaaaaaaaaa

SEQ ID NO: 24377 - RNA, 4041 nt, Artificial Sequence
  SARS-CoV-2/Wuhan/WIV05/2019__EPI_ISL_402128 spike protein mRNA gc mod (1-1273)(L18F_T20N_P26S_D138Y_R190S_K417T_E484K_N501Y_D614G_H655Y _T1027I)
aggagaaagcuuaccauguucguguuucuggugcugcugccccugguguccagccagugugugaacuucaccaacagaacacagcugccuagcgccuacaccaacagcuucaccagaggcguguacuaccccgacaagguguucagauccagcgugcugcacucuacccaggaccuguuccugccuuucuucagcaacgugaccugguuccacgccauccacguguccggcaccaauggcaccaagagauucgacaaccccgugcugcccuucaacgacgggguguacuuugccagcaccgagaaguccaacaucaucagaggcuggaucuucggcaccacacuggacagcaagacccagagccugcugaucgugaacaacgccaccaacguggucaucaaagugugcgaguuccaguucugcaacuaccccuuccugggcgucuacuaccacaagaacaacaagagcuggauggaaagcgaguuccggguguacagcagcgccaacaacugcaccuucgaguacgugucccagccuuuccugauggaccuggaaggcaagcagggcaacuucaagaaccugagcgaguucguguucaagaacaucgacggcuacuucaaaaucuacagcaagcacaccccuaucaaccucgugcgggaucugccucagggcuucucugcucuggaaccccugguggaucugcccaucggcaucaacaucacccgguuucagacacugcuggcccugcacagaagcuaccugacaccuggcgauagcagcagcggauggacagcuggugccgccgcuuacuaugugggcuaccugcagccuagaaccuuccugcugaaguacaacgagaacggcaccaucaccgacgccguggauugugcucuggauccucugagcgagacaaagugcacccugaaguccuucaccguggaaaagggcaucuaccagaccagcaacuuccgggugcagcccaccgaauccaucgugcgguuccccaauaucaccaaucugugccccuucggcgagguguucaaugccaccagauucgccucuguguacgccuggaaccggaagcggaucagcaauugcguggccgacuacuccgugcuguacaacuccgccagcuucagcaccuucaagugcuacggcguguccccuaccaagcugaacgaccugugcuucacaaacguguacgccgacagcuucgugauccggggagaugaagugcggcagauugccccuggacagacaggcaccaucgccgacuacaacuacaagcugcccgacgacuucaccggcugugugauugccuggaacagcaacaaccuggacuccaaagucggcggcaacuacaauuaccuguaccggcuguuccggaaguccaaucugaagcccuucgagcgggacaucagcaccgaaaucuaucaggccggcagcaccccuugcaacggcgugaagggcuucaacugcuacuucccacugcaguccuacggcuuucagcccacauacggcgugggcuaucagcccuacagagugguggugcugagcuucgaacugcugcaugcuccugccacagugugcggcccuaagaaaagcaccaaucucgugaagaacaaaugcgugaacuucaacuucaacggccugaccggcaccggcgugcugacagagagcaacaagaaguuccugccauuccagcaguuuggccgggauaucgccgauaccacagacgccguuagagauccccagacacuggaaauccuggacaucaccccaugcagcuucggcggagugucugugaucaccccuggcaccaacaccagcaaucagguggcagugcuguaccagggcgugaacuguaccgaagugcccguggccauucacgccgaucagcugacaccuacauggcggguguacuccaccggcagcaauguguuucagaccagagccggcugucugaucggagccgaguacgugaacaauagcuacgagugcgacauccccaucggcgcuggcaucugugccagcuaccagacacagacaaacagccccagacgggcuagaagcguggccagccagagcaucauugccuacacaaugucucugggcgccgagaacagcguggccuacuccaacaacucuaucgcuauccccaccaacuucaccaucagcgugaccaccgagauccugccuguguccaugaccaagaccagcguggacugcaccauguacaucugcggcgauuccaccgagugcuccaaccugcugcugcaguacggcagcuucugcacccagcugaauagagcccugacagggaucgccguggaacaggacaagaacacccaagagguguucgcccaagugaagcaaaucuacaagaccccuccuaucaaggacuucggcggcuucaauuucagccagauucugcccgauccuagcaagcccagcaagcggagcuucaucgaggaccugcuguucaacaaagugacacuggccgacgccggcuucaucaagcaguauggcgauugucugggcgacauugccgccagggaucugauuugcgcccagaaguuuaacggacugacagugcugccuccucugcugaccgaugagaugaucgcccaguacacaucugcccugcuggccggcacaaucacaagcggcuggacauuuggagcuggcgccgcucugcagauccccuuugcuaugcagauggccuaccgguucaacggcaucggagugacccagaaugugcuguacgagaaccagaagcugaucgccaaccaguucaacagcgccaucggcaagauccaggacagccugagcagcacagcaagcgcccugggaaagcugcaggacguggucaaccagaaugcccaggcacugaacacccuggucaagcagcuguccuccaacuucggcgccaucagcucugugcugaacgauauccugagcagacuggacaaggucgaggccgaggugcagaucgacagacugaucacaggcagacugcagagccuccagacauacgugacccagcagcugaucagagccgccgagauuagagccucugccaaucuggccgccaucaagaugucugagugugugcugggccagagcaagagaguggacuuuugcggcaagggcuaccaccugaugagcuucccucagucugccccucacggcgugguguuucugcacgugacauaugugcccgcucaagagaagaauuucaccaccgcuccagccaucugccacgacggcaaagcccacuuuccuagagaaggcguguucguguccaacggcacccauugguucgugacacagcggaacuucuacgagccccagaucaucaccaccgacaacaccuucgugucuggcaacugcgacguugugaucggcauugugaacaauaccguguacgacccucugcagcccgagcuggacagcuucaaagaggaacuggacaaguacuuuaagaaccacacaagccccgacguggaccugggcgauaucagcggaaucaaugccagcgucgugaacauccagaaagagaucgaccggcugaacgagguggccaagaaucugaacgagagccugaucgaccugcaagaacuggggaaguacgagcaguacaucaaguggcccugguacaucuggcugggcuuuaucgccggacugauugccaucgugauggucacaaucaugcuguguugcaugaccagcugcuguagcugccugaagggcuguuguagcuguggcagcugcugcaaguucgacgaggacgauucugagcccgugcugaagggcgugaaacugcacuacaccugaggacuaguuauaagacugacuagcccgaugggccucccaacgggcccuccuccccuccuugcaccgagauuaauagaucucaaaggcucuuuucagagccaccaaaaaaaaaaaaaaaaaaaaaaaaaaaaaaaaaaaaaaaaaaaaaaaaaaaaaaaaaaaaaaaaaaaaaaaaaaaaaaaaaaaaaaaaaaaaaaaaaaaaa

SEQ ID NO: 24378 - RNA, 4041 nt, Artificial Sequence
  SARS-CoV-2/Wuhan/WIV05/2019__EPI_ISL_402128 spike protein mRNA gc mod (1-1273)(S13I_W152C_L452R_D614G)
aggagaaagcuuaccauguucguguuucuggugcugcugccccugguguccauccagugugugaaccugaccaccagaacacagcugccuccagccuacaccaacagcuucaccagaggcguguacuaccccgacaagguguucagauccagcgugcugcacucuacccaggaccuguuccugccuuucuucagcaacgugaccugguuccacgccauccacguguccggcaccaauggcaccaagagauucgacaaccccgugcugcccuucaacgacgggguguacuuugccagcaccgagaaguccaacaucaucagaggcuggaucuucggcaccacacuggacagcaagacccagagccugcugaucgugaacaacgccaccaacguggucaucaaagugugcgaguuccaguucugcaacgaccccuuccugggcgucuacuaccacaagaacaacaagagcugcauggaaagcgaguuccggguguacagcagcgccaacaacugcaccuucgaguacgugucccagccuuuccugauggaccuggaaggcaagcagggcaacuucaagaaccugcgcgaguucguguucaagaacaucgacggcuacuucaaaaucuacagcaagcacaccccuaucaaccucgugcgggaucugccucagggcuucucugcucuggaaccccugguggaucugcccaucggcaucaacaucacccgguuucagacacugcuggcccugcacagaagcuaccugacaccuggcgauagcagcagcggauggacagcuggugccgccgcuuacuaugugggcuaccugcagccuagaaccuuccugcugaaguacaacgagaacggcaccaucaccgacgccguggauugugcucuggauccucugagcgagacaaagugcacccugaaguccuucaccguggaaaagggcaucuaccagaccagcaacuuccgggugcagcccaccgaauccaucgugcgguuccccaauaucaccaaucugugccccuucggcgagguguucaaugccaccagauucgccucuguguacgccuggaaccggaagcggaucagcaauugcguggccgacuacuccgugcuguacaacuccgccagcuucagcaccuucaagugcuacggcguguccccuaccaagcugaacgaccugugcuucacaaacguguacgccgacagcuucgugauccggggagaugaagugcggcagauugccccuggacagacaggcaagaucgccgacuacaacuacaagcugcccgacgacuucaccggcugugugauugccuggaacagcaacaaccuggacuccaaagucggcggcaacuacaauuaccgcuaccggcuguuccggaaguccaaucugaagcccuucgagcgggacaucagcaccgaaaucuaucaggccggcagcaccccuugcaacggcguggaaggcuucaacugcuacuucccacugcaguccuacggcuuucagcccacaaauggcgugggcuaucagcccuacagagugguggugcugagcuucgaacugcugcaugcuccugccacagugugcggcccuaagaaaagcaccaaucucgugaagaacaaaugcgugaacuucaacuucaacggccugaccggcaccggcgugcugacagagagcaacaagaaguuccugccauuccagcaguuuggccgggauaucgccgauaccacagacgccguuagagauccccagacacuggaaauccuggacaucaccccaugcagcuucggcggagugucugugaucaccccuggcaccaacaccagcaaucagguggcagugcuguaccagggcgugaacuguaccgaagugcccguggccauucacgccgaucagcugacaccuacauggcggguguacuccaccggcagcaauguguuucagaccagagccggcugucugaucggagccgagcacgugaacaauagcuacgagugcgacauccccaucggcgcuggcaucugugccagcuaccagacacagacaaacagccccagacgggcuagaagcguggccagccagagcaucauugccuacacaaugucucugggcgccgagaacagcguggccuacuccaacaacucuaucgcuauccccaccaacuucaccaucagcgugaccaccgagauccugccuguguccaugaccaagaccagcguggacugcaccauguacaucugcggcgauuccaccgagugcuccaaccugcugcugcaguacggcagcuucugcacccagcugaauagagcccugacagggaucgccguggaacaggacaagaacacccaagagguguucgcccaagugaagcaaaucuacaagaccccuccuaucaaggacuucggcggcuucaauuucagccagauucugcccgauccuagcaagcccagcaagcggagcuucaucgaggaccugcuguucaacaaagugacacuggccgacgccggcuucaucaagcaguauggcgauugucugggcgacauugccgccagggaucugauuugcgcccagaaguuuaacggacugacagugcugccuccucugcugaccgaugagaugaucgcccaguacacaucugcccugcuggccggcacaaucacaagcggcuggacauuuggagcuggcgccgcucugcagauccccuuugcuaugcagauggccuaccgguucaacggcaucggagugacccagaaugugcuguacgagaaccagaagcugaucgccaaccaguucaacagcgccaucggcaagauccaggacagccugagcagcacagcaagcgcccugggaaagcugcaggacguggucaaccagaaugcccaggcacugaacacccuggucaagcagcuguccuccaacuucggcgccaucagcucugugcugaacgauauccugagcagacuggacaaggucgaggccgaggugcagaucgacagacugaucacaggcagacugcagagccuccagacauacgugacccagcagcugaucagagccgccgagauuagagccucugccaaucuggccgccaccaagaugucugagugugugcugggccagagcaagagaguggacuuuugcggcaagggcuaccaccugaugagcuucccucagucugccccucacggcgugguguuucugcacgugacauaugugcccgcucaagagaagaauuucaccaccgcuccagccaucugccacgacggcaaagcccacuuuccuagagaaggcguguucguguccaacggcacccauugguucgugacacagcggaacuucuacgagccccagaucaucaccaccgacaacaccuucgugucuggcaacugcgacguugugaucggcauugugaacaauaccguguacgacccucugcagcccgagcuggacagcuucaaagaggaacuggacaaguacuuuaagaaccacacaagccccgacguggaccugggcgauaucagcggaaucaaugccagcgucgugaacauccagaaagagaucgaccggcugaacgagguggccaagaaucugaacgagagccugaucgaccugcaagaacuggggaaguacgagcaguacaucaaguggcccugguacaucuggcugggcuuuaucgccggacugauugccaucgugauggucacaaucaugcuguguugcaugaccagcugcuguagcugccugaagggcuguuguagcuguggcagcugcugcaaguucgacgaggacgauucugagcccgugcugaagggcgugaaacugcacuacaccugaggacuaguuauaagacugacuagcccgaugggccucccaacgggcccuccuccccuccuugcaccgagauuaauagaucucaaaggcucuuuucagagccaccaaaaaaaaaaaaaaaaaaaaaaaaaaaaaaaaaaaaaaaaaaaaaaaaaaaaaaaaaaaaaaaaaaaaaaaaaaaaaaaaaaaaaaaaaaaaaaaaaaaaa

SEQ ID NO: 24379 - RNA, 4041 nt, Artificial Sequence
  SARS-CoV-2/Wuhan/WIV05/2019__EPI_ISL_402128 spike protein mRNA gc mod (1-1273)
aggagaaagcuuaccauguucguguuccuggugcugcugccucugguguccagccagugugugaaccugaccaccagaacacagcugccuccagccuacaccaacagcuuuaccagaggcguguacuaccccgacaagguguucagauccagcgugcugcacucuacccaggaccuguuccugccuuucuucagcaacgugaccugguuccacgccauccacguguccggcaccaauggcaccaagagauucgacaaccccgugcugcccuucaacgacgggguguacuuugccagcaccgagaaguccaacaucaucagaggcuggaucuucggcaccacacuggacagcaagacccagagccugcugaucgugaacaacgccaccaacguggucaucaaagugugcgaguuccaguucugcaacgaccccuuccugggcgucuacuaccacaagaacaacaagagcuggauggaaagcgaguuccggguguacagcagcgccaacaacugcaccuucgaguacgugucccagccuuuccugauggaccuggaaggcaagcagggcaacuucaagaaccugcgcgaguucguguuuaagaacaucgacggcuacuucaagaucuacagcaagcacaccccuaucaaccucgugcgggaucugccucagggcuucucugcucuggaaccccugguggaucugcccaucggcaucaacaucacccgguuucagacacugcuggcccugcacagaagcuaccugacaccuggcgauagcagcagcggauggacagcuggugccgccgcuuacuaugugggcuaccugcagccuagaaccuuccugcugaaguacaacgagaacggcaccaucaccgacgccguggauugugcucuggauccucugagcgagacaaagugcacccugaaguccuucaccguggaaaagggcaucuaccagaccagcaacuuccgggugcagcccaccgaauccaucgugcgguuccccaauaucaccaaucugugccccuucggcgagguguucaaugccaccagauucgccucuguguacgccuggaaccggaagcggaucagcaauugcguggccgacuacuccgugcuguacaacuccgccagcuucagcaccuucaagugcuacggcguguccccuaccaagcugaacgaccugugcuucacaaacguguacgccgacagcuucgugauccggggagaugaagugcggcagauugccccuggacagacaggcaagaucgccgacuacaacuacaagcugcccgacgacuucaccggcugugugauugccuggaacagcaacaaccuggacuccaaagucggcggcaacuacaauuaccuguaccggcuguuccggaaguccaaucugaagcccuucgagcgggacaucuccaccgagaucuaucaggccggcagcaccccuuguaacggcguggaaggcuucaacugcuacuucccacugcaguccuacggcuuucagcccacaaauggcgugggcuaucagcccuacagagugguggugcugagcuucgaacugcugcaugccccugccacagugugcggcccuaagaaaagcaccaaucucgugaagaacaaaugcgugaacuucaacuucaacggccugaccggcaccggcgugcugacagagagcaacaagaaguuccugccauuccagcaguuuggccgggauaucgccgauaccacagacgccguuagagauccccagacacuggaaauccuggacaucaccccuugcagcuucggcggagugucugugaucaccccuggcaccaacaccagcaaucagguggcagugcuguaccaggacgugaacuguaccgaagugcccguggccauucacgccgaucagcugacaccuacauggcggguguacuccaccggcagcaauguguuucagaccagagccggcugucugaucggagccgagcacgugaacaauagcuacgagugcgacauccccaucggcgcuggaaucugcgccagcuaccagacacagacaaacagcccucggagagccagaagcguggccagccagagcaucauugccuacacaaugucucugggcgccgagaacagcguggccuacuccaacaacucuaucgcuauccccaccaacuucaccaucagcgugaccacagagauccugccuguguccaugaccaagaccagcguggacugcaccauguacaucugcggcgauuccaccgagugcuccaaccugcugcugcaguacggcagcuucugcacccagcugaauagagcccugacagggaucgccguggaacaggacaagaacacccaagagguguucgcccaagugaagcagaucuacaagaccccuccuaucaaggacuucggcggcuucaauuucagccagauucugcccgauccuagcaagcccagcaagcggagcuucaucgaggaccugcuguucaacaaagugacacuggccgacgccggcuucaucaagcaguauggcgauugucugggcgacauugccgccagggaucugauuugcgcccagaaguuuaacggacugacagugcugccuccucugcugaccgaugagaugaucgcccaguacacaucugcccugcuggccggcacaaucacaagcggcuggacauuuggagcaggcgccgcucugcagauccccuuugcuaugcagauggccuaccgguucaacggcaucggagugacccagaaugugcuguacgagaaccagaagcugaucgccaaccaguucaacagcgccaucggcaagauccaggacagccugagcagcacagcaagcgcccugggaaagcugcaggacguggucaaccagaaugcccaggcacugaacacccuggucaagcagcuguccuccaacuucggcgccaucagcucugugcugaacgauauccugagcagacuggacaaggucgaggccgaggugcagaucgacagacugaucacaggcagacugcagagccuccagacauacgugacccagcagcugaucagagccgccgagauuagagccucugccaaucuggccgccaccaagaugucugagugugugcugggccagagcaagagaguggacuuuugcggcaagggcuaccaccugaugagcuucccucagucugccccucacggcgugguguuucugcacgugacauaugugcccgcucaagagaagaauuucaccaccgcuccagccaucugccacgacggcaaagcccacuuuccuagagaaggcguguucguguccaacggcacccauugguucgugacacagcggaacuucuacgagccccagaucaucaccaccgacaacaccuucgugucuggcaacugcgacgucgugaucggcauugugaacaauaccguguacgacccucugcagcccgagcuggacagcuucaaagaggaacuggacaaguacuuuaagaaccacacaagccccgacguggaccugggcgauaucagcggaaucaaugccagcgucgugaacauccagaaagagaucgaccggcugaacgagguggccaagaaucugaacgagagccugaucgaccugcaagaacuggggaaguacgagcaguacaucaaguggcccugguacaucuggcugggcuuuaucgccggacugauugccaucgugauggucacaaucaugcuguguugcaugaccagcugcuguagcugccugaagggcuguuguagcuguggcagcugcugcaaguucgacgaggacgauucugagcccgugcugaagggcgugaaacugcacuacacaugaggacuaguuauaagacugacuagcccgaugggccucccaacgggcccuccuccccuccuugcaccgagauuaauagaucucaaaggcucuuuucagagccaccaaaaaaaaaaaaaaaaaaaaaaaaaaaaaaaaaaaaaaaaaaaaaaaaaaaaaaaaaaaaaaaaaaaaaaaaaaaaaaaaaaaaaaaaaaaaaaaaaaaaa

SEQ ID NO: 24380 - RNA, 4041 nt, Artificial Sequence
  SARS-CoV-2/Wuhan/WIV05/2019__EPI_ISL_402128 spike protein mRNA gc mod (1-1273)(D614G)
aggagaaagcuuaccauguucguguuccuggugcugcugccucugguguccagccagugugugaaccugaccaccagaacacagcugccuccagccuacaccaacagcuuuaccagaggcguguacuaccccgacaagguguucagauccagcgugcugcacucuacccaggaccuguuccugccuuucuucagcaacgugaccugguuccacgccauccacguguccggcaccaauggcaccaagagauucgacaaccccgugcugcccuucaacgacgggguguacuuugccagcaccgagaaguccaacaucaucagaggcuggaucuucggcaccacacuggacagcaagacccagagccugcugaucgugaacaacgccaccaacguggucaucaaagugugcgaguuccaguucugcaacgaccccuuccugggcgucuacuaccacaagaacaacaagagcuggauggaaagcgaguuccggguguacagcagcgccaacaacugcaccuucgaguacgugucccagccuuuccugauggaccuggaaggcaagcagggcaacuucaagaaccugcgcgaguucguguuuaagaacaucgacggcuacuucaagaucuacagcaagcacaccccuaucaaccucgugcgggaucugccucagggcuucucugcucuggaaccccugguggaucugcccaucggcaucaacaucacccgguuucagacacugcuggcccugcacagaagcuaccugacaccuggcgauagcagcagcggauggacagcuggugccgccgcuuacuaugugggcuaccugcagccuagaaccuuccugcugaaguacaacgagaacggcaccaucaccgacgccguggauugugcucuggauccucugagcgagacaaagugcacccugaaguccuucaccguggaaaagggcaucuaccagaccagcaacuuccgggugcagcccaccgaauccaucgugcgguuccccaauaucaccaaucugugccccuucggcgagguguucaaugccaccagauucgccucuguguacgccuggaaccggaagcggaucagcaauugcguggccgacuacuccgugcuguacaacuccgccagcuucagcaccuucaagugcuacggcguguccccuaccaagcugaacgaccugugcuucacaaacguguacgccgacagcuucgugauccggggagaugaagugcggcagauugccccuggacagacaggcaagaucgccgacuacaacuacaagcugcccgacgacuucaccggcugugugauugccuggaacagcaacaaccuggacuccaaagucggcggcaacuacaauuaccuguaccggcuguuccggaaguccaaucugaagcccuucgagcgggacaucuccaccgagaucuaucaggccggcagcaccccuuguaacggcguggaaggcuucaacugcuacuucccacugcaguccuacggcuuucagcccacaaauggcgugggcuaucagcccuacagagugguggugcugagcuucgaacugcugcaugccccugccacagugugcggcccuaagaaaagcaccaaucucgugaagaacaaaugcgugaacuucaacuucaacggccugaccggcaccggcgugcugacagagagcaacaagaaguuccugccauuccagcaguuuggccgggauaucgccgauaccacagacgccguuagagauccccagacacuggaaauccuggacaucaccccuugcagcuucggcggagugucugugaucaccccuggcaccaacaccagcaaucagguggcagugcuguaccagggcgugaacuguaccgaagugcccguggccauucacgccgaucagcugacaccuacauggcggguguacuccaccggcagcaauguguuucagaccagagccggcugucugaucggagccgagcacgugaacaauagcuacgagugcgacauccccaucggcgcuggaaucugcgccagcuaccagacacagacaaacagcccucggagagccagaagcguggccagccagagcaucauugccuacacaaugucucugggcgccgagaacagcguggccuacuccaacaacucuaucgcuauccccaccaacuucaccaucagcgugaccacagagauccugccuguguccaugaccaagaccagcguggacugcaccauguacaucugcggcgauuccaccgagugcuccaaccugcugcugcaguacggcagcuucugcacccagcugaauagagcccugacagggaucgccguggaacaggacaagaacacccaagagguguucgcccaagugaagcagaucuacaagaccccuccuaucaaggacuucggcggcuucaauuucagccagauucugcccgauccuagcaagcccagcaagcggagcuucaucgaggaccugcuguucaacaaagugacacuggccgacgccggcuucaucaagcaguauggcgauugucugggcgacauugccgccagggaucugauuugcgcccagaaguuuaacggacugacagugcugccuccucugcugaccgaugagaugaucgcccaguacacaucugcccugcuggccggcacaaucacaagcggcuggacauuuggagcaggcgccgcucugcagauccccuuugcuaugcagauggccuaccgguucaacggcaucggagugacccagaaugugcuguacgagaaccagaagcugaucgccaaccaguucaacagcgccaucggcaagauccaggacagccugagcagcacagcaagcgcccugggaaagcugcaggacguggucaaccagaaugcccaggcacugaacacccuggucaagcagcuguccuccaacuucggcgccaucagcucugugcugaacgauauccugagcagacuggacaaggucgaggccgaggugcagaucgacagacugaucacaggcagacugcagagccuccagacauacgugacccagcagcugaucagagccgccgagauuagagccucugccaaucuggccgccaccaagaugucugagugugugcugggccagagcaagagaguggacuuuugcggcaagggcuaccaccugaugagcuucccucagucugccccucacggcgugguguuucugcacgugacauaugugcccgcucaagagaagaauuucaccaccgcuccagccaucugccacgacggcaaagcccacuuuccuagagaaggcguguucguguccaacggcacccauugguucgugacacagcggaacuucuacgagccccagaucaucaccaccgacaacaccuucgugucuggcaacugcgacgucgugaucggcauugugaacaauaccguguacgacccucugcagcccgagcuggacagcuucaaagaggaacuggacaaguacuuuaagaaccacacaagccccgacguggaccugggcgauaucagcggaaucaaugccagcgucgugaacauccagaaagagaucgaccggcugaacgagguggccaagaaucugaacgagagccugaucgaccugcaagaacuggggaaguacgagcaguacaucaaguggcccugguacaucuggcugggcuuuaucgccggacugauugccaucgugauggucacaaucaugcuguguugcaugaccagcugcuguagcugccugaagggcuguuguagcuguggcagcugcugcaaguucgacgaggacgauucugagcccgugcugaagggcgugaaacugcacuacacaugaggacuaguuauaagacugacuagcccgaugggccucccaacgggcccuccuccccuccuugcaccgagauuaauagaucucaaaggcucuuuucagagccaccaaaaaaaaaaaaaaaaaaaaaaaaaaaaaaaaaaaaaaaaaaaaaaaaaaaaaaaaaaaaaaaaaaaaaaaaaaaaaaaaaaaaaaaaaaaaaaaaaaaaa

SEQ ID NO: 24381 - RNA, 4041 nt, Artificial Sequence
  SARS-CoV-2/Wuhan/WIV05/2019__EPI_ISL_402128 spike protein mRNA gc mod (1-1273)(A222V_D614G)
aggagaaagcuuaccauguucguguuccuggugcugcugccucugguguccagccagugugugaaccugaccaccagaacacagcugccuccagccuacaccaacagcuuuaccagaggcguguacuaccccgacaagguguucagauccagcgugcugcacucuacccaggaccuguuccugccuuucuucagcaacgugaccugguuccacgccauccacguguccggcaccaauggcaccaagagauucgacaaccccgugcugcccuucaacgacgggguguacuuugccagcaccgagaaguccaacaucaucagaggcuggaucuucggcaccacacuggacagcaagacccagagccugcugaucgugaacaacgccaccaacguggucaucaaagugugcgaguuccaguucugcaacgaccccuuccugggcgucuacuaccacaagaacaacaagagcuggauggaaagcgaguuccggguguacagcagcgccaacaacugcaccuucgaguacgugucccagccuuuccugauggaccuggaaggcaagcagggcaacuucaagaaccugcgcgaguucguguuuaagaacaucgacggcuacuucaagaucuacagcaagcacaccccuaucaaccucgugcgggaucugccucagggcuucucugugcuggaaccccugguggaucugcccaucggcaucaacaucacccgguuucagacacugcuggcccugcacagaagcuaccugacaccuggcgauagcagcagcggauggacagcuggugccgccgcuuacuaugugggcuaccugcagccuagaaccuuccugcugaaguacaacgagaacggcaccaucaccgacgccguggauugugcucuggauccucugagcgagacaaagugcacccugaaguccuucaccguggaaaagggcaucuaccagaccagcaacuuccgggugcagcccaccgaauccaucgugcgguuccccaauaucaccaaucugugccccuucggcgagguguucaaugccaccagauucgccucuguguacgccuggaaccggaagcggaucagcaauugcguggccgacuacuccgugcuguacaacuccgccagcuucagcaccuucaagugcuacggcguguccccuaccaagcugaacgaccugugcuucacaaacguguacgccgacagcuucgugauccggggagaugaagugcggcagauugccccuggacagacaggcaagaucgccgacuacaacuacaagcugcccgacgacuucaccggcugugugauugccuggaacagcaacaaccuggacuccaaagucggcggcaacuacaauuaccuguaccggcuguuccggaaguccaaucugaagcccuucgagcgggacaucuccaccgagaucuaucaggccggcagcaccccuuguaacggcguggaaggcuucaacugcuacuucccacugcaguccuacggcuuucagcccacaaauggcgugggcuaucagcccuacagagugguggugcugagcuucgaacugcugcaugccccugccacagugugcggcccuaagaaaagcaccaaucucgugaagaacaaaugcgugaacuucaacuucaacggccugaccggcaccggcgugcugacagagagcaacaagaaguuccugccauuccagcaguuuggccgggauaucgccgauaccacagacgccguuagagauccccagacacuggaaauccuggacaucaccccuugcagcuucggcggagugucugugaucaccccuggcaccaacaccagcaaucagguggcagugcuguaccagggcgugaacuguaccgaagugcccguggccauucacgccgaucagcugacaccuacauggcggguguacuccaccggcagcaauguguuucagaccagagccggcugucugaucggagccgagcacgugaacaauagcuacgagugcgacauccccaucggcgcuggaaucugcgccagcuaccagacacagacaaacagcccucggagagccagaagcguggccagccagagcaucauugccuacacaaugucucugggcgccgagaacagcguggccuacuccaacaacucuaucgcuauccccaccaacuucaccaucagcgugaccacagagauccugccuguguccaugaccaagaccagcguggacugcaccauguacaucugcggcgauuccaccgagugcuccaaccugcugcugcaguacggcagcuucugcacccagcugaauagagcccugacagggaucgccguggaacaggacaagaacacccaagagguguucgcccaagugaagcagaucuacaagaccccuccuaucaaggacuucggcggcuucaauuucagccagauucugcccgauccuagcaagcccagcaagcggagcuucaucgaggaccugcuguucaacaaagugacacuggccgacgccggcuucaucaagcaguauggcgauugucugggcgacauugccgccagggaucugauuugcgcccagaaguuuaacggacugacagugcugccuccucugcugaccgaugagaugaucgcccaguacacaucugcccugcuggccggcacaaucacaagcggcuggacauuuggagcaggcgccgcucugcagauccccuuugcuaugcagauggccuaccgguucaacggcaucggagugacccagaaugugcuguacgagaaccagaagcugaucgccaaccaguucaacagcgccaucggcaagauccaggacagccugagcagcacagcaagcgcccugggaaagcugcaggacguggucaaccagaaugcccaggcacugaacacccuggucaagcagcuguccuccaacuucggcgccaucagcucugugcugaacgauauccugagcagacuggacaaggucgaggccgaggugcagaucgacagacugaucacaggcagacugcagagccuccagacauacgugacccagcagcugaucagagccgccgagauuagagccucugccaaucuggccgccaccaagaugucugagugugugcugggccagagcaagagaguggacuuuugcggcaagggcuaccaccugaugagcuucccucagucugccccucacggcgugguguuucugcacgugacauaugugcccgcucaagagaagaauuucaccaccgcuccagccaucugccacgacggcaaagcccacuuuccuagagaaggcguguucguguccaacggcacccauugguucgugacacagcggaacuucuacgagccccagaucaucaccaccgacaacaccuucgugucuggcaacugcgacgucgugaucggcauugugaacaauaccguguacgacccucugcagcccgagcuggacagcuucaaagaggaacuggacaaguacuuuaagaaccacacaagccccgacguggaccugggcgauaucagcggaaucaaugccagcgucgugaacauccagaaagagaucgaccggcugaacgagguggccaagaaucugaacgagagccugaucgaccugcaagaacuggggaaguacgagcaguacaucaaguggcccugguacaucuggcugggcuuuaucgccggacugauugccaucgugauggucacaaucaugcuguguugcaugaccagcugcuguagcugccugaagggcuguuguagcuguggcagcugcugcaaguucgacgaggacgauucugagcccgugcugaagggcgugaaacugcacuacacaugaggacuaguuauaagacugacuagcccgaugggccucccaacgggcccuccuccccuccuugcaccgagauuaauagaucucaaaggcucuuuucagagccaccaaaaaaaaaaaaaaaaaaaaaaaaaaaaaaaaaaaaaaaaaaaaaaaaaaaaaaaaaaaaaaaaaaaaaaaaaaaaaaaaaaaaaaaaaaaaaaaaaaaaa

SEQ ID NO: 24382 - RNA, 4041 nt, Artificial Sequence
  SARS-CoV-2/Wuhan/WIV05/2019__EPI_ISL_402128 spike protein mRNA gc mod (1-1273)(N439K_D614G)
aggagaaagcuuaccauguucguguuccuggugcugcugccucugguguccagccagugugugaaccugaccaccagaacacagcugccuccagccuacaccaacagcuuuaccagaggcguguacuaccccgacaagguguucagauccagcgugcugcacucuacccaggaccuguuccugccuuucuucagcaacgugaccugguuccacgccauccacguguccggcaccaauggcaccaagagauucgacaaccccgugcugcccuucaacgacgggguguacuuugccagcaccgagaaguccaacaucaucagaggcuggaucuucggcaccacacuggacagcaagacccagagccugcugaucgugaacaacgccaccaacguggucaucaaagugugcgaguuccaguucugcaacgaccccuuccugggcgucuacuaccacaagaacaacaagagcuggauggaaagcgaguuccggguguacagcagcgccaacaacugcaccuucgaguacgugucccagccuuuccugauggaccuggaaggcaagcagggcaacuucaagaaccugcgcgaguucguguuuaagaacaucgacggcuacuucaagaucuacagcaagcacaccccuaucaaccucgugcgggaucugccucagggcuucucugcucuggaaccccugguggaucugcccaucggcaucaacaucacccgguuucagacacugcuggcccugcacagaagcuaccugacaccuggcgauagcagcagcggauggacagcuggugccgccgcuuacuaugugggcuaccugcagccuagaaccuuccugcugaaguacaacgagaacggcaccaucaccgacgccguggauugugcucuggauccucugagcgagacaaagugcacccugaaguccuucaccguggaaaagggcaucuaccagaccagcaacuuccgggugcagcccaccgaauccaucgugcgguuccccaauaucaccaaucugugccccuucggcgagguguucaaugccaccagauucgccucuguguacgccuggaaccggaagcggaucagcaauugcguggccgacuacuccgugcuguacaacuccgccagcuucagcaccuucaagugcuacggcguguccccuaccaagcugaacgaccugugcuucacaaacguguacgccgacagcuucgugauccggggagaugaagugcggcagauugccccuggacagacaggcaagaucgccgacuacaacuacaagcugcccgacgacuucaccggcugugugauugccuggaacagcaagaaccuggacuccaaagucggcggcaacuacaauuaccuguaccggcuguuccggaaguccaaucugaagcccuucgagcgggacaucuccaccgagaucuaucaggccggcagcaccccuuguaacggcguggaaggcuucaacugcuacuucccacugcaguccuacggcuuucagcccacaaauggcgugggcuaucagcccuacagagugguggugcugagcuucgaacugcugcaugccccugccacagugugcggcccuaagaaaagcaccaaucucgugaagaacaaaugcgugaacuucaacuucaacggccugaccggcaccggcgugcugacagagagcaacaagaaguuccugccauuccagcaguuuggccgggauaucgccgauaccacagacgccguuagagauccccagacacuggaaauccuggacaucaccccuugcagcuucggcggagugucugugaucaccccuggcaccaacaccagcaaucagguggcagugcuguaccagggcgugaacuguaccgaagugcccguggccauucacgccgaucagcugacaccuacauggcggguguacuccaccggcagcaauguguuucagaccagagccggcugucugaucggagccgagcacgugaacaauagcuacgagugcgacauccccaucggcgcuggaaucugcgccagcuaccagacacagacaaacagcccucggagagccagaagcguggccagccagagcaucauugccuacacaaugucucugggcgccgagaacagcguggccuacuccaacaacucuaucgcuauccccaccaacuucaccaucagcgugaccacagagauccugccuguguccaugaccaagaccagcguggacugcaccauguacaucugcggcgauuccaccgagugcuccaaccugcugcugcaguacggcagcuucugcacccagcugaauagagcccugacagggaucgccguggaacaggacaagaacacccaagagguguucgcccaagugaagcagaucuacaagaccccuccuaucaaggacuucggcggcuucaauuucagccagauucugcccgauccuagcaagcccagcaagcggagcuucaucgaggaccugcuguucaacaaagugacacuggccgacgccggcuucaucaagcaguauggcgauugucugggcgacauugccgccagggaucugauuugcgcccagaaguuuaacggacugacagugcugccuccucugcugaccgaugagaugaucgcccaguacacaucugcccugcuggccggcacaaucacaagcggcuggacauuuggagcaggcgccgcucugcagauccccuuugcuaugcagauggccuaccgguucaacggcaucggagugacccagaaugugcuguacgagaaccagaagcugaucgccaaccaguucaacagcgccaucggcaagauccaggacagccugagcagcacagcaagcgcccugggaaagcugcaggacguggucaaccagaaugcccaggcacugaacacccuggucaagcagcuguccuccaacuucggcgccaucagcucugugcugaacgauauccugagcagacuggacaaggucgaggccgaggugcagaucgacagacugaucacaggcagacugcagagccuccagacauacgugacccagcagcugaucagagccgccgagauuagagccucugccaaucuggccgccaccaagaugucugagugugugcugggccagagcaagagaguggacuuuugcggcaagggcuaccaccugaugagcuucccucagucugccccucacggcgugguguuucugcacgugacauaugugcccgcucaagagaagaauuucaccaccgcuccagccaucugccacgacggcaaagcccacuuuccuagagaaggcguguucguguccaacggcacccauugguucgugacacagcggaacuucuacgagccccagaucaucaccaccgacaacaccuucgugucuggcaacugcgacgucgugaucggcauugugaacaauaccguguacgacccucugcagcccgagcuggacagcuucaaagaggaacuggacaaguacuuuaagaaccacacaagccccgacguggaccugggcgauaucagcggaaucaaugccagcgucgugaacauccagaaagagaucgaccggcugaacgagguggccaagaaucugaacgagagccugaucgaccugcaagaacuggggaaguacgagcaguacaucaaguggcccugguacaucuggcugggcuuuaucgccggacugauugccaucgugauggucacaaucaugcuguguugcaugaccagcugcuguagcugccugaagggcuguuguagcuguggcagcugcugcaaguucgacgaggacgauucugagcccgugcugaagggcgugaaacugcacuacacaugaggacuaguuauaagacugacuagcccgaugggccucccaacgggcccuccuccccuccuugcaccgagauuaauagaucucaaaggcucuuuucagagccaccaaaaaaaaaaaaaaaaaaaaaaaaaaaaaaaaaaaaaaaaaaaaaaaaaaaaaaaaaaaaaaaaaaaaaaaaaaaaaaaaaaaaaaaaaaaaaaaaaaaaa

SEQ ID NO: 24383 - RNA, 4041 nt, Artificial Sequence
  SARS-CoV-2/Wuhan/WIV05/2019__EPI_ISL_402128 spike protein mRNA gc mod (1-1273)(S477N_D614G)
aggagaaagcuuaccauguucguguuccuggugcugcugccucugguguccagccagugugugaaccugaccaccagaacacagcugccuccagccuacaccaacagcuuuaccagaggcguguacuaccccgacaagguguucagauccagcgugcugcacucuacccaggaccuguuccugccuuucuucagcaacgugaccugguuccacgccauccacguguccggcaccaauggcaccaagagauucgacaaccccgugcugcccuucaacgacgggguguacuuugccagcaccgagaaguccaacaucaucagaggcuggaucuucggcaccacacuggacagcaagacccagagccugcugaucgugaacaacgccaccaacguggucaucaaagugugcgaguuccaguucugcaacgaccccuuccugggcgucuacuaccacaagaacaacaagagcuggauggaaagcgaguuccggguguacagcagcgccaacaacugcaccuucgaguacgugucccagccuuuccugauggaccuggaaggcaagcagggcaacuucaagaaccugcgcgaguucguguuuaagaacaucgacggcuacuucaagaucuacagcaagcacaccccuaucaaccucgugcgggaucugccucagggcuucucugcucuggaaccccugguggaucugcccaucggcaucaacaucacccgguuucagacacugcuggcccugcacagaagcuaccugacaccuggcgauagcagcagcggauggacagcuggugccgccgcuuacuaugugggcuaccugcagccuagaaccuuccugcugaaguacaacgagaacggcaccaucaccgacgccguggauugugcucuggauccucugagcgagacaaagugcacccugaaguccuucaccguggaaaagggcaucuaccagaccagcaacuuccgggugcagcccaccgaauccaucgugcgguuccccaauaucaccaaucugugccccuucggcgagguguucaaugccaccagauucgccucuguguacgccuggaaccggaagcggaucagcaauugcguggccgacuacuccgugcuguacaacuccgccagcuucagcaccuucaagugcuacggcguguccccuaccaagcugaacgaccugugcuucacaaacguguacgccgacagcuucgugauccggggagaugaagugcggcagauugccccuggacagacaggcaagaucgccgacuacaacuacaagcugcccgacgacuucaccggcugugugauugccuggaacagcaacaaccuggacuccaaagucggcggcaacuacaauuaccuguaccggcuguuccggaaguccaaucugaagcccuucgagcgggacaucuccaccgagaucuaucaggccggcaacaccccuuguaacggcguggaaggcuucaacugcuacuucccacugcaguccuacggcuuucagcccacaaauggcgugggcuaucagcccuacagagugguggugcugagcuucgaacugcugcaugccccugccacagugugcggcccuaagaaaagcaccaaucucgugaagaacaaaugcgugaacuucaacuucaacggccugaccggcaccggcgugcugacagagagcaacaagaaguuccugccauuccagcaguuuggccgggauaucgccgauaccacagacgccguuagagauccccagacacuggaaauccuggacaucaccccuugcagcuucggcggagugucugugaucaccccuggcaccaacaccagcaaucagguggcagugcuguaccagggcgugaacuguaccgaagugcccguggccauucacgccgaucagcugacaccuacauggcggguguacuccaccggcagcaauguguuucagaccagagccggcugucugaucggagccgagcacgugaacaauagcuacgagugcgacauccccaucggcgcuggaaucugcgccagcuaccagacacagacaaacagcccucggagagccagaagcguggccagccagagcaucauugccuacacaaugucucugggcgccgagaacagcguggccuacuccaacaacucuaucgcuauccccaccaacuucaccaucagcgugaccacagagauccugccuguguccaugaccaagaccagcguggacugcaccauguacaucugcggcgauuccaccgagugcuccaaccugcugcugcaguacggcagcuucugcacccagcugaauagagcccugacagggaucgccguggaacaggacaagaacacccaagagguguucgcccaagugaagcagaucuacaagaccccuccuaucaaggacuucggcggcuucaauuucagccagauucugcccgauccuagcaagcccagcaagcggagcuucaucgaggaccugcuguucaacaaagugacacuggccgacgccggcuucaucaagcaguauggcgauugucugggcgacauugccgccagggaucugauuugcgcccagaaguuuaacggacugacagugcugccuccucugcugaccgaugagaugaucgcccaguacacaucugcccugcuggccggcacaaucacaagcggcuggacauuuggagcaggcgccgcucugcagauccccuuugcuaugcagauggccuaccgguucaacggcaucggagugacccagaaugugcuguacgagaaccagaagcugaucgccaaccaguucaacagcgccaucggcaagauccaggacagccugagcagcacagcaagcgcccugggaaagcugcaggacguggucaaccagaaugcccaggcacugaacacccuggucaagcagcuguccuccaacuucggcgccaucagcucugugcugaacgauauccugagcagacuggacaaggucgaggccgaggugcagaucgacagacugaucacaggcagacugcagagccuccagacauacgugacccagcagcugaucagagccgccgagauuagagccucugccaaucuggccgccaccaagaugucugagugugugcugggccagagcaagagaguggacuuuugcggcaagggcuaccaccugaugagcuucccucagucugccccucacggcgugguguuucugcacgugacauaugugcccgcucaagagaagaauuucaccaccgcuccagccaucugccacgacggcaaagcccacuuuccuagagaaggcguguucguguccaacggcacccauugguucgugacacagcggaacuucuacgagccccagaucaucaccaccgacaacaccuucgugucuggcaacugcgacgucgugaucggcauugugaacaauaccguguacgacccucugcagcccgagcuggacagcuucaaagaggaacuggacaaguacuuuaagaaccacacaagccccgacguggaccugggcgauaucagcggaaucaaugccagcgucgugaacauccagaaagagaucgaccggcugaacgagguggccaagaaucugaacgagagccugaucgaccugcaagaacuggggaaguacgagcaguacaucaaguggcccugguacaucuggcugggcuuuaucgccggacugauugccaucgugauggucacaaucaugcuguguugcaugaccagcugcuguagcugccugaagggcuguuguagcuguggcagcugcugcaaguucgacgaggacgauucugagcccgugcugaagggcgugaaacugcacuacacaugaggacuaguuauaagacugacuagcccgaugggccucccaacgggcccuccuccccuccuugcaccgagauuaauagaucucaaaggcucuuuucagagccaccaaaaaaaaaaaaaaaaaaaaaaaaaaaaaaaaaaaaaaaaaaaaaaaaaaaaaaaaaaaaaaaaaaaaaaaaaaaaaaaaaaaaaaaaaaaaaaaaaaaaa

SEQ ID NO: 24384 - RNA, 4041 nt, Artificial Sequence
  SARS-CoV-2/Wuhan/WIV05/2019__EPI_ISL_402128 spike protein mRNA gc mod (1-1273)(N501Y_D614G)
aggagaaagcuuaccauguucguguuccuggugcugcugccucugguguccagccagugugugaaccugaccaccagaacacagcugccuccagccuacaccaacagcuuuaccagaggcguguacuaccccgacaagguguucagauccagcgugcugcacucuacccaggaccuguuccugccuuucuucagcaacgugaccugguuccacgccauccacguguccggcaccaauggcaccaagagauucgacaaccccgugcugcccuucaacgacgggguguacuuugccagcaccgagaaguccaacaucaucagaggcuggaucuucggcaccacacuggacagcaagacccagagccugcugaucgugaacaacgccaccaacguggucaucaaagugugcgaguuccaguucugcaacgaccccuuccugggcgucuacuaccacaagaacaacaagagcuggauggaaagcgaguuccggguguacagcagcgccaacaacugcaccuucgaguacgugucccagccuuuccugauggaccuggaaggcaagcagggcaacuucaagaaccugcgcgaguucguguuuaagaacaucgacggcuacuucaagaucuacagcaagcacaccccuaucaaccucgugcgggaucugccucagggcuucucugcucuggaaccccugguggaucugcccaucggcaucaacaucacccgguuucagacacugcuggcccugcacagaagcuaccugacaccuggcgauagcagcagcggauggacagcuggugccgccgcuuacuaugugggcuaccugcagccuagaaccuuccugcugaaguacaacgagaacggcaccaucaccgacgccguggauugugcucuggauccucugagcgagacaaagugcacccugaaguccuucaccguggaaaagggcaucuaccagaccagcaacuuccgggugcagcccaccgaauccaucgugcgguuccccaauaucaccaaucugugccccuucggcgagguguucaaugccaccagauucgccucuguguacgccuggaaccggaagcggaucagcaauugcguggccgacuacuccgugcuguacaacuccgccagcuucagcaccuucaagugcuacggcguguccccuaccaagcugaacgaccugugcuucacaaacguguacgccgacagcuucgugauccggggagaugaagugcggcagauugccccuggacagacaggcaagaucgccgacuacaacuacaagcugcccgacgacuucaccggcugugugauugccuggaacagcaacaaccuggacuccaaagucggcggcaacuacaauuaccuguaccggcuguuccggaaguccaaucugaagcccuucgagcgggacaucuccaccgagaucuaucaggccggcagcaccccuuguaacggcguggaaggcuucaacugcuacuucccacugcaguccuacggcuuucagcccacauacggcgugggcuaucagcccuacagagugguggugcugagcuucgaacugcugcaugccccugccacagugugcggcccuaagaaaagcaccaaucucgugaagaacaaaugcgugaacuucaacuucaacggccugaccggcaccggcgugcugacagagagcaacaagaaguuccugccauuccagcaguuuggccgggauaucgccgauaccacagacgccguuagagauccccagacacuggaaauccuggacaucaccccuugcagcuucggcggagugucugugaucaccccuggcaccaacaccagcaaucagguggcagugcuguaccagggcgugaacuguaccgaagugcccguggccauucacgccgaucagcugacaccuacauggcggguguacuccaccggcagcaauguguuucagaccagagccggcugucugaucggagccgagcacgugaacaauagcuacgagugcgacauccccaucggcgcuggaaucugcgccagcuaccagacacagacaaacagcccucggagagccagaagcguggccagccagagcaucauugccuacacaaugucucugggcgccgagaacagcguggccuacuccaacaacucuaucgcuauccccaccaacuucaccaucagcgugaccacagagauccugccuguguccaugaccaagaccagcguggacugcaccauguacaucugcggcgauuccaccgagugcuccaaccugcugcugcaguacggcagcuucugcacccagcugaauagagcccugacagggaucgccguggaacaggacaagaacacccaagagguguucgcccaagugaagcagaucuacaagaccccuccuaucaaggacuucggcggcuucaauuucagccagauucugcccgauccuagcaagcccagcaagcggagcuucaucgaggaccugcuguucaacaaagugacacuggccgacgccggcuucaucaagcaguauggcgauugucugggcgacauugccgccagggaucugauuugcgcccagaaguuuaacggacugacagugcugccuccucugcugaccgaugagaugaucgcccaguacacaucugcccugcuggccggcacaaucacaagcggcuggacauuuggagcaggcgccgcucugcagauccccuuugcuaugcagauggccuaccgguucaacggcaucggagugacccagaaugugcuguacgagaaccagaagcugaucgccaaccaguucaacagcgccaucggcaagauccaggacagccugagcagcacagcaagcgcccugggaaagcugcaggacguggucaaccagaaugcccaggcacugaacacccuggucaagcagcuguccuccaacuucggcgccaucagcucugugcugaacgauauccugagcagacuggacaaggucgaggccgaggugcagaucgacagacugaucacaggcagacugcagagccuccagacauacgugacccagcagcugaucagagccgccgagauuagagccucugccaaucuggccgccaccaagaugucugagugugugcugggccagagcaagagaguggacuuuugcggcaagggcuaccaccugaugagcuucccucagucugccccucacggcgugguguuucugcacgugacauaugugcccgcucaagagaagaauuucaccaccgcuccagccaucugccacgacggcaaagcccacuuuccuagagaaggcguguucguguccaacggcacccauugguucgugacacagcggaacuucuacgagccccagaucaucaccaccgacaacaccuucgugucuggcaacugcgacgucgugaucggcauugugaacaauaccguguacgacccucugcagcccgagcuggacagcuucaaagaggaacuggacaaguacuuuaagaaccacacaagccccgacguggaccugggcgauaucagcggaaucaaugccagcgucgugaacauccagaaagagaucgaccggcugaacgagguggccaagaaucugaacgagagccugaucgaccugcaagaacuggggaaguacgagcaguacaucaaguggcccugguacaucuggcugggcuuuaucgccggacugauugccaucgugauggucacaaucaugcuguguugcaugaccagcugcuguagcugccugaagggcuguuguagcuguggcagcugcugcaaguucgacgaggacgauucugagcccgugcugaagggcgugaaacugcacuacacaugaggacuaguuauaagacugacuagcccgaugggccucccaacgggcccuccuccccuccuugcaccgagauuaauagaucucaaaggcucuuuucagagccaccaaaaaaaaaaaaaaaaaaaaaaaaaaaaaaaaaaaaaaaaaaaaaaaaaaaaaaaaaaaaaaaaaaaaaaaaaaaaaaaaaaaaaaaaaaaaaaaaaaaaa

SEQ ID NO: 24385 - RNA, 4035 nt, Artificial Sequence
  SARS-CoV-2/Wuhan/WIV05/2019__EPI_ISL_402128 spike protein mRNA gc mod (1-1273)(H69del_V70del_D614G)
aggagaaagcuuaccauguucguguuccuggugcugcugccucugguguccagccagugugugaaccugaccaccagaacacagcugccuccagccuacaccaacagcuuuaccagaggcguguacuaccccgacaagguguucagauccagcgugcugcacucuacccaggaccuguuccugccuuucuucagcaacgugaccugguuccacgccaucuccggcaccaauggcaccaagagauucgacaaccccgugcugcccuucaacgacgggguguacuuugccagcaccgagaaguccaacaucaucagaggcuggaucuucggcaccacacuggacagcaagacccagagccugcugaucgugaacaacgccaccaacguggucaucaaagugugcgaguuccaguucugcaacgaccccuuccugggcgucuacuaccacaagaacaacaagagcuggauggaaagcgaguuccggguguacagcagcgccaacaacugcaccuucgaguacgugucccagccuuuccugauggaccuggaaggcaagcagggcaacuucaagaaccugcgcgaguucguguuuaagaacaucgacggcuacuucaagaucuacagcaagcacaccccuaucaaccucgugcgggaucugccucagggcuucucugcucuggaaccccugguggaucugcccaucggcaucaacaucacccgguuucagacacugcuggcccugcacagaagcuaccugacaccuggcgauagcagcagcggauggacagcuggugccgccgcuuacuaugugggcuaccugcagccuagaaccuuccugcugaaguacaacgagaacggcaccaucaccgacgccguggauugugcucuggauccucugagcgagacaaagugcacccugaaguccuucaccguggaaaagggcaucuaccagaccagcaacuuccgggugcagcccaccgaauccaucgugcgguuccccaauaucaccaaucugugccccuucggcgagguguucaaugccaccagauucgccucuguguacgccuggaaccggaagcggaucagcaauugcguggccgacuacuccgugcuguacaacuccgccagcuucagcaccuucaagugcuacggcguguccccuaccaagcugaacgaccugugcuucacaaacguguacgccgacagcuucgugauccggggagaugaagugcggcagauugccccuggacagacaggcaagaucgccgacuacaacuacaagcugcccgacgacuucaccggcugugugauugccuggaacagcaacaaccuggacuccaaagucggcggcaacuacaauuaccuguaccggcuguuccggaaguccaaucugaagcccuucgagcgggacaucuccaccgagaucuaucaggccggcagcaccccuuguaacggcguggaaggcuucaacugcuacuucccacugcaguccuacggcuuucagcccacaaauggcgugggcuaucagcccuacagagugguggugcugagcuucgaacugcugcaugccccugccacagugugcggcccuaagaaaagcaccaaucucgugaagaacaaaugcgugaacuucaacuucaacggccugaccggcaccggcgugcugacagagagcaacaagaaguuccugccauuccagcaguuuggccgggauaucgccgauaccacagacgccguuagagauccccagacacuggaaauccuggacaucaccccuugcagcuucggcggagugucugugaucaccccuggcaccaacaccagcaaucagguggcagugcuguaccagggcgugaacuguaccgaagugcccguggccauucacgccgaucagcugacaccuacauggcggguguacuccaccggcagcaauguguuucagaccagagccggcugucugaucggagccgagcacgugaacaauagcuacgagugcgacauccccaucggcgcuggaaucugcgccagcuaccagacacagacaaacagcccucggagagccagaagcguggccagccagagcaucauugccuacacaaugucucugggcgccgagaacagcguggccuacuccaacaacucuaucgcuauccccaccaacuucaccaucagcgugaccacagagauccugccuguguccaugaccaagaccagcguggacugcaccauguacaucugcggcgauuccaccgagugcuccaaccugcugcugcaguacggcagcuucugcacccagcugaauagagcccugacagggaucgccguggaacaggacaagaacacccaagagguguucgcccaagugaagcagaucuacaagaccccuccuaucaaggacuucggcggcuucaauuucagccagauucugcccgauccuagcaagcccagcaagcggagcuucaucgaggaccugcuguucaacaaagugacacuggccgacgccggcuucaucaagcaguauggcgauugucugggcgacauugccgccagggaucugauuugcgcccagaaguuuaacggacugacagugcugccuccucugcugaccgaugagaugaucgcccaguacacaucugcccugcuggccggcacaaucacaagcggcuggacauuuggagcaggcgccgcucugcagauccccuuugcuaugcagauggccuaccgguucaacggcaucggagugacccagaaugugcuguacgagaaccagaagcugaucgccaaccaguucaacagcgccaucggcaagauccaggacagccugagcagcacagcaagcgcccugggaaagcugcaggacguggucaaccagaaugcccaggcacugaacacccuggucaagcagcuguccuccaacuucggcgccaucagcucugugcugaacgauauccugagcagacuggacaaggucgaggccgaggugcagaucgacagacugaucacaggcagacugcagagccuccagacauacgugacccagcagcugaucagagccgccgagauuagagccucugccaaucuggccgccaccaagaugucugagugugugcugggccagagcaagagaguggacuuuugcggcaagggcuaccaccugaugagcuucccucagucugccccucacggcgugguguuucugcacgugacauaugugcccgcucaagagaagaauuucaccaccgcuccagccaucugccacgacggcaaagcccacuuuccuagagaaggcguguucguguccaacggcacccauugguucgugacacagcggaacuucuacgagccccagaucaucaccaccgacaacaccuucgugucuggcaacugcgacgucgugaucggcauugugaacaauaccguguacgacccucugcagcccgagcuggacagcuucaaagaggaacuggacaaguacuuuaagaaccacacaagccccgacguggaccugggcgauaucagcggaaucaaugccagcgucgugaacauccagaaagagaucgaccggcugaacgagguggccaagaaucugaacgagagccugaucgaccugcaagaacuggggaaguacgagcaguacaucaaguggcccugguacaucuggcugggcuuuaucgccggacugauugccaucgugauggucacaaucaugcuguguugcaugaccagcugcuguagcugccugaagggcuguuguagcuguggcagcugcugcaaguucgacgaggacgauucugagcccgugcugaagggcgugaaacugcacuacacaugaggacuaguuauaagacugacuagcccgaugggccucccaacgggcccuccuccccuccuugcaccgagauuaauagaucucaaaggcucuuuucagagccaccaaaaaaaaaaaaaaaaaaaaaaaaaaaaaaaaaaaaaaaaaaaaaaaaaaaaaaaaaaaaaaaaaaaaaaaaaaaaaaaaaaaaaaaaaaaaaaaaaaaaa

SEQ ID NO: 24386 - RNA, 4041 nt, Artificial Sequence
  SARS-CoV-2/Wuhan/WIV05/2019__EPI_ISL_402128 spike protein mRNA gc mod (1-1273)(Y453F_D614G)
aggagaaagcuuaccauguucguguuccuggugcugcugccucugguguccagccagugugugaaccugaccaccagaacacagcugccuccagccuacaccaacagcuuuaccagaggcguguacuaccccgacaagguguucagauccagcgugcugcacucuacccaggaccuguuccugccuuucuucagcaacgugaccugguuccacgccauccacguguccggcaccaauggcaccaagagauucgacaaccccgugcugcccuucaacgacgggguguacuuugccagcaccgagaaguccaacaucaucagaggcuggaucuucggcaccacacuggacagcaagacccagagccugcugaucgugaacaacgccaccaacguggucaucaaagugugcgaguuccaguucugcaacgaccccuuccugggcgucuacuaccacaagaacaacaagagcuggauggaaagcgaguuccggguguacagcagcgccaacaacugcaccuucgaguacgugucccagccuuuccugauggaccuggaaggcaagcagggcaacuucaagaaccugcgcgaguucguguuuaagaacaucgacggcuacuucaagaucuacagcaagcacaccccuaucaaccucgugcgggaucugccucagggcuucucugcucuggaaccccugguggaucugcccaucggcaucaacaucacccgguuucagacacugcuggcccugcacagaagcuaccugacaccuggcgauagcagcagcggauggacagcuggugccgccgcuuacuaugugggcuaccugcagccuagaaccuuccugcugaaguacaacgagaacggcaccaucaccgacgccguggauugugcucuggauccucugagcgagacaaagugcacccugaaguccuucaccguggaaaagggcaucuaccagaccagcaacuuccgggugcagcccaccgaauccaucgugcgguuccccaauaucaccaaucugugccccuucggcgagguguucaaugccaccagauucgccucuguguacgccuggaaccggaagcggaucagcaauugcguggccgacuacuccgugcuguacaacuccgccagcuucagcaccuucaagugcuacggcguguccccuaccaagcugaacgaccugugcuucacaaacguguacgccgacagcuucgugauccggggagaugaagugcggcagauugccccuggacagacaggcaagaucgccgacuacaacuacaagcugcccgacgacuucaccggcugugugauugccuggaacagcaacaaccuggacuccaaagucggcggcaacuacaauuaccuguuccggcuguuccggaaguccaaucugaagcccuucgagcgggacaucuccaccgagaucuaucaggccggcagcaccccuuguaacggcguggaaggcuucaacugcuacuucccacugcaguccuacggcuuucagcccacaaauggcgugggcuaucagcccuacagagugguggugcugagcuucgaacugcugcaugccccugccacagugugcggcccuaagaaaagcaccaaucucgugaagaacaaaugcgugaacuucaacuucaacggccugaccggcaccggcgugcugacagagagcaacaagaaguuccugccauuccagcaguuuggccgggauaucgccgauaccacagacgccguuagagauccccagacacuggaaauccuggacaucaccccuugcagcuucggcggagugucugugaucaccccuggcaccaacaccagcaaucagguggcagugcuguaccagggcgugaacuguaccgaagugcccguggccauucacgccgaucagcugacaccuacauggcggguguacuccaccggcagcaauguguuucagaccagagccggcugucugaucggagccgagcacgugaacaauagcuacgagugcgacauccccaucggcgcuggaaucugcgccagcuaccagacacagacaaacagcccucggagagccagaagcguggccagccagagcaucauugccuacacaaugucucugggcgccgagaacagcguggccuacuccaacaacucuaucgcuauccccaccaacuucaccaucagcgugaccacagagauccugccuguguccaugaccaagaccagcguggacugcaccauguacaucugcggcgauuccaccgagugcuccaaccugcugcugcaguacggcagcuucugcacccagcugaauagagcccugacagggaucgccguggaacaggacaagaacacccaagagguguucgcccaagugaagcagaucuacaagaccccuccuaucaaggacuucggcggcuucaauuucagccagauucugcccgauccuagcaagcccagcaagcggagcuucaucgaggaccugcuguucaacaaagugacacuggccgacgccggcuucaucaagcaguauggcgauugucugggcgacauugccgccagggaucugauuugcgcccagaaguuuaacggacugacagugcugccuccucugcugaccgaugagaugaucgcccaguacacaucugcccugcuggccggcacaaucacaagcggcuggacauuuggagcaggcgccgcucugcagauccccuuugcuaugcagauggccuaccgguucaacggcaucggagugacccagaaugugcuguacgagaaccagaagcugaucgccaaccaguucaacagcgccaucggcaagauccaggacagccugagcagcacagcaagcgcccugggaaagcugcaggacguggucaaccagaaugcccaggcacugaacacccuggucaagcagcuguccuccaacuucggcgccaucagcucugugcugaacgauauccugagcagacuggacaaggucgaggccgaggugcagaucgacagacugaucacaggcagacugcagagccuccagacauacgugacccagcagcugaucagagccgccgagauuagagccucugccaaucuggccgccaccaagaugucugagugugugcugggccagagcaagagaguggacuuuugcggcaagggcuaccaccugaugagcuucccucagucugccccucacggcgugguguuucugcacgugacauaugugcccgcucaagagaagaauuucaccaccgcuccagccaucugccacgacggcaaagcccacuuuccuagagaaggcguguucguguccaacggcacccauugguucgugacacagcggaacuucuacgagccccagaucaucaccaccgacaacaccuucgugucuggcaacugcgacgucgugaucggcauugugaacaauaccguguacgacccucugcagcccgagcuggacagcuucaaagaggaacuggacaaguacuuuaagaaccacacaagccccgacguggaccugggcgauaucagcggaaucaaugccagcgucgugaacauccagaaagagaucgaccggcugaacgagguggccaagaaucugaacgagagccugaucgaccugcaagaacuggggaaguacgagcaguacaucaaguggcccugguacaucuggcugggcuuuaucgccggacugauugccaucgugauggucacaaucaugcuguguugcaugaccagcugcuguagcugccugaagggcuguuguagcuguggcagcugcugcaaguucgacgaggacgauucugagcccgugcugaagggcgugaaacugcacuacacaugaggacuaguuauaagacugacuagcccgaugggccucccaacgggcccuccuccccuccuugcaccgagauuaauagaucucaaaggcucuuuucagagccaccaaaaaaaaaaaaaaaaaaaaaaaaaaaaaaaaaaaaaaaaaaaaaaaaaaaaaaaaaaaaaaaaaaaaaaaaaaaaaaaaaaaaaaaaaaaaaaaaaaaaa

SEQ ID NO: 24387 - RNA, 4041 nt, Artificial Sequence
  SARS-CoV-2/Wuhan/WIV05/2019__EPI_ISL_402128 spike protein mRNA gc mod (1-1273)(D614G_I692V)
aggagaaagcuuaccauguucguguuccuggugcugcugccucugguguccagccagugugugaaccugaccaccagaacacagcugccuccagccuacaccaacagcuuuaccagaggcguguacuaccccgacaagguguucagauccagcgugcugcacucuacccaggaccuguuccugccuuucuucagcaacgugaccugguuccacgccauccacguguccggcaccaauggcaccaagagauucgacaaccccgugcugcccuucaacgacgggguguacuuugccagcaccgagaaguccaacaucaucagaggcuggaucuucggcaccacacuggacagcaagacccagagccugcugaucgugaacaacgccaccaacguggucaucaaagugugcgaguuccaguucugcaacgaccccuuccugggcgucuacuaccacaagaacaacaagagcuggauggaaagcgaguuccggguguacagcagcgccaacaacugcaccuucgaguacgugucccagccuuuccugauggaccuggaaggcaagcagggcaacuucaagaaccugcgcgaguucguguuuaagaacaucgacggcuacuucaagaucuacagcaagcacaccccuaucaaccucgugcgggaucugccucagggcuucucugcucuggaaccccugguggaucugcccaucggcaucaacaucacccgguuucagacacugcuggcccugcacagaagcuaccugacaccuggcgauagcagcagcggauggacagcuggugccgccgcuuacuaugugggcuaccugcagccuagaaccuuccugcugaaguacaacgagaacggcaccaucaccgacgccguggauugugcucuggauccucugagcgagacaaagugcacccugaaguccuucaccguggaaaagggcaucuaccagaccagcaacuuccgggugcagcccaccgaauccaucgugcgguuccccaauaucaccaaucugugccccuucggcgagguguucaaugccaccagauucgccucuguguacgccuggaaccggaagcggaucagcaauugcguggccgacuacuccgugcuguacaacuccgccagcuucagcaccuucaagugcuacggcguguccccuaccaagcugaacgaccugugcuucacaaacguguacgccgacagcuucgugauccggggagaugaagugcggcagauugccccuggacagacaggcaagaucgccgacuacaacuacaagcugcccgacgacuucaccggcugugugauugccuggaacagcaacaaccuggacuccaaagucggcggcaacuacaauuaccuguaccggcuguuccggaaguccaaucugaagcccuucgagcgggacaucuccaccgagaucuaucaggccggcagcaccccuuguaacggcguggaaggcuucaacugcuacuucccacugcaguccuacggcuuucagcccacaaauggcgugggcuaucagcccuacagagugguggugcugagcuucgaacugcugcaugccccugccacagugugcggcccuaagaaaagcaccaaucucgugaagaacaaaugcgugaacuucaacuucaacggccugaccggcaccggcgugcugacagagagcaacaagaaguuccugccauuccagcaguuuggccgggauaucgccgauaccacagacgccguuagagauccccagacacuggaaauccuggacaucaccccuugcagcuucggcggagugucugugaucaccccuggcaccaacaccagcaaucagguggcagugcuguaccagggcgugaacuguaccgaagugcccguggccauucacgccgaucagcugacaccuacauggcggguguacuccaccggcagcaauguguuucagaccagagccggcugucugaucggagccgagcacgugaacaauagcuacgagugcgacauccccaucggcgcuggaaucugcgccagcuaccagacacagacaaacagcccucggagagccagaagcguggccagccagagcgugauugccuacacaaugucucugggcgccgagaacagcguggccuacuccaacaacucuaucgcuauccccaccaacuucaccaucagcgugaccacagagauccugccuguguccaugaccaagaccagcguggacugcaccauguacaucugcggcgauuccaccgagugcuccaaccugcugcugcaguacggcagcuucugcacccagcugaauagagcccugacagggaucgccguggaacaggacaagaacacccaagagguguucgcccaagugaagcagaucuacaagaccccuccuaucaaggacuucggcggcuucaauuucagccagauucugcccgauccuagcaagcccagcaagcggagcuucaucgaggaccugcuguucaacaaagugacacuggccgacgccggcuucaucaagcaguauggcgauugucugggcgacauugccgccagggaucugauuugcgcccagaaguuuaacggacugacagugcugccuccucugcugaccgaugagaugaucgcccaguacacaucugcccugcuggccggcacaaucacaagcggcuggacauuuggagcaggcgccgcucugcagauccccuuugcuaugcagauggccuaccgguucaacggcaucggagugacccagaaugugcuguacgagaaccagaagcugaucgccaaccaguucaacagcgccaucggcaagauccaggacagccugagcagcacagcaagcgcccugggaaagcugcaggacguggucaaccagaaugcccaggcacugaacacccuggucaagcagcuguccuccaacuucggcgccaucagcucugugcugaacgauauccugagcagacuggacaaggucgaggccgaggugcagaucgacagacugaucacaggcagacugcagagccuccagacauacgugacccagcagcugaucagagccgccgagauuagagccucugccaaucuggccgccaccaagaugucugagugugugcugggccagagcaagagaguggacuuuugcggcaagggcuaccaccugaugagcuucccucagucugccccucacggcgugguguuucugcacgugacauaugugcccgcucaagagaagaauuucaccaccgcuccagccaucugccacgacggcaaagcccacuuuccuagagaaggcguguucguguccaacggcacccauugguucgugacacagcggaacuucuacgagccccagaucaucaccaccgacaacaccuucgugucuggcaacugcgacgucgugaucggcauugugaacaauaccguguacgacccucugcagcccgagcuggacagcuucaaagaggaacuggacaaguacuuuaagaaccacacaagccccgacguggaccugggcgauaucagcggaaucaaugccagcgucgugaacauccagaaagagaucgaccggcugaacgagguggccaagaaucugaacgagagccugaucgaccugcaagaacuggggaaguacgagcaguacaucaaguggcccugguacaucuggcugggcuuuaucgccggacugauugccaucgugauggucacaaucaugcuguguugcaugaccagcugcuguagcugccugaagggcuguuguagcuguggcagcugcugcaaguucgacgaggacgauucugagcccgugcugaagggcgugaaacugcacuacacaugaggacuaguuauaagacugacuagcccgaugggccucccaacgggcccuccuccccuccuugcaccgagauuaauagaucucaaaggcucuuuucagagccaccaaaaaaaaaaaaaaaaaaaaaaaaaaaaaaaaaaaaaaaaaaaaaaaaaaaaaaaaaaaaaaaaaaaaaaaaaaaaaaaaaaaaaaaaaaaaaaaaaaaaa

SEQ ID NO: 24388 - RNA, 4041 nt, Artificial Sequence
  SARS-CoV-2/Wuhan/WIV05/2019__EPI_ISL_402128 spike protein mRNA gc mod (1-1273)(D614G_M1229I)
aggagaaagcuuaccauguucguguuccuggugcugcugccucugguguccagccagugugugaaccugaccaccagaacacagcugccuccagccuacaccaacagcuuuaccagaggcguguacuaccccgacaagguguucagauccagcgugcugcacucuacccaggaccuguuccugccuuucuucagcaacgugaccugguuccacgccauccacguguccggcaccaauggcaccaagagauucgacaaccccgugcugcccuucaacgacgggguguacuuugccagcaccgagaaguccaacaucaucagaggcuggaucuucggcaccacacuggacagcaagacccagagccugcugaucgugaacaacgccaccaacguggucaucaaagugugcgaguuccaguucugcaacgaccccuuccugggcgucuacuaccacaagaacaacaagagcuggauggaaagcgaguuccggguguacagcagcgccaacaacugcaccuucgaguacgugucccagccuuuccugauggaccuggaaggcaagcagggcaacuucaagaaccugcgcgaguucguguuuaagaacaucgacggcuacuucaagaucuacagcaagcacaccccuaucaaccucgugcgggaucugccucagggcuucucugcucuggaaccccugguggaucugcccaucggcaucaacaucacccgguuucagacacugcuggcccugcacagaagcuaccugacaccuggcgauagcagcagcggauggacagcuggugccgccgcuuacuaugugggcuaccugcagccuagaaccuuccugcugaaguacaacgagaacggcaccaucaccgacgccguggauugugcucuggauccucugagcgagacaaagugcacccugaaguccuucaccguggaaaagggcaucuaccagaccagcaacuuccgggugcagcccaccgaauccaucgugcgguuccccaauaucaccaaucugugccccuucggcgagguguucaaugccaccagauucgccucuguguacgccuggaaccggaagcggaucagcaauugcguggccgacuacuccgugcuguacaacuccgccagcuucagcaccuucaagugcuacggcguguccccuaccaagcugaacgaccugugcuucacaaacguguacgccgacagcuucgugauccggggagaugaagugcggcagauugccccuggacagacaggcaagaucgccgacuacaacuacaagcugcccgacgacuucaccggcugugugauugccuggaacagcaacaaccuggacuccaaagucggcggcaacuacaauuaccuguaccggcuguuccggaaguccaaucugaagcccuucgagcgggacaucuccaccgagaucuaucaggccggcagcaccccuuguaacggcguggaaggcuucaacugcuacuucccacugcaguccuacggcuuucagcccacaaauggcgugggcuaucagcccuacagagugguggugcugagcuucgaacugcugcaugccccugccacagugugcggcccuaagaaaagcaccaaucucgugaagaacaaaugcgugaacuucaacuucaacggccugaccggcaccggcgugcugacagagagcaacaagaaguuccugccauuccagcaguuuggccgggauaucgccgauaccacagacgccguuagagauccccagacacuggaaauccuggacaucaccccuugcagcuucggcggagugucugugaucaccccuggcaccaacaccagcaaucagguggcagugcuguaccagggcgugaacuguaccgaagugcccguggccauucacgccgaucagcugacaccuacauggcggguguacuccaccggcagcaauguguuucagaccagagccggcugucugaucggagccgagcacgugaacaauagcuacgagugcgacauccccaucggcgcuggaaucugcgccagcuaccagacacagacaaacagcccucggagagccagaagcguggccagccagagcaucauugccuacacaaugucucugggcgccgagaacagcguggccuacuccaacaacucuaucgcuauccccaccaacuucaccaucagcgugaccacagagauccugccuguguccaugaccaagaccagcguggacugcaccauguacaucugcggcgauuccaccgagugcuccaaccugcugcugcaguacggcagcuucugcacccagcugaauagagcccugacagggaucgccguggaacaggacaagaacacccaagagguguucgcccaagugaagcagaucuacaagaccccuccuaucaaggacuucggcggcuucaauuucagccagauucugcccgauccuagcaagcccagcaagcggagcuucaucgaggaccugcuguucaacaaagugacacuggccgacgccggcuucaucaagcaguauggcgauugucugggcgacauugccgccagggaucugauuugcgcccagaaguuuaacggacugacagugcugccuccucugcugaccgaugagaugaucgcccaguacacaucugcccugcuggccggcacaaucacaagcggcuggacauuuggagcaggcgccgcucugcagauccccuuugcuaugcagauggccuaccgguucaacggcaucggagugacccagaaugugcuguacgagaaccagaagcugaucgccaaccaguucaacagcgccaucggcaagauccaggacagccugagcagcacagcaagcgcccugggaaagcugcaggacguggucaaccagaaugcccaggcacugaacacccuggucaagcagcuguccuccaacuucggcgccaucagcucugugcugaacgauauccugagcagacuggacaaggucgaggccgaggugcagaucgacagacugaucacaggcagacugcagagccuccagacauacgugacccagcagcugaucagagccgccgagauuagagccucugccaaucuggccgccaccaagaugucugagugugugcugggccagagcaagagaguggacuuuugcggcaagggcuaccaccugaugagcuucccucagucugccccucacggcgugguguuucugcacgugacauaugugcccgcucaagagaagaauuucaccaccgcuccagccaucugccacgacggcaaagcccacuuuccuagagaaggcguguucguguccaacggcacccauugguucgugacacagcggaacuucuacgagccccagaucaucaccaccgacaacaccuucgugucuggcaacugcgacgucgugaucggcauugugaacaauaccguguacgacccucugcagcccgagcuggacagcuucaaagaggaacuggacaaguacuuuaagaaccacacaagccccgacguggaccugggcgauaucagcggaaucaaugccagcgucgugaacauccagaaagagaucgaccggcugaacgagguggccaagaaucugaacgagagccugaucgaccugcaagaacuggggaaguacgagcaguacaucaaguggcccugguacaucuggcugggcuuuaucgccggacugauugccaucgugaucgucacaaucaugcuguguugcaugaccagcugcuguagcugccugaagggcuguuguagcuguggcagcugcugcaaguucgacgaggacgauucugagcccgugcugaagggcgugaaacugcacuacacaugaggacuaguuauaagacugacuagcccgaugggccucccaacgggcccuccuccccuccuugcaccgagauuaauagaucucaaaggcucuuuucagagccaccaaaaaaaaaaaaaaaaaaaaaaaaaaaaaaaaaaaaaaaaaaaaaaaaaaaaaaaaaaaaaaaaaaaaaaaaaaaaaaaaaaaaaaaaaaaaaaaaaaaaa

SEQ ID NO: 24389 - RNA, 4035 nt, Artificial Sequence
  SARS-CoV-2/Wuhan/WIV05/2019__EPI_ISL_402128 spike protein mRNA gc mod (1-1273)(H69del_V70del_A222V_Y453F_S477N_D614G_I692V)
aggagaaagcuuaccauguucguguuccuggugcugcugccucugguguccagccagugugugaaccugaccaccagaacacagcugccuccagccuacaccaacagcuuuaccagaggcguguacuaccccgacaagguguucagauccagcgugcugcacucuacccaggaccuguuccugccuuucuucagcaacgugaccugguuccacgccaucuccggcaccaauggcaccaagagauucgacaaccccgugcugcccuucaacgacgggguguacuuugccagcaccgagaaguccaacaucaucagaggcuggaucuucggcaccacacuggacagcaagacccagagccugcugaucgugaacaacgccaccaacguggucaucaaagugugcgaguuccaguucugcaacgaccccuuccugggcgucuacuaccacaagaacaacaagagcuggauggaaagcgaguuccggguguacagcagcgccaacaacugcaccuucgaguacgugucccagccuuuccugauggaccuggaaggcaagcagggcaacuucaagaaccugcgcgaguucguguuuaagaacaucgacggcuacuucaagaucuacagcaagcacaccccuaucaaccucgugcgggaucugccucagggcuucucugugcuggaaccccugguggaucugcccaucggcaucaacaucacccgguuucagacacugcuggcccugcacagaagcuaccugacaccuggcgauagcagcagcggauggacagcuggugccgccgcuuacuaugugggcuaccugcagccuagaaccuuccugcugaaguacaacgagaacggcaccaucaccgacgccguggauugugcucuggauccucugagcgagacaaagugcacccugaaguccuucaccguggaaaagggcaucuaccagaccagcaacuuccgggugcagcccaccgaauccaucgugcgguuccccaauaucaccaaucugugccccuucggcgagguguucaaugccaccagauucgccucuguguacgccuggaaccggaagcggaucagcaauugcguggccgacuacuccgugcuguacaacuccgccagcuucagcaccuucaagugcuacggcguguccccuaccaagcugaacgaccugugcuucacaaacguguacgccgacagcuucgugauccggggagaugaagugcggcagauugccccuggacagacaggcaagaucgccgacuacaacuacaagcugcccgacgacuucaccggcugugugauugccuggaacagcaacaaccuggacuccaaagucggcggcaacuacaauuaccuguuccggcuguuccggaaguccaaucugaagcccuucgagcgggacaucuccaccgagaucuaucaggccggcaacaccccuuguaacggcguggaaggcuucaacugcuacuucccacugcaguccuacggcuuucagcccacaaauggcgugggcuaucagcccuacagagugguggugcugagcuucgaacugcugcaugccccugccacagugugcggcccuaagaaaagcaccaaucucgugaagaacaaaugcgugaacuucaacuucaacggccugaccggcaccggcgugcugacagagagcaacaagaaguuccugccauuccagcaguuuggccgggauaucgccgauaccacagacgccguuagagauccccagacacuggaaauccuggacaucaccccuugcagcuucggcggagugucugugaucaccccuggcaccaacaccagcaaucagguggcagugcuguaccagggcgugaacuguaccgaagugcccguggccauucacgccgaucagcugacaccuacauggcggguguacuccaccggcagcaauguguuucagaccagagccggcugucugaucggagccgagcacgugaacaauagcuacgagugcgacauccccaucggcgcuggaaucugcgccagcuaccagacacagacaaacagcccucggagagccagaagcguggccagccagagcgugauugccuacacaaugucucugggcgccgagaacagcguggccuacuccaacaacucuaucgcuauccccaccaacuucaccaucagcgugaccacagagauccugccuguguccaugaccaagaccagcguggacugcaccauguacaucugcggcgauuccaccgagugcuccaaccugcugcugcaguacggcagcuucugcacccagcugaauagagcccugacagggaucgccguggaacaggacaagaacacccaagagguguucgcccaagugaagcagaucuacaagaccccuccuaucaaggacuucggcggcuucaauuucagccagauucugcccgauccuagcaagcccagcaagcggagcuucaucgaggaccugcuguucaacaaagugacacuggccgacgccggcuucaucaagcaguauggcgauugucugggcgacauugccgccagggaucugauuugcgcccagaaguuuaacggacugacagugcugccuccucugcugaccgaugagaugaucgcccaguacacaucugcccugcuggccggcacaaucacaagcggcuggacauuuggagcaggcgccgcucugcagauccccuuugcuaugcagauggccuaccgguucaacggcaucggagugacccagaaugugcuguacgagaaccagaagcugaucgccaaccaguucaacagcgccaucggcaagauccaggacagccugagcagcacagcaagcgcccugggaaagcugcaggacguggucaaccagaaugcccaggcacugaacacccuggucaagcagcuguccuccaacuucggcgccaucagcucugugcugaacgauauccugagcagacuggacaaggucgaggccgaggugcagaucgacagacugaucacaggcagacugcagagccuccagacauacgugacccagcagcugaucagagccgccgagauuagagccucugccaaucuggccgccaccaagaugucugagugugugcugggccagagcaagagaguggacuuuugcggcaagggcuaccaccugaugagcuucccucagucugccccucacggcgugguguuucugcacgugacauaugugcccgcucaagagaagaauuucaccaccgcuccagccaucugccacgacggcaaagcccacuuuccuagagaaggcguguucguguccaacggcacccauugguucgugacacagcggaacuucuacgagccccagaucaucaccaccgacaacaccuucgugucuggcaacugcgacgucgugaucggcauugugaacaauaccguguacgacccucugcagcccgagcuggacagcuucaaagaggaacuggacaaguacuuuaagaaccacacaagccccgacguggaccugggcgauaucagcggaaucaaugccagcgucgugaacauccagaaagagaucgaccggcugaacgagguggccaagaaucugaacgagagccugaucgaccugcaagaacuggggaaguacgagcaguacaucaaguggcccugguacaucuggcugggcuuuaucgccggacugauugccaucgugauggucacaaucaugcuguguugcaugaccagcugcuguagcugccugaagggcuguuguagcuguggcagcugcugcaaguucgacgaggacgauucugagcccgugcugaagggcgugaaacugcacuacacaugaggacuaguuauaagacugacuagcccgaugggccucccaacgggcccuccuccccuccuugcaccgagauuaauagaucucaaaggcucuuuucagagccaccaaaaaaaaaaaaaaaaaaaaaaaaaaaaaaaaaaaaaaaaaaaaaaaaaaaaaaaaaaaaaaaaaaaaaaaaaaaaaaaaaaaaaaaaaaaaaaaaaaaaa

SEQ ID NO: 24390 - RNA, 4035 nt, Artificial Sequence
  SARS-CoV-2/Wuhan/WIV05/2019__EPI_ISL_402128 spike protein mRNA gc mod (1-1273)(H69del_V70del_Y453F_D614G_I692V_M1229I)
aggagaaagcuuaccauguucguguuccuggugcugcugccucugguguccagccagugugugaaccugaccaccagaacacagcugccuccagccuacaccaacagcuuuaccagaggcguguacuaccccgacaagguguucagauccagcgugcugcacucuacccaggaccuguuccugccuuucuucagcaacgugaccugguuccacgccaucuccggcaccaauggcaccaagagauucgacaaccccgugcugcccuucaacgacgggguguacuuugccagcaccgagaaguccaacaucaucagaggcuggaucuucggcaccacacuggacagcaagacccagagccugcugaucgugaacaacgccaccaacguggucaucaaagugugcgaguuccaguucugcaacgaccccuuccugggcgucuacuaccacaagaacaacaagagcuggauggaaagcgaguuccggguguacagcagcgccaacaacugcaccuucgaguacgugucccagccuuuccugauggaccuggaaggcaagcagggcaacuucaagaaccugcgcgaguucguguuuaagaacaucgacggcuacuucaagaucuacagcaagcacaccccuaucaaccucgugcgggaucugccucagggcuucucugcucuggaaccccugguggaucugcccaucggcaucaacaucacccgguuucagacacugcuggcccugcacagaagcuaccugacaccuggcgauagcagcagcggauggacagcuggugccgccgcuuacuaugugggcuaccugcagccuagaaccuuccugcugaaguacaacgagaacggcaccaucaccgacgccguggauugugcucuggauccucugagcgagacaaagugcacccugaaguccuucaccguggaaaagggcaucuaccagaccagcaacuuccgggugcagcccaccgaauccaucgugcgguuccccaauaucaccaaucugugccccuucggcgagguguucaaugccaccagauucgccucuguguacgccuggaaccggaagcggaucagcaauugcguggccgacuacuccgugcuguacaacuccgccagcuucagcaccuucaagugcuacggcguguccccuaccaagcugaacgaccugugcuucacaaacguguacgccgacagcuucgugauccggggagaugaagugcggcagauugccccuggacagacaggcaagaucgccgacuacaacuacaagcugcccgacgacuucaccggcugugugauugccuggaacagcaacaaccuggacuccaaagucggcggcaacuacaauuaccuguuccggcuguuccggaaguccaaucugaagcccuucgagcgggacaucuccaccgagaucuaucaggccggcagcaccccuuguaacggcguggaaggcuucaacugcuacuucccacugcaguccuacggcuuucagcccacaaauggcgugggcuaucagcccuacagagugguggugcugagcuucgaacugcugcaugccccugccacagugugcggcccuaagaaaagcaccaaucucgugaagaacaaaugcgugaacuucaacuucaacggccugaccggcaccggcgugcugacagagagcaacaagaaguuccugccauuccagcaguuuggccgggauaucgccgauaccacagacgccguuagagauccccagacacuggaaauccuggacaucaccccuugcagcuucggcggagugucugugaucaccccuggcaccaacaccagcaaucagguggcagugcuguaccagggcgugaacuguaccgaagugcccguggccauucacgccgaucagcugacaccuacauggcggguguacuccaccggcagcaauguguuucagaccagagccggcugucugaucggagccgagcacgugaacaauagcuacgagugcgacauccccaucggcgcuggaaucugcgccagcuaccagacacagacaaacagcccucggagagccagaagcguggccagccagagcgugauugccuacacaaugucucugggcgccgagaacagcguggccuacuccaacaacucuaucgcuauccccaccaacuucaccaucagcgugaccacagagauccugccuguguccaugaccaagaccagcguggacugcaccauguacaucugcggcgauuccaccgagugcuccaaccugcugcugcaguacggcagcuucugcacccagcugaauagagcccugacagggaucgccguggaacaggacaagaacacccaagagguguucgcccaagugaagcagaucuacaagaccccuccuaucaaggacuucggcggcuucaauuucagccagauucugcccgauccuagcaagcccagcaagcggagcuucaucgaggaccugcuguucaacaaagugacacuggccgacgccggcuucaucaagcaguauggcgauugucugggcgacauugccgccagggaucugauuugcgcccagaaguuuaacggacugacagugcugccuccucugcugaccgaugagaugaucgcccaguacacaucugcccugcuggccggcacaaucacaagcggcuggacauuuggagcaggcgccgcucugcagauccccuuugcuaugcagauggccuaccgguucaacggcaucggagugacccagaaugugcuguacgagaaccagaagcugaucgccaaccaguucaacagcgccaucggcaagauccaggacagccugagcagcacagcaagcgcccugggaaagcugcaggacguggucaaccagaaugcccaggcacugaacacccuggucaagcagcuguccuccaacuucggcgccaucagcucugugcugaacgauauccugagcagacuggacaaggucgaggccgaggugcagaucgacagacugaucacaggcagacugcagagccuccagacauacgugacccagcagcugaucagagccgccgagauuagagccucugccaaucuggccgccaccaagaugucugagugugugcugggccagagcaagagaguggacuuuugcggcaagggcuaccaccugaugagcuucccucagucugccccucacggcgugguguuucugcacgugacauaugugcccgcucaagagaagaauuucaccaccgcuccagccaucugccacgacggcaaagcccacuuuccuagagaaggcguguucguguccaacggcacccauugguucgugacacagcggaacuucuacgagccccagaucaucaccaccgacaacaccuucgugucuggcaacugcgacgucgugaucggcauugugaacaauaccguguacgacccucugcagcccgagcuggacagcuucaaagaggaacuggacaaguacuuuaagaaccacacaagccccgacguggaccugggcgauaucagcggaaucaaugccagcgucgugaacauccagaaagagaucgaccggcugaacgagguggccaagaaucugaacgagagccugaucgaccugcaagaacuggggaaguacgagcaguacaucaaguggcccugguacaucuggcugggcuuuaucgccggacugauugccaucgugaucgucacaaucaugcuguguugcaugaccagcugcuguagcugccugaagggcuguuguagcuguggcagcugcugcaaguucgacgaggacgauucugagcccgugcugaagggcgugaaacugcacuacacaugaggacuaguuauaagacugacuagcccgaugggccucccaacgggcccuccuccccuccuugcaccgagauuaauagaucucaaaggcucuuuucagagccaccaaaaaaaaaaaaaaaaaaaaaaaaaaaaaaaaaaaaaaaaaaaaaaaaaaaaaaaaaaaaaaaaaaaaaaaaaaaaaaaaaaaaaaaaaaaaaaaaaaaaa

SEQ ID NO: 24391 - RNA, 4032 nt, Artificial Sequence
  SARS-CoV-2/Wuhan/WIV05/2019__EPI_ISL_402128 spike protein mRNA gc mod (1-1273)(H69del_V70del_Y144del_N501Y_A570D_D614G_P681H_T716I_S982 A_D1118H)
aggagaaagcuuaccauguucguguuccuggugcugcugccucugguguccagccagugugugaaccugaccaccagaacacagcugccuccagccuacaccaacagcuuuaccagaggcguguacuaccccgacaagguguucagauccagcgugcugcacucuacccaggaccuguuccugccuuucuucagcaacgugaccugguuccacgccaucuccggcaccaauggcaccaagagauucgacaaccccgugcugcccuucaacgacgggguguacuuugccagcaccgagaaguccaacaucaucagaggcuggaucuucggcaccacacuggacagcaagacccagagccugcugaucgugaacaacgccaccaacguggucaucaaagugugcgaguuccaguucugcaacgaccccuuccugggcgucuaccacaagaacaacaagagcuggauggaaagcgaguuccggguguacagcagcgccaacaacugcaccuucgaguacgugucccagccuuuccugauggaccuggaaggcaagcagggcaacuucaagaaccugcgcgaguucguguuuaagaacaucgacggcuacuucaagaucuacagcaagcacaccccuaucaaccucgugcgggaucugccucagggcuucucugcucuggaaccccugguggaucugcccaucggcaucaacaucacccgguuucagacacugcuggcccugcacagaagcuaccugacaccuggcgauagcagcagcggauggacagcuggugccgccgcuuacuaugugggcuaccugcagccuagaaccuuccugcugaaguacaacgagaacggcaccaucaccgacgccguggauugugcucuggauccucugagcgagacaaagugcacccugaaguccuucaccguggaaaagggcaucuaccagaccagcaacuuccgggugcagcccaccgaauccaucgugcgguuccccaauaucaccaaucugugccccuucggcgagguguucaaugccaccagauucgccucuguguacgccuggaaccggaagcggaucagcaauugcguggccgacuacuccgugcuguacaacuccgccagcuucagcaccuucaagugcuacggcguguccccuaccaagcugaacgaccugugcuucacaaacguguacgccgacagcuucgugauccggggagaugaagugcggcagauugccccuggacagacaggcaagaucgccgacuacaacuacaagcugcccgacgacuucaccggcugugugauugccuggaacagcaacaaccuggacuccaaagucggcggcaacuacaauuaccuguaccggcuguuccggaaguccaaucugaagcccuucgagcgggacaucuccaccgagaucuaucaggccggcagcaccccuuguaacggcguggaaggcuucaacugcuacuucccacugcaguccuacggcuuucagcccacauacggcgugggcuaucagcccuacagagugguggugcugagcuucgaacugcugcaugccccugccacagugugcggcccuaagaaaagcaccaaucucgugaagaacaaaugcgugaacuucaacuucaacggccugaccggcaccggcgugcugacagagagcaacaagaaguuccugccauuccagcaguuuggccgggauaucgacgauaccacagacgccguuagagauccccagacacuggaaauccuggacaucaccccuugcagcuucggcggagugucugugaucaccccuggcaccaacaccagcaaucagguggcagugcuguaccagggcgugaacuguaccgaagugcccguggccauucacgccgaucagcugacaccuacauggcggguguacuccaccggcagcaauguguuucagaccagagccggcugucugaucggagccgagcacgugaacaauagcuacgagugcgacauccccaucggcgcuggaaucugcgccagcuaccagacacagacaaacagccaccggagagccagaagcguggccagccagagcaucauugccuacacaaugucucugggcgccgagaacagcguggccuacuccaacaacucuaucgcuauccccaucaacuucaccaucagcgugaccacagagauccugccuguguccaugaccaagaccagcguggacugcaccauguacaucugcggcgauuccaccgagugcuccaaccugcugcugcaguacggcagcuucugcacccagcugaauagagcccugacagggaucgccguggaacaggacaagaacacccaagagguguucgcccaagugaagcagaucuacaagaccccuccuaucaaggacuucggcggcuucaauuucagccagauucugcccgauccuagcaagcccagcaagcggagcuucaucgaggaccugcuguucaacaaagugacacuggccgacgccggcuucaucaagcaguauggcgauugucugggcgacauugccgccagggaucugauuugcgcccagaaguuuaacggacugacagugcugccuccucugcugaccgaugagaugaucgcccaguacacaucugcccugcuggccggcacaaucacaagcggcuggacauuuggagcaggcgccgcucugcagauccccuuugcuaugcagauggccuaccgguucaacggcaucggagugacccagaaugugcuguacgagaaccagaagcugaucgccaaccaguucaacagcgccaucggcaagauccaggacagccugagcagcacagcaagcgcccugggaaagcugcaggacguggucaaccagaaugcccaggcacugaacacccuggucaagcagcuguccuccaacuucggcgccaucagcucugugcugaacgauauccuggccagacuggacaaggucgaggccgaggugcagaucgacagacugaucacaggcagacugcagagccuccagacauacgugacccagcagcugaucagagccgccgagauuagagccucugccaaucuggccgccaccaagaugucugagugugugcugggccagagcaagagaguggacuuuugcggcaagggcuaccaccugaugagcuucccucagucugccccucacggcgugguguuucugcacgugacauaugugcccgcucaagagaagaauuucaccaccgcuccagccaucugccacgacggcaaagcccacuuuccuagagaaggcguguucguguccaacggcacccauugguucgugacacagcggaacuucuacgagccccagaucaucaccacccacaacaccuucgugucuggcaacugcgacgucgugaucggcauugugaacaauaccguguacgacccucugcagcccgagcuggacagcuucaaagaggaacuggacaaguacuuuaagaaccacacaagccccgacguggaccugggcgauaucagcggaaucaaugccagcgucgugaacauccagaaagagaucgaccggcugaacgagguggccaagaaucugaacgagagccugaucgaccugcaagaacuggggaaguacgagcaguacaucaaguggcccugguacaucuggcugggcuuuaucgccggacugauugccaucgugauggucacaaucaugcuguguugcaugaccagcugcuguagcugccugaagggcuguuguagcuguggcagcugcugcaaguucgacgaggacgauucugagcccgugcugaagggcgugaaacugcacuacacaugaggacuaguuauaagacugacuagcccgaugggccucccaacgggcccuccuccccuccuugcaccgagauuaauagaucucaaaggcucuuuucagagccaccaaaaaaaaaaaaaaaaaaaaaaaaaaaaaaaaaaaaaaaaaaaaaaaaaaaaaaaaaaaaaaaaaaaaaaaaaaaaaaaaaaaaaaaaaaaaaaaaaaaaa

SEQ ID NO: 24392 - RNA, 4041 nt, Artificial Sequence
  SARS-CoV-2/Wuhan/WIV05/2019__EPI_ISL_402128 spike protein mRNA gc mod (1-1273)(K417N_E484K_N501Y_D614G)
aggagaaagcuuaccauguucguguuccuggugcugcugccucugguguccagccagugugugaaccugaccaccagaacacagcugccuccagccuacaccaacagcuuuaccagaggcguguacuaccccgacaagguguucagauccagcgugcugcacucuacccaggaccuguuccugccuuucuucagcaacgugaccugguuccacgccauccacguguccggcaccaauggcaccaagagauucgacaaccccgugcugcccuucaacgacgggguguacuuugccagcaccgagaaguccaacaucaucagaggcuggaucuucggcaccacacuggacagcaagacccagagccugcugaucgugaacaacgccaccaacguggucaucaaagugugcgaguuccaguucugcaacgaccccuuccugggcgucuacuaccacaagaacaacaagagcuggauggaaagcgaguuccggguguacagcagcgccaacaacugcaccuucgaguacgugucccagccuuuccugauggaccuggaaggcaagcagggcaacuucaagaaccugcgcgaguucguguuuaagaacaucgacggcuacuucaagaucuacagcaagcacaccccuaucaaccucgugcgggaucugccucagggcuucucugcucuggaaccccugguggaucugcccaucggcaucaacaucacccgguuucagacacugcuggcccugcacagaagcuaccugacaccuggcgauagcagcagcggauggacagcuggugccgccgcuuacuaugugggcuaccugcagccuagaaccuuccugcugaaguacaacgagaacggcaccaucaccgacgccguggauugugcucuggauccucugagcgagacaaagugcacccugaaguccuucaccguggaaaagggcaucuaccagaccagcaacuuccgggugcagcccaccgaauccaucgugcgguuccccaauaucaccaaucugugccccuucggcgagguguucaaugccaccagauucgccucuguguacgccuggaaccggaagcggaucagcaauugcguggccgacuacuccgugcuguacaacuccgccagcuucagcaccuucaagugcuacggcguguccccuaccaagcugaacgaccugugcuucacaaacguguacgccgacagcuucgugauccggggagaugaagugcggcagauugccccuggacagacaggcaacaucgccgacuacaacuacaagcugcccgacgacuucaccggcugugugauugccuggaacagcaacaaccuggacuccaaagucggcggcaacuacaauuaccuguaccggcuguuccggaaguccaaucugaagcccuucgagcgggacaucuccaccgagaucuaucaggccggcagcaccccuuguaacggcgugaagggcuucaacugcuacuucccacugcaguccuacggcuuucagcccacauacggcgugggcuaucagcccuacagagugguggugcugagcuucgaacugcugcaugccccugccacagugugcggcccuaagaaaagcaccaaucucgugaagaacaaaugcgugaacuucaacuucaacggccugaccggcaccggcgugcugacagagagcaacaagaaguuccugccauuccagcaguuuggccgggauaucgccgauaccacagacgccguuagagauccccagacacuggaaauccuggacaucaccccuugcagcuucggcggagugucugugaucaccccuggcaccaacaccagcaaucagguggcagugcuguaccagggcgugaacuguaccgaagugcccguggccauucacgccgaucagcugacaccuacauggcggguguacuccaccggcagcaauguguuucagaccagagccggcugucugaucggagccgagcacgugaacaauagcuacgagugcgacauccccaucggcgcuggaaucugcgccagcuaccagacacagacaaacagcccucggagagccagaagcguggccagccagagcaucauugccuacacaaugucucugggcgccgagaacagcguggccuacuccaacaacucuaucgcuauccccaccaacuucaccaucagcgugaccacagagauccugccuguguccaugaccaagaccagcguggacugcaccauguacaucugcggcgauuccaccgagugcuccaaccugcugcugcaguacggcagcuucugcacccagcugaauagagcccugacagggaucgccguggaacaggacaagaacacccaagagguguucgcccaagugaagcagaucuacaagaccccuccuaucaaggacuucggcggcuucaauuucagccagauucugcccgauccuagcaagcccagcaagcggagcuucaucgaggaccugcuguucaacaaagugacacuggccgacgccggcuucaucaagcaguauggcgauugucugggcgacauugccgccagggaucugauuugcgcccagaaguuuaacggacugacagugcugccuccucugcugaccgaugagaugaucgcccaguacacaucugcccugcuggccggcacaaucacaagcggcuggacauuuggagcaggcgccgcucugcagauccccuuugcuaugcagauggccuaccgguucaacggcaucggagugacccagaaugugcuguacgagaaccagaagcugaucgccaaccaguucaacagcgccaucggcaagauccaggacagccugagcagcacagcaagcgcccugggaaagcugcaggacguggucaaccagaaugcccaggcacugaacacccuggucaagcagcuguccuccaacuucggcgccaucagcucugugcugaacgauauccugagcagacuggacaaggucgaggccgaggugcagaucgacagacugaucacaggcagacugcagagccuccagacauacgugacccagcagcugaucagagccgccgagauuagagccucugccaaucuggccgccaccaagaugucugagugugugcugggccagagcaagagaguggacuuuugcggcaagggcuaccaccugaugagcuucccucagucugccccucacggcgugguguuucugcacgugacauaugugcccgcucaagagaagaauuucaccaccgcuccagccaucugccacgacggcaaagcccacuuuccuagagaaggcguguucguguccaacggcacccauugguucgugacacagcggaacuucuacgagccccagaucaucaccaccgacaacaccuucgugucuggcaacugcgacgucgugaucggcauugugaacaauaccguguacgacccucugcagcccgagcuggacagcuucaaagaggaacuggacaaguacuuuaagaaccacacaagccccgacguggaccugggcgauaucagcggaaucaaugccagcgucgugaacauccagaaagagaucgaccggcugaacgagguggccaagaaucugaacgagagccugaucgaccugcaagaacuggggaaguacgagcaguacaucaaguggcccugguacaucuggcugggcuuuaucgccggacugauugccaucgugauggucacaaucaugcuguguugcaugaccagcugcuguagcugccugaagggcuguuguagcuguggcagcugcugcaaguucgacgaggacgauucugagcccgugcugaagggcgugaaacugcacuacacaugaggacuaguuauaagacugacuagcccgaugggccucccaacgggcccuccuccccuccuugcaccgagauuaauagaucucaaaggcucuuuucagagccaccaaaaaaaaaaaaaaaaaaaaaaaaaaaaaaaaaaaaaaaaaaaaaaaaaaaaaaaaaaaaaaaaaaaaaaaaaaaaaaaaaaaaaaaaaaaaaaaaaaaaa

SEQ ID NO: 24393 - RNA, 4032 nt, Artificial Sequence
  SARS-CoV-2/Wuhan/WIV05/2019__EPI_ISL_402128 spike protein mRNA gc mod (1-1273)(L18F_D80A_D215G_L242del_A243del_L244del_R246I_K417N_E484 K_N501Y_D614G_A701V)
aggagaaagcuuaccauguucguguuccuggugcugcugccucugguguccagccagugugugaacuucaccaccagaacacagcugccuccagccuacaccaacagcuuuaccagaggcguguacuaccccgacaagguguucagauccagcgugcugcacucuacccaggaccuguuccugccuuucuucagcaacgugaccugguuccacgccauccacguguccggcaccaauggcaccaagagauucgccaaccccgugcugcccuucaacgacgggguguacuuugccagcaccgagaaguccaacaucaucagaggcuggaucuucggcaccacacuggacagcaagacccagagccugcugaucgugaacaacgccaccaacguggucaucaaagugugcgaguuccaguucugcaacgaccccuuccugggcgucuacuaccacaagaacaacaagagcuggauggaaagcgaguuccggguguacagcagcgccaacaacugcaccuucgaguacgugucccagccuuuccugauggaccuggaaggcaagcagggcaacuucaagaaccugcgcgaguucguguuuaagaacaucgacggcuacuucaagaucuacagcaagcacaccccuaucaaccucgugcggggccugccucagggcuucucugcucuggaaccccugguggaucugcccaucggcaucaacaucacccgguuucagacacugcacaucagcuaccugacaccuggcgauagcagcagcggauggacagcuggugccgccgcuuacuaugugggcuaccugcagccuagaaccuuccugcugaaguacaacgagaacggcaccaucaccgacgccguggauugugcucuggauccucugagcgagacaaagugcacccugaaguccuucaccguggaaaagggcaucuaccagaccagcaacuuccgggugcagcccaccgaauccaucgugcgguuccccaauaucaccaaucugugccccuucggcgagguguucaaugccaccagauucgccucuguguacgccuggaaccggaagcggaucagcaauugcguggccgacuacuccgugcuguacaacuccgccagcuucagcaccuucaagugcuacggcguguccccuaccaagcugaacgaccugugcuucacaaacguguacgccgacagcuucgugauccggggagaugaagugcggcagauugccccuggacagacaggcaacaucgccgacuacaacuacaagcugcccgacgacuucaccggcugugugauugccuggaacagcaacaaccuggacuccaaagucggcggcaacuacaauuaccuguaccggcuguuccggaaguccaaucugaagcccuucgagcgggacaucuccaccgagaucuaucaggccggcagcaccccuuguaacggcgugaagggcuucaacugcuacuucccacugcaguccuacggcuuucagcccacauacggcgugggcuaucagcccuacagagugguggugcugagcuucgaacugcugcaugccccugccacagugugcggcccuaagaaaagcaccaaucucgugaagaacaaaugcgugaacuucaacuucaacggccugaccggcaccggcgugcugacagagagcaacaagaaguuccugccauuccagcaguuuggccgggauaucgccgauaccacagacgccguuagagauccccagacacuggaaauccuggacaucaccccuugcagcuucggcggagugucugugaucaccccuggcaccaacaccagcaaucagguggcagugcuguaccagggcgugaacuguaccgaagugcccguggccauucacgccgaucagcugacaccuacauggcggguguacuccaccggcagcaauguguuucagaccagagccggcugucugaucggagccgagcacgugaacaauagcuacgagugcgacauccccaucggcgcuggaaucugcgccagcuaccagacacagacaaacagcccucggagagccagaagcguggccagccagagcaucauugccuacacaaugucucugggcguggagaacagcguggccuacuccaacaacucuaucgcuauccccaccaacuucaccaucagcgugaccacagagauccugccuguguccaugaccaagaccagcguggacugcaccauguacaucugcggcgauuccaccgagugcuccaaccugcugcugcaguacggcagcuucugcacccagcugaauagagcccugacagggaucgccguggaacaggacaagaacacccaagagguguucgcccaagugaagcagaucuacaagaccccuccuaucaaggacuucggcggcuucaauuucagccagauucugcccgauccuagcaagcccagcaagcggagcuucaucgaggaccugcuguucaacaaagugacacuggccgacgccggcuucaucaagcaguauggcgauugucugggcgacauugccgccagggaucugauuugcgcccagaaguuuaacggacugacagugcugccuccucugcugaccgaugagaugaucgcccaguacacaucugcccugcuggccggcacaaucacaagcggcuggacauuuggagcaggcgccgcucugcagauccccuuugcuaugcagauggccuaccgguucaacggcaucggagugacccagaaugugcuguacgagaaccagaagcugaucgccaaccaguucaacagcgccaucggcaagauccaggacagccugagcagcacagcaagcgcccugggaaagcugcaggacguggucaaccagaaugcccaggcacugaacacccuggucaagcagcuguccuccaacuucggcgccaucagcucugugcugaacgauauccugagcagacuggacaaggucgaggccgaggugcagaucgacagacugaucacaggcagacugcagagccuccagacauacgugacccagcagcugaucagagccgccgagauuagagccucugccaaucuggccgccaccaagaugucugagugugugcugggccagagcaagagaguggacuuuugcggcaagggcuaccaccugaugagcuucccucagucugccccucacggcgugguguuucugcacgugacauaugugcccgcucaagagaagaauuucaccaccgcuccagccaucugccacgacggcaaagcccacuuuccuagagaaggcguguucguguccaacggcacccauugguucgugacacagcggaacuucuacgagccccagaucaucaccaccgacaacaccuucgugucuggcaacugcgacgucgugaucggcauugugaacaauaccguguacgacccucugcagcccgagcuggacagcuucaaagaggaacuggacaaguacuuuaagaaccacacaagccccgacguggaccugggcgauaucagcggaaucaaugccagcgucgugaacauccagaaagagaucgaccggcugaacgagguggccaagaaucugaacgagagccugaucgaccugcaagaacuggggaaguacgagcaguacaucaaguggcccugguacaucuggcugggcuuuaucgccggacugauugccaucgugauggucacaaucaugcuguguugcaugaccagcugcuguagcugccugaagggcuguuguagcuguggcagcugcugcaaguucgacgaggacgauucugagcccgugcugaagggcgugaaacugcacuacacaugaggacuaguuauaagacugacuagcccgaugggccucccaacgggcccuccuccccuccuugcaccgagauuaauagaucucaaaggcucuuuucagagccaccaaaaaaaaaaaaaaaaaaaaaaaaaaaaaaaaaaaaaaaaaaaaaaaaaaaaaaaaaaaaaaaaaaaaaaaaaaaaaaaaaaaaaaaaaaaaaaaaaaaaa

SEQ ID NO: 24394 - RNA, 4041 nt, Artificial Sequence
  SARS-CoV-2/Wuhan/WIV05/2019__EPI_ISL_402128 spike protein mRNA gc mod (1-1273)(E484K_D614G)
aggagaaagcuuaccauguucguguuccuggugcugcugccucugguguccagccagugugugaaccugaccaccagaacacagcugccuccagccuacaccaacagcuuuaccagaggcguguacuaccccgacaagguguucagauccagcgugcugcacucuacccaggaccuguuccugccuuucuucagcaacgugaccugguuccacgccauccacguguccggcaccaauggcaccaagagauucgacaaccccgugcugcccuucaacgacgggguguacuuugccagcaccgagaaguccaacaucaucagaggcuggaucuucggcaccacacuggacagcaagacccagagccugcugaucgugaacaacgccaccaacguggucaucaaagugugcgaguuccaguucugcaacgaccccuuccugggcgucuacuaccacaagaacaacaagagcuggauggaaagcgaguuccggguguacagcagcgccaacaacugcaccuucgaguacgugucccagccuuuccugauggaccuggaaggcaagcagggcaacuucaagaaccugcgcgaguucguguuuaagaacaucgacggcuacuucaagaucuacagcaagcacaccccuaucaaccucgugcgggaucugccucagggcuucucugcucuggaaccccugguggaucugcccaucggcaucaacaucacccgguuucagacacugcuggcccugcacagaagcuaccugacaccuggcgauagcagcagcggauggacagcuggugccgccgcuuacuaugugggcuaccugcagccuagaaccuuccugcugaaguacaacgagaacggcaccaucaccgacgccguggauugugcucuggauccucugagcgagacaaagugcacccugaaguccuucaccguggaaaagggcaucuaccagaccagcaacuuccgggugcagcccaccgaauccaucgugcgguuccccaauaucaccaaucugugccccuucggcgagguguucaaugccaccagauucgccucuguguacgccuggaaccggaagcggaucagcaauugcguggccgacuacuccgugcuguacaacuccgccagcuucagcaccuucaagugcuacggcguguccccuaccaagcugaacgaccugugcuucacaaacguguacgccgacagcuucgugauccggggagaugaagugcggcagauugccccuggacagacaggcaagaucgccgacuacaacuacaagcugcccgacgacuucaccggcugugugauugccuggaacagcaacaaccuggacuccaaagucggcggcaacuacaauuaccuguaccggcuguuccggaaguccaaucugaagcccuucgagcgggacaucuccaccgagaucuaucaggccggcagcaccccuuguaacggcgugaagggcuucaacugcuacuucccacugcaguccuacggcuuucagcccacaaauggcgugggcuaucagcccuacagagugguggugcugagcuucgaacugcugcaugccccugccacagugugcggcccuaagaaaagcaccaaucucgugaagaacaaaugcgugaacuucaacuucaacggccugaccggcaccggcgugcugacagagagcaacaagaaguuccugccauuccagcaguuuggccgggauaucgccgauaccacagacgccguuagagauccccagacacuggaaauccuggacaucaccccuugcagcuucggcggagugucugugaucaccccuggcaccaacaccagcaaucagguggcagugcuguaccagggcgugaacuguaccgaagugcccguggccauucacgccgaucagcugacaccuacauggcggguguacuccaccggcagcaauguguuucagaccagagccggcugucugaucggagccgagcacgugaacaauagcuacgagugcgacauccccaucggcgcuggaaucugcgccagcuaccagacacagacaaacagcccucggagagccagaagcguggccagccagagcaucauugccuacacaaugucucugggcgccgagaacagcguggccuacuccaacaacucuaucgcuauccccaccaacuucaccaucagcgugaccacagagauccugccuguguccaugaccaagaccagcguggacugcaccauguacaucugcggcgauuccaccgagugcuccaaccugcugcugcaguacggcagcuucugcacccagcugaauagagcccugacagggaucgccguggaacaggacaagaacacccaagagguguucgcccaagugaagcagaucuacaagaccccuccuaucaaggacuucggcggcuucaauuucagccagauucugcccgauccuagcaagcccagcaagcggagcuucaucgaggaccugcuguucaacaaagugacacuggccgacgccggcuucaucaagcaguauggcgauugucugggcgacauugccgccagggaucugauuugcgcccagaaguuuaacggacugacagugcugccuccucugcugaccgaugagaugaucgcccaguacacaucugcccugcuggccggcacaaucacaagcggcuggacauuuggagcaggcgccgcucugcagauccccuuugcuaugcagauggccuaccgguucaacggcaucggagugacccagaaugugcuguacgagaaccagaagcugaucgccaaccaguucaacagcgccaucggcaagauccaggacagccugagcagcacagcaagcgcccugggaaagcugcaggacguggucaaccagaaugcccaggcacugaacacccuggucaagcagcuguccuccaacuucggcgccaucagcucugugcugaacgauauccugagcagacuggacaaggucgaggccgaggugcagaucgacagacugaucacaggcagacugcagagccuccagacauacgugacccagcagcugaucagagccgccgagauuagagccucugccaaucuggccgccaccaagaugucugagugugugcugggccagagcaagagaguggacuuuugcggcaagggcuaccaccugaugagcuucccucagucugccccucacggcgugguguuucugcacgugacauaugugcccgcucaagagaagaauuucaccaccgcuccagccaucugccacgacggcaaagcccacuuuccuagagaaggcguguucguguccaacggcacccauugguucgugacacagcggaacuucuacgagccccagaucaucaccaccgacaacaccuucgugucuggcaacugcgacgucgugaucggcauugugaacaauaccguguacgacccucugcagcccgagcuggacagcuucaaagaggaacuggacaaguacuuuaagaaccacacaagccccgacguggaccugggcgauaucagcggaaucaaugccagcgucgugaacauccagaaagagaucgaccggcugaacgagguggccaagaaucugaacgagagccugaucgaccugcaagaacuggggaaguacgagcaguacaucaaguggcccugguacaucuggcugggcuuuaucgccggacugauugccaucgugauggucacaaucaugcuguguugcaugaccagcugcuguagcugccugaagggcuguuguagcuguggcagcugcugcaaguucgacgaggacgauucugagcccgugcugaagggcgugaaacugcacuacacaugaggacuaguuauaagacugacuagcccgaugggccucccaacgggcccuccuccccuccuugcaccgagauuaauagaucucaaaggcucuuuucagagccaccaaaaaaaaaaaaaaaaaaaaaaaaaaaaaaaaaaaaaaaaaaaaaaaaaaaaaaaaaaaaaaaaaaaaaaaaaaaaaaaaaaaaaaaaaaaaaaaaaaaaa

SEQ ID NO: 24395 - RNA, 4041 nt, Artificial Sequence
  SARS-CoV-2/Wuhan/WIV05/2019__EPI_ISL_402128 spike protein mRNA gc mod (1-1273)(L18F_T20N_P26S_D138Y_R190S_K417T_E484K_N501Y_D614G_H655Y _T1027I)
aggagaaagcuuaccauguucguguuccuggugcugcugccucugguguccagccagugugugaacuucaccaacagaacacagcugccuagcgccuacaccaacagcuuuaccagaggcguguacuaccccgacaagguguucagauccagcgugcugcacucuacccaggaccuguuccugccuuucuucagcaacgugaccugguuccacgccauccacguguccggcaccaauggcaccaagagauucgacaaccccgugcugcccuucaacgacgggguguacuuugccagcaccgagaaguccaacaucaucagaggcuggaucuucggcaccacacuggacagcaagacccagagccugcugaucgugaacaacgccaccaacguggucaucaaagugugcgaguuccaguucugcaacuaccccuuccugggcgucuacuaccacaagaacaacaagagcuggauggaaagcgaguuccggguguacagcagcgccaacaacugcaccuucgaguacgugucccagccuuuccugauggaccuggaaggcaagcagggcaacuucaagaaccugagcgaguucguguuuaagaacaucgacggcuacuucaagaucuacagcaagcacaccccuaucaaccucgugcgggaucugccucagggcuucucugcucuggaaccccugguggaucugcccaucggcaucaacaucacccgguuucagacacugcuggcccugcacagaagcuaccugacaccuggcgauagcagcagcggauggacagcuggugccgccgcuuacuaugugggcuaccugcagccuagaaccuuccugcugaaguacaacgagaacggcaccaucaccgacgccguggauugugcucuggauccucugagcgagacaaagugcacccugaaguccuucaccguggaaaagggcaucuaccagaccagcaacuuccgggugcagcccaccgaauccaucgugcgguuccccaauaucaccaaucugugccccuucggcgagguguucaaugccaccagauucgccucuguguacgccuggaaccggaagcggaucagcaauugcguggccgacuacuccgugcuguacaacuccgccagcuucagcaccuucaagugcuacggcguguccccuaccaagcugaacgaccugugcuucacaaacguguacgccgacagcuucgugauccggggagaugaagugcggcagauugccccuggacagacaggcaccaucgccgacuacaacuacaagcugcccgacgacuucaccggcugugugauugccuggaacagcaacaaccuggacuccaaagucggcggcaacuacaauuaccuguaccggcuguuccggaaguccaaucugaagcccuucgagcgggacaucuccaccgagaucuaucaggccggcagcaccccuuguaacggcgugaagggcuucaacugcuacuucccacugcaguccuacggcuuucagcccacauacggcgugggcuaucagcccuacagagugguggugcugagcuucgaacugcugcaugccccugccacagugugcggcccuaagaaaagcaccaaucucgugaagaacaaaugcgugaacuucaacuucaacggccugaccggcaccggcgugcugacagagagcaacaagaaguuccugccauuccagcaguuuggccgggauaucgccgauaccacagacgccguuagagauccccagacacuggaaauccuggacaucaccccuugcagcuucggcggagugucugugaucaccccuggcaccaacaccagcaaucagguggcagugcuguaccagggcgugaacuguaccgaagugcccguggccauucacgccgaucagcugacaccuacauggcggguguacuccaccggcagcaauguguuucagaccagagccggcugucugaucggagccgaguacgugaacaauagcuacgagugcgacauccccaucggcgcuggaaucugcgccagcuaccagacacagacaaacagcccucggagagccagaagcguggccagccagagcaucauugccuacacaaugucucugggcgccgagaacagcguggccuacuccaacaacucuaucgcuauccccaccaacuucaccaucagcgugaccacagagauccugccuguguccaugaccaagaccagcguggacugcaccauguacaucugcggcgauuccaccgagugcuccaaccugcugcugcaguacggcagcuucugcacccagcugaauagagcccugacagggaucgccguggaacaggacaagaacacccaagagguguucgcccaagugaagcagaucuacaagaccccuccuaucaaggacuucggcggcuucaauuucagccagauucugcccgauccuagcaagcccagcaagcggagcuucaucgaggaccugcuguucaacaaagugacacuggccgacgccggcuucaucaagcaguauggcgauugucugggcgacauugccgccagggaucugauuugcgcccagaaguuuaacggacugacagugcugccuccucugcugaccgaugagaugaucgcccaguacacaucugcccugcuggccggcacaaucacaagcggcuggacauuuggagcaggcgccgcucugcagauccccuuugcuaugcagauggccuaccgguucaacggcaucggagugacccagaaugugcuguacgagaaccagaagcugaucgccaaccaguucaacagcgccaucggcaagauccaggacagccugagcagcacagcaagcgcccugggaaagcugcaggacguggucaaccagaaugcccaggcacugaacacccuggucaagcagcuguccuccaacuucggcgccaucagcucugugcugaacgauauccugagcagacuggacaaggucgaggccgaggugcagaucgacagacugaucacaggcagacugcagagccuccagacauacgugacccagcagcugaucagagccgccgagauuagagccucugccaaucuggccgccaucaagaugucugagugugugcugggccagagcaagagaguggacuuuugcggcaagggcuaccaccugaugagcuucccucagucugccccucacggcgugguguuucugcacgugacauaugugcccgcucaagagaagaauuucaccaccgcuccagccaucugccacgacggcaaagcccacuuuccuagagaaggcguguucguguccaacggcacccauugguucgugacacagcggaacuucuacgagccccagaucaucaccaccgacaacaccuucgugucuggcaacugcgacgucgugaucggcauugugaacaauaccguguacgacccucugcagcccgagcuggacagcuucaaagaggaacuggacaaguacuuuaagaaccacacaagccccgacguggaccugggcgauaucagcggaaucaaugccagcgucgugaacauccagaaagagaucgaccggcugaacgagguggccaagaaucugaacgagagccugaucgaccugcaagaacuggggaaguacgagcaguacaucaaguggcccugguacaucuggcugggcuuuaucgccggacugauugccaucgugauggucacaaucaugcuguguugcaugaccagcugcuguagcugccugaagggcuguuguagcuguggcagcugcugcaaguucgacgaggacgauucugagcccgugcugaagggcgugaaacugcacuacacaugaggacuaguuauaagacugacuagcccgaugggccucccaacgggcccuccuccccuccuugcaccgagauuaauagaucucaaaggcucuuuucagagccaccaaaaaaaaaaaaaaaaaaaaaaaaaaaaaaaaaaaaaaaaaaaaaaaaaaaaaaaaaaaaaaaaaaaaaaaaaaaaaaaaaaaaaaaaaaaaaaaaaaaaa

SEQ ID NO: 24396 - RNA, 4041 nt, Artificial Sequence
  SARS-CoV-2/Wuhan/WIV05/2019__EPI_ISL_402128 spike protein mRNA gc mod (1-1273)(S13I_W152C_L452R_D614G)
aggagaaagcuuaccauguucguguuccuggugcugcugccucugguguccauccagugugugaaccugaccaccagaacacagcugccuccagccuacaccaacagcuuuaccagaggcguguacuaccccgacaagguguucagauccagcgugcugcacucuacccaggaccuguuccugccuuucuucagcaacgugaccugguuccacgccauccacguguccggcaccaauggcaccaagagauucgacaaccccgugcugcccuucaacgacgggguguacuuugccagcaccgagaaguccaacaucaucagaggcuggaucuucggcaccacacuggacagcaagacccagagccugcugaucgugaacaacgccaccaacguggucaucaaagugugcgaguuccaguucugcaacgaccccuuccugggcgucuacuaccacaagaacaacaagagcugcauggaaagcgaguuccggguguacagcagcgccaacaacugcaccuucgaguacgugucccagccuuuccugauggaccuggaaggcaagcagggcaacuucaagaaccugcgcgaguucguguuuaagaacaucgacggcuacuucaagaucuacagcaagcacaccccuaucaaccucgugcgggaucugccucagggcuucucugcucuggaaccccugguggaucugcccaucggcaucaacaucacccgguuucagacacugcuggcccugcacagaagcuaccugacaccuggcgauagcagcagcggauggacagcuggugccgccgcuuacuaugugggcuaccugcagccuagaaccuuccugcugaaguacaacgagaacggcaccaucaccgacgccguggauugugcucuggauccucugagcgagacaaagugcacccugaaguccuucaccguggaaaagggcaucuaccagaccagcaacuuccgggugcagcccaccgaauccaucgugcgguuccccaauaucaccaaucugugccccuucggcgagguguucaaugccaccagauucgccucuguguacgccuggaaccggaagcggaucagcaauugcguggccgacuacuccgugcuguacaacuccgccagcuucagcaccuucaagugcuacggcguguccccuaccaagcugaacgaccugugcuucacaaacguguacgccgacagcuucgugauccggggagaugaagugcggcagauugccccuggacagacaggcaagaucgccgacuacaacuacaagcugcccgacgacuucaccggcugugugauugccuggaacagcaacaaccuggacuccaaagucggcggcaacuacaauuaccgcuaccggcuguuccggaaguccaaucugaagcccuucgagcgggacaucuccaccgagaucuaucaggccggcagcaccccuuguaacggcguggaaggcuucaacugcuacuucccacugcaguccuacggcuuucagcccacaaauggcgugggcuaucagcccuacagagugguggugcugagcuucgaacugcugcaugccccugccacagugugcggcccuaagaaaagcaccaaucucgugaagaacaaaugcgugaacuucaacuucaacggccugaccggcaccggcgugcugacagagagcaacaagaaguuccugccauuccagcaguuuggccgggauaucgccgauaccacagacgccguuagagauccccagacacuggaaauccuggacaucaccccuugcagcuucggcggagugucugugaucaccccuggcaccaacaccagcaaucagguggcagugcuguaccagggcgugaacuguaccgaagugcccguggccauucacgccgaucagcugacaccuacauggcggguguacuccaccggcagcaauguguuucagaccagagccggcugucugaucggagccgagcacgugaacaauagcuacgagugcgacauccccaucggcgcuggaaucugcgccagcuaccagacacagacaaacagcccucggagagccagaagcguggccagccagagcaucauugccuacacaaugucucugggcgccgagaacagcguggccuacuccaacaacucuaucgcuauccccaccaacuucaccaucagcgugaccacagagauccugccuguguccaugaccaagaccagcguggacugcaccauguacaucugcggcgauuccaccgagugcuccaaccugcugcugcaguacggcagcuucugcacccagcugaauagagcccugacagggaucgccguggaacaggacaagaacacccaagagguguucgcccaagugaagcagaucuacaagaccccuccuaucaaggacuucggcggcuucaauuucagccagauucugcccgauccuagcaagcccagcaagcggagcuucaucgaggaccugcuguucaacaaagugacacuggccgacgccggcuucaucaagcaguauggcgauugucugggcgacauugccgccagggaucugauuugcgcccagaaguuuaacggacugacagugcugccuccucugcugaccgaugagaugaucgcccaguacacaucugcccugcuggccggcacaaucacaagcggcuggacauuuggagcaggcgccgcucugcagauccccuuugcuaugcagauggccuaccgguucaacggcaucggagugacccagaaugugcuguacgagaaccagaagcugaucgccaaccaguucaacagcgccaucggcaagauccaggacagccugagcagcacagcaagcgcccugggaaagcugcaggacguggucaaccagaaugcccaggcacugaacacccuggucaagcagcuguccuccaacuucggcgccaucagcucugugcugaacgauauccugagcagacuggacaaggucgaggccgaggugcagaucgacagacugaucacaggcagacugcagagccuccagacauacgugacccagcagcugaucagagccgccgagauuagagccucugccaaucuggccgccaccaagaugucugagugugugcugggccagagcaagagaguggacuuuugcggcaagggcuaccaccugaugagcuucccucagucugccccucacggcgugguguuucugcacgugacauaugugcccgcucaagagaagaauuucaccaccgcuccagccaucugccacgacggcaaagcccacuuuccuagagaaggcguguucguguccaacggcacccauugguucgugacacagcggaacuucuacgagccccagaucaucaccaccgacaacaccuucgugucuggcaacugcgacgucgugaucggcauugugaacaauaccguguacgacccucugcagcccgagcuggacagcuucaaagaggaacuggacaaguacuuuaagaaccacacaagccccgacguggaccugggcgauaucagcggaaucaaugccagcgucgugaacauccagaaagagaucgaccggcugaacgagguggccaagaaucugaacgagagccugaucgaccugcaagaacuggggaaguacgagcaguacaucaaguggcccugguacaucuggcugggcuuuaucgccggacugauugccaucgugauggucacaaucaugcuguguugcaugaccagcugcuguagcugccugaagggcuguuguagcuguggcagcugcugcaaguucgacgaggacgauucugagcccgugcugaagggcgugaaacugcacuacacaugaggacuaguuauaagacugacuagcccgaugggccucccaacgggcccuccuccccuccuugcaccgagauuaauagaucucaaaggcucuuuucagagccaccaaaaaaaaaaaaaaaaaaaaaaaaaaaaaaaaaaaaaaaaaaaaaaaaaaaaaaaaaaaaaaaaaaaaaaaaaaaaaaaaaaaaaaaaaaaaaaaaaaaaa

SEQ ID NO: 24397 - RNA, 4041 nt, Artificial Sequence
  SARS-CoV-2/Wuhan/WIV05/2019__EPI_ISL_402128 spike protein mRNA gc (1-1273)(K986P_V987P) R10136, R10158
aggagaaagcuuaccauguucguguuccugguccuccugccccuggugagcucccagugcgugaaccucaccacccgcacgcagcugccgcccgccuacaccaacagcuucacccggggcgucuacuaccccgacaagguguuccgcuccagcgugcugcacuccacccaggaccucuuccugcccuucuucagcaacgucacgugguuccacgccauccacguguccgggaccaacggcaccaagcgguucgacaacccggugcugcccuucaacgacggggucuacuucgcgagcaccgagaaguccaacaucauccgcggcuggaucuucgggacgacccucgacagcaagacccagucccugcugaucgugaacaacgccaccaacguggucaucaaggugugcgaguuccaguucugcaacgaccccuuccucggcguguacuaccacaagaacaacaagagcuggauggaguccgaguuccgggucuacagcuccgccaacaacugcacguucgaguacgugagccagcccuuccugauggaccuggagggcaagcaggggaacuucaagaaccuccgcgaguucguguucaagaacaucgacggcuacuucaagaucuacuccaagcacaccccgaucaaccugguccgggaccugccccagggguucagcgcccucgagccccugguggaccugcccaucggcaucaacaucacccgcuuccagacccuccuggcccugcaccgguccuaccucacgccgggggacagcagcuccggcuggaccgcgggcgccgccgccuacuacgugggguaccugcagccccgcaccuuccugcucaaguacaacgagaacggcaccaucacggacgcggucgacugcgcccuggacccccugagcgagaccaagugcacccucaaguccuucaccguggagaaggggaucuaccagacgagcaacuuccgggugcagcccaccgaguccaucguccgcuucccgaacaucaccaaccugugccccuucggcgagguguucaacgccacccgguucgccagcgucuacgccuggaaccgcaagcggaucuccaacugcguggcggacuacagcgugcuguacaacuccgccagcuucuccacguucaagugcuacggcgucagccccaccaagcucaacgaccugugcuucaccaacguguacgccgacuccuucgugauccgcggggacgagguccggcagaucgcccccggccagaccgggaagaucgccgacuacaacuacaagcugccggacgacuucacgggcugcgugaucgcguggaacagcaacaaccucgacuccaaggucgggggcaacuacaacuaccuguaccgccuguuccgcaagagcaaccucaagcccuucgagcgggacaucuccaccgagaucuaccaggccggcagcacccccugcaacgggguggagggcuucaacugcuacuucccccugcaguccuacggguuccagccgaccaacggcgugggguaccagcccuaccggguggucgugcugagcuucgagcuccugcacgcccccgccacggugugcggccccaagaaguccaccaaccuggucaagaacaagugcgugaacuucaacuucaacggccucaccgggaccggcgugcugaccgagagcaacaagaaguuccugccguuccagcaguucgggcgcgacaucgccgacacgaccgacgcgguccgcgacccccagacccuggagauccucgacaucacccccugcagcuucggcgggguguccgugaucacgccgggcaccaacaccagcaaccaggucgccgugcuguaccaggacgugaacugcaccgagguccccguggccauccacgccgaccagcugacgcccaccuggcggguguacuccaccggcagcaacgucuuccagacccgcgccgggugccucaucggcgcggagcacgugaacaacuccuacgagugcgacauccccaucggggccggcaucugcgccagcuaccagacgcagaccaacuccccgcggcgcgcccggagcguggcgucccagagcaucaucgccuacaccaugucccugggcgccgagaacagcgucgccuacuccaacaacagcaucgccauccccaccaacuucacgaucuccgugaccaccgagauccugcccgugagcaugaccaagacgagcgucgacugcaccauguacaucugcggggacuccaccgagugcagcaaccuccugcugcaguacggcuccuucugcacccagcucaaccgcgcgcugacggggaucgccguggagcaggacaagaacacccaggagguguucgcccaggucaagcagaucuacaagacgcccccgaucaaggacuucggcggguucaacuucagccagauccugcccgaccccuccaagcccagcaagcgguccuucaucgaggaccuccuguucaacaaggugacccuggccgacgccggcuucaucaagcaguacggcgacugccucggggacaucgcggcccgcgaccugaucugcgcccagaaguucaacggccugaccgugcucccgccccugcugaccgacgagaugaucgcccaguacaccagcgcccuccuggcggggaccaucacguccggcuggaccuucggggccggcgccgcccugcagauccccuucgcgaugcagauggccuaccgguucaacggcaucggggucacccagaacgugcucuacgagaaccagaagcugaucgccaaccaguucaacagcgccaucggcaagauccaggacucccugagcuccaccgccagcgcgcucgggaagcugcaggacguggucaaccagaacgcccaggcccugaacacgcucgugaagcagcuguccagcaacuucggcgccaucuccagcgugcugaacgacauccucucccgccuggacccgcccgaggccgaggugcagaucgaccggcugaucaccgggcgccuccagagccugcagaccuacgugacccagcagcugauccgggcggccgagauccgcgccagcgccaaccucgccgcgaccaagauguccgagugcguccugggccagagcaagcggguggacuucugcggcaagggguaccaccugauguccuucccccagagcgccccgcacggcguggucuuccuccacgugacguacguccccgcccaggagaagaacuucaccaccgcccccgcgaucugccacgacgggaaggcccacuucccccgcgagggcguguucguguccaacgggacccacugguucgucacgcagcggaacuucuacgagccgcagaucaucaccaccgacaacaccuucgugagcggcaacugcgacguggucaucggcaucgugaacaacacgguguacgacccccugcagcccgagcuggacuccuucaaggaggagcucgacaaguacuucaagaaccacaccagccccgacgucgaccugggggacaucuccggcaucaacgccagcguggugaacauccagaaggagaucgaccgccugaacgaggucgccaagaaccucaacgagucccugaucgaccugcaggagcucgggaaguacgagcaguacaucaaguggccgugguacaucuggcugggcuucaucgccggccugaucgcgaucgugauggugaccaucaugcucugcugcaugaccagcugcugcuccugccugaaggggugcugcagcugcggcuccugcugcaaguucgacgaggacgacagcgagcccguccugaagggggugaagcuccacuacacgugaggacuaguuauaagacugacuagcccgaugggccucccaacgggcccuccuccccuccuugcaccgagauuaauagaucucaaaggcucuuuucagagccaccaaaaaaaaaaaaaaaaaaaaaaaaaaaaaaaaaaaaaaaaaaaaaaaaaaaaaaaaaaaaaaaaaaaaaaaaaaaaaaaaaaaaaaaaaaaaaaaaaaaaa

SEQ ID NO: 24398 - RNA, 4041 nt, Artificial Sequence
  SARS-CoV-2/Wuhan/WIV05/2019__EPI_ISL_402128 spike protein mRNA gc (1-1273)(K986P_V987P_ D614G)
aggagaaagcuuaccauguucguguuccugguccuccugccccuggugagcucccagugcgugaaccucaccacccgcacgcagcugccgcccgccuacaccaacagcuucacccggggcgucuacuaccccgacaagguguuccgcuccagcgugcugcacuccacccaggaccucuuccugcccuucuucagcaacgucacgugguuccacgccauccacguguccgggaccaacggcaccaagcgguucgacaacccggugcugcccuucaacgacggggucuacuucgcgagcaccgagaaguccaacaucauccgcggcuggaucuucgggacgacccucgacagcaagacccagucccugcugaucgugaacaacgccaccaacguggucaucaaggugugcgaguuccaguucugcaacgaccccuuccucggcguguacuaccacaagaacaacaagagcuggauggaguccgaguuccgggucuacagcuccgccaacaacugcacguucgaguacgugagccagcccuuccugauggaccuggagggcaagcaggggaacuucaagaaccuccgcgaguucguguucaagaacaucgacggcuacuucaagaucuacuccaagcacaccccgaucaaccugguccgggaccugccccagggguucagcgcccucgagccccugguggaccugcccaucggcaucaacaucacccgcuuccagacccuccuggcccugcaccgguccuaccucacgccgggggacagcagcuccggcuggaccgcgggcgccgccgccuacuacgugggguaccugcagccccgcaccuuccugcucaaguacaacgagaacggcaccaucacggacgcggucgacugcgcccuggacccccugagcgagaccaagugcacccucaaguccuucaccguggagaaggggaucuaccagacgagcaacuuccgggugcagcccaccgaguccaucguccgcuucccgaacaucaccaaccugugccccuucggcgagguguucaacgccacccgguucgccagcgucuacgccuggaaccgcaagcggaucuccaacugcguggcggacuacagcgugcuguacaacuccgccagcuucuccacguucaagugcuacggcgucagccccaccaagcucaacgaccugugcuucaccaacguguacgccgacuccuucgugauccgcggggacgagguccggcagaucgcccccggccagaccgggaagaucgccgacuacaacuacaagcugccggacgacuucacgggcugcgugaucgcguggaacagcaacaaccucgacuccaaggucgggggcaacuacaacuaccuguaccgccuguuccgcaagagcaaccucaagcccuucgagcgggacaucuccaccgagaucuaccaggccggcagcacccccugcaacgggguggagggcuucaacugcuacuucccccugcaguccuacggguuccagccgaccaacggcgugggguaccagcccuaccggguggucgugcugagcuucgagcuccugcacgcccccgccacggugugcggccccaagaaguccaccaaccuggucaagaacaagugcgugaacuucaacuucaacggccucaccgggaccggcgugcugaccgagagcaacaagaaguuccugccguuccagcaguucgggcgcgacaucgccgacacgaccgacgcgguccgcgacccccagacccuggagauccucgacaucacccccugcagcuucggcgggguguccgugaucacgccgggcaccaacaccagcaaccaggucgccgugcuguaccagggcgugaacugcaccgagguccccguggccauccacgccgaccagcugacgcccaccuggcggguguacuccaccggcagcaacgucuuccagacccgcgccgggugccucaucggcgcggagcacgugaacaacuccuacgagugcgacauccccaucggggccggcaucugcgccagcuaccagacgcagaccaacuccccgcggcgcgcccggagcguggcgucccagagcaucaucgccuacaccaugucccugggcgccgagaacagcgucgccuacuccaacaacagcaucgccauccccaccaacuucacgaucuccgugaccaccgagauccugcccgugagcaugaccaagacgagcgucgacugcaccauguacaucugcggggacuccaccgagugcagcaaccuccugcugcaguacggcuccuucugcacccagcucaaccgcgcgcugacggggaucgccguggagcaggacaagaacacccaggagguguucgcccaggucaagcagaucuacaagacgcccccgaucaaggacuucggcggguucaacuucagccagauccugcccgaccccuccaagcccagcaagcgguccuucaucgaggaccuccuguucaacaaggugacccuggccgacgccggcuucaucaagcaguacggcgacugccucggggacaucgcggcccgcgaccugaucugcgcccagaaguucaacggccugaccgugcucccgccccugcugaccgacgagaugaucgcccaguacaccagcgcccuccuggcggggaccaucacguccggcuggaccuucggggccggcgccgcccugcagauccccuucgcgaugcagauggccuaccgguucaacggcaucggggucacccagaacgugcucuacgagaaccagaagcugaucgccaaccaguucaacagcgccaucggcaagauccaggacucccugagcuccaccgccagcgcgcucgggaagcugcaggacguggucaaccagaacgcccaggcccugaacacgcucgugaagcagcuguccagcaacuucggcgccaucuccagcgugcugaacgacauccucucccgccuggacccgcccgaggccgaggugcagaucgaccggcugaucaccgggcgccuccagagccugcagaccuacgugacccagcagcugauccgggcggccgagauccgcgccagcgccaaccucgccgcgaccaagauguccgagugcguccugggccagagcaagcggguggacuucugcggcaagggguaccaccugauguccuucccccagagcgccccgcacggcguggucuuccuccacgugacguacguccccgcccaggagaagaacuucaccaccgcccccgcgaucugccacgacgggaaggcccacuucccccgcgagggcguguucguguccaacgggacccacugguucgucacgcagcggaacuucuacgagccgcagaucaucaccaccgacaacaccuucgugagcggcaacugcgacguggucaucggcaucgugaacaacacgguguacgacccccugcagcccgagcuggacuccuucaaggaggagcucgacaaguacuucaagaaccacaccagccccgacgucgaccugggggacaucuccggcaucaacgccagcguggugaacauccagaaggagaucgaccgccugaacgaggucgccaagaaccucaacgagucccugaucgaccugcaggagcucgggaaguacgagcaguacaucaaguggccgugguacaucuggcugggcuucaucgccggccugaucgcgaucgugauggugaccaucaugcucugcugcaugaccagcugcugcuccugccugaaggggugcugcagcugcggcuccugcugcaaguucgacgaggacgacagcgagcccguccugaagggggugaagcuccacuacacgugaggacuaguuauaagacugacuagcccgaugggccucccaacgggcccuccuccccuccuugcaccgagauuaauagaucucaaaggcucuuuucagagccaccaaaaaaaaaaaaaaaaaaaaaaaaaaaaaaaaaaaaaaaaaaaaaaaaaaaaaaaaaaaaaaaaaaaaaaaaaaaaaaaaaaaaaaaaaaaaaaaaaaaaa

SEQ ID NO: 24399 - RNA, 4041 nt, Artificial Sequence
  SARS-CoV-2/Wuhan/WIV05/2019__EPI_ISL_402128 spike protein mRNA gc (1-1273)(K986P_V987P_A222V_D614G)
aggagaaagcuuaccauguucguguuccugguccuccugccccuggugagcucccagugcgugaaccucaccacccgcacgcagcugccgcccgccuacaccaacagcuucacccggggcgucuacuaccccgacaagguguuccgcuccagcgugcugcacuccacccaggaccucuuccugcccuucuucagcaacgucacgugguuccacgccauccacguguccgggaccaacggcaccaagcgguucgacaacccggugcugcccuucaacgacggggucuacuucgcgagcaccgagaaguccaacaucauccgcggcuggaucuucgggacgacccucgacagcaagacccagucccugcugaucgugaacaacgccaccaacguggucaucaaggugugcgaguuccaguucugcaacgaccccuuccucggcguguacuaccacaagaacaacaagagcuggauggaguccgaguuccgggucuacagcuccgccaacaacugcacguucgaguacgugagccagcccuuccugauggaccuggagggcaagcaggggaacuucaagaaccuccgcgaguucguguucaagaacaucgacggcuacuucaagaucuacuccaagcacaccccgaucaaccugguccgggaccugccccagggguucagcguccucgagccccugguggaccugcccaucggcaucaacaucacccgcuuccagacccuccuggcccugcaccgguccuaccucacgccgggggacagcagcuccggcuggaccgcgggcgccgccgccuacuacgugggguaccugcagccccgcaccuuccugcucaaguacaacgagaacggcaccaucacggacgcggucgacugcgcccuggacccccugagcgagaccaagugcacccucaaguccuucaccguggagaaggggaucuaccagacgagcaacuuccgggugcagcccaccgaguccaucguccgcuucccgaacaucaccaaccugugccccuucggcgagguguucaacgccacccgguucgccagcgucuacgccuggaaccgcaagcggaucuccaacugcguggcggacuacagcgugcuguacaacuccgccagcuucuccacguucaagugcuacggcgucagccccaccaagcucaacgaccugugcuucaccaacguguacgccgacuccuucgugauccgcggggacgagguccggcagaucgcccccggccagaccgggaagaucgccgacuacaacuacaagcugccggacgacuucacgggcugcgugaucgcguggaacagcaacaaccucgacuccaaggucgggggcaacuacaacuaccuguaccgccuguuccgcaagagcaaccucaagcccuucgagcgggacaucuccaccgagaucuaccaggccggcagcacccccugcaacgggguggagggcuucaacugcuacuucccccugcaguccuacggguuccagccgaccaacggcgugggguaccagcccuaccggguggucgugcugagcuucgagcuccugcacgcccccgccacggugugcggccccaagaaguccaccaaccuggucaagaacaagugcgugaacuucaacuucaacggccucaccgggaccggcgugcugaccgagagcaacaagaaguuccugccguuccagcaguucgggcgcgacaucgccgacacgaccgacgcgguccgcgacccccagacccuggagauccucgacaucacccccugcagcuucggcgggguguccgugaucacgccgggcaccaacaccagcaaccaggucgccgugcuguaccagggcgugaacugcaccgagguccccguggccauccacgccgaccagcugacgcccaccuggcggguguacuccaccggcagcaacgucuuccagacccgcgccgggugccucaucggcgcggagcacgugaacaacuccuacgagugcgacauccccaucggggccggcaucugcgccagcuaccagacgcagaccaacuccccgcggcgcgcccggagcguggcgucccagagcaucaucgccuacaccaugucccugggcgccgagaacagcgucgccuacuccaacaacagcaucgccauccccaccaacuucacgaucuccgugaccaccgagauccugcccgugagcaugaccaagacgagcgucgacugcaccauguacaucugcggggacuccaccgagugcagcaaccuccugcugcaguacggcuccuucugcacccagcucaaccgcgcgcugacggggaucgccguggagcaggacaagaacacccaggagguguucgcccaggucaagcagaucuacaagacgcccccgaucaaggacuucggcggguucaacuucagccagauccugcccgaccccuccaagcccagcaagcgguccuucaucgaggaccuccuguucaacaaggugacccuggccgacgccggcuucaucaagcaguacggcgacugccucggggacaucgcggcccgcgaccugaucugcgcccagaaguucaacggccugaccgugcucccgccccugcugaccgacgagaugaucgcccaguacaccagcgcccuccuggcggggaccaucacguccggcuggaccuucggggccggcgccgcccugcagauccccuucgcgaugcagauggccuaccgguucaacggcaucggggucacccagaacgugcucuacgagaaccagaagcugaucgccaaccaguucaacagcgccaucggcaagauccaggacucccugagcuccaccgccagcgcgcucgggaagcugcaggacguggucaaccagaacgcccaggcccugaacacgcucgugaagcagcuguccagcaacuucggcgccaucuccagcgugcugaacgacauccucucccgccuggacccgcccgaggccgaggugcagaucgaccggcugaucaccgggcgccuccagagccugcagaccuacgugacccagcagcugauccgggcggccgagauccgcgccagcgccaaccucgccgcgaccaagauguccgagugcguccugggccagagcaagcggguggacuucugcggcaagggguaccaccugauguccuucccccagagcgccccgcacggcguggucuuccuccacgugacguacguccccgcccaggagaagaacuucaccaccgcccccgcgaucugccacgacgggaaggcccacuucccccgcgagggcguguucguguccaacgggacccacugguucgucacgcagcggaacuucuacgagccgcagaucaucaccaccgacaacaccuucgugagcggcaacugcgacguggucaucggcaucgugaacaacacgguguacgacccccugcagcccgagcuggacuccuucaaggaggagcucgacaaguacuucaagaaccacaccagccccgacgucgaccugggggacaucuccggcaucaacgccagcguggugaacauccagaaggagaucgaccgccugaacgaggucgccaagaaccucaacgagucccugaucgaccugcaggagcucgggaaguacgagcaguacaucaaguggccgugguacaucuggcugggcuucaucgccggccugaucgcgaucgugauggugaccaucaugcucugcugcaugaccagcugcugcuccugccugaaggggugcugcagcugcggcuccugcugcaaguucgacgaggacgacagcgagcccguccugaagggggugaagcuccacuacacgugaggacuaguuauaagacugacuagcccgaugggccucccaacgggcccuccuccccuccuugcaccgagauuaauagaucucaaaggcucuuuucagagccaccaaaaaaaaaaaaaaaaaaaaaaaaaaaaaaaaaaaaaaaaaaaaaaaaaaaaaaaaaaaaaaaaaaaaaaaaaaaaaaaaaaaaaaaaaaaaaaaaaaaaa

SEQ ID NO: 24400 - RNA, 4041 nt, Artificial Sequence
  SARS-CoV-2/Wuhan/WIV05/2019__EPI_ISL_402128 spike protein mRNA gc (1-1273)(K986P_V987P_N439K_D614G)
aggagaaagcuuaccauguucguguuccugguccuccugccccuggugagcucccagugcgugaaccucaccacccgcacgcagcugccgcccgccuacaccaacagcuucacccggggcgucuacuaccccgacaagguguuccgcuccagcgugcugcacuccacccaggaccucuuccugcccuucuucagcaacgucacgugguuccacgccauccacguguccgggaccaacggcaccaagcgguucgacaacccggugcugcccuucaacgacggggucuacuucgcgagcaccgagaaguccaacaucauccgcggcuggaucuucgggacgacccucgacagcaagacccagucccugcugaucgugaacaacgccaccaacguggucaucaaggugugcgaguuccaguucugcaacgaccccuuccucggcguguacuaccacaagaacaacaagagcuggauggaguccgaguuccgggucuacagcuccgccaacaacugcacguucgaguacgugagccagcccuuccugauggaccuggagggcaagcaggggaacuucaagaaccuccgcgaguucguguucaagaacaucgacggcuacuucaagaucuacuccaagcacaccccgaucaaccugguccgggaccugccccagggguucagcgcccucgagccccugguggaccugcccaucggcaucaacaucacccgcuuccagacccuccuggcccugcaccgguccuaccucacgccgggggacagcagcuccggcuggaccgcgggcgccgccgccuacuacgugggguaccugcagccccgcaccuuccugcucaaguacaacgagaacggcaccaucacggacgcggucgacugcgcccuggacccccugagcgagaccaagugcacccucaaguccuucaccguggagaaggggaucuaccagacgagcaacuuccgggugcagcccaccgaguccaucguccgcuucccgaacaucaccaaccugugccccuucggcgagguguucaacgccacccgguucgccagcgucuacgccuggaaccgcaagcggaucuccaacugcguggcggacuacagcgugcuguacaacuccgccagcuucuccacguucaagugcuacggcgucagccccaccaagcucaacgaccugugcuucaccaacguguacgccgacuccuucgugauccgcggggacgagguccggcagaucgcccccggccagaccgggaagaucgccgacuacaacuacaagcugccggacgacuucacgggcugcgugaucgcguggaacagcaagaaccucgacuccaaggucgggggcaacuacaacuaccuguaccgccuguuccgcaagagcaaccucaagcccuucgagcgggacaucuccaccgagaucuaccaggccggcagcacccccugcaacgggguggagggcuucaacugcuacuucccccugcaguccuacggguuccagccgaccaacggcgugggguaccagcccuaccggguggucgugcugagcuucgagcuccugcacgcccccgccacggugugcggccccaagaaguccaccaaccuggucaagaacaagugcgugaacuucaacuucaacggccucaccgggaccggcgugcugaccgagagcaacaagaaguuccugccguuccagcaguucgggcgcgacaucgccgacacgaccgacgcgguccgcgacccccagacccuggagauccucgacaucacccccugcagcuucggcgggguguccgugaucacgccgggcaccaacaccagcaaccaggucgccgugcuguaccagggcgugaacugcaccgagguccccguggccauccacgccgaccagcugacgcccaccuggcggguguacuccaccggcagcaacgucuuccagacccgcgccgggugccucaucggcgcggagcacgugaacaacuccuacgagugcgacauccccaucggggccggcaucugcgccagcuaccagacgcagaccaacuccccgcggcgcgcccggagcguggcgucccagagcaucaucgccuacaccaugucccugggcgccgagaacagcgucgccuacuccaacaacagcaucgccauccccaccaacuucacgaucuccgugaccaccgagauccugcccgugagcaugaccaagacgagcgucgacugcaccauguacaucugcggggacuccaccgagugcagcaaccuccugcugcaguacggcuccuucugcacccagcucaaccgcgcgcugacggggaucgccguggagcaggacaagaacacccaggagguguucgcccaggucaagcagaucuacaagacgcccccgaucaaggacuucggcggguucaacuucagccagauccugcccgaccccuccaagcccagcaagcgguccuucaucgaggaccuccuguucaacaaggugacccuggccgacgccggcuucaucaagcaguacggcgacugccucggggacaucgcggcccgcgaccugaucugcgcccagaaguucaacggccugaccgugcucccgccccugcugaccgacgagaugaucgcccaguacaccagcgcccuccuggcggggaccaucacguccggcuggaccuucggggccggcgccgcccugcagauccccuucgcgaugcagauggccuaccgguucaacggcaucggggucacccagaacgugcucuacgagaaccagaagcugaucgccaaccaguucaacagcgccaucggcaagauccaggacucccugagcuccaccgccagcgcgcucgggaagcugcaggacguggucaaccagaacgcccaggcccugaacacgcucgugaagcagcuguccagcaacuucggcgccaucuccagcgugcugaacgacauccucucccgccuggacccgcccgaggccgaggugcagaucgaccggcugaucaccgggcgccuccagagccugcagaccuacgugacccagcagcugauccgggcggccgagauccgcgccagcgccaaccucgccgcgaccaagauguccgagugcguccugggccagagcaagcggguggacuucugcggcaagggguaccaccugauguccuucccccagagcgccccgcacggcguggucuuccuccacgugacguacguccccgcccaggagaagaacuucaccaccgcccccgcgaucugccacgacgggaaggcccacuucccccgcgagggcguguucguguccaacgggacccacugguucgucacgcagcggaacuucuacgagccgcagaucaucaccaccgacaacaccuucgugagcggcaacugcgacguggucaucggcaucgugaacaacacgguguacgacccccugcagcccgagcuggacuccuucaaggaggagcucgacaaguacuucaagaaccacaccagccccgacgucgaccugggggacaucuccggcaucaacgccagcguggugaacauccagaaggagaucgaccgccugaacgaggucgccaagaaccucaacgagucccugaucgaccugcaggagcucgggaaguacgagcaguacaucaaguggccgugguacaucuggcugggcuucaucgccggccugaucgcgaucgugauggugaccaucaugcucugcugcaugaccagcugcugcuccugccugaaggggugcugcagcugcggcuccugcugcaaguucgacgaggacgacagcgagcccguccugaagggggugaagcuccacuacacgugaggacuaguuauaagacugacuagcccgaugggccucccaacgggcccuccuccccuccuugcaccgagauuaauagaucucaaaggcucuuuucagagccaccaaaaaaaaaaaaaaaaaaaaaaaaaaaaaaaaaaaaaaaaaaaaaaaaaaaaaaaaaaaaaaaaaaaaaaaaaaaaaaaaaaaaaaaaaaaaaaaaaaaaa

SEQ ID NO: 24401 - RNA, 4041 nt, Artificial Sequence
  SARS-CoV-2/Wuhan/WIV05/2019__EPI_ISL_402128 spike protein mRNA gc (1-1273)(K986P_V987P_S477N_D614G)
aggagaaagcuuaccauguucguguuccugguccuccugccccuggugagcucccagugcgugaaccucaccacccgcacgcagcugccgcccgccuacaccaacagcuucacccggggcgucuacuaccccgacaagguguuccgcuccagcgugcugcacuccacccaggaccucuuccugcccuucuucagcaacgucacgugguuccacgccauccacguguccgggaccaacggcaccaagcgguucgacaacccggugcugcccuucaacgacggggucuacuucgcgagcaccgagaaguccaacaucauccgcggcuggaucuucgggacgacccucgacagcaagacccagucccugcugaucgugaacaacgccaccaacguggucaucaaggugugcgaguuccaguucugcaacgaccccuuccucggcguguacuaccacaagaacaacaagagcuggauggaguccgaguuccgggucuacagcuccgccaacaacugcacguucgaguacgugagccagcccuuccugauggaccuggagggcaagcaggggaacuucaagaaccuccgcgaguucguguucaagaacaucgacggcuacuucaagaucuacuccaagcacaccccgaucaaccugguccgggaccugccccagggguucagcgcccucgagccccugguggaccugcccaucggcaucaacaucacccgcuuccagacccuccuggcccugcaccgguccuaccucacgccgggggacagcagcuccggcuggaccgcgggcgccgccgccuacuacgugggguaccugcagccccgcaccuuccugcucaaguacaacgagaacggcaccaucacggacgcggucgacugcgcccuggacccccugagcgagaccaagugcacccucaaguccuucaccguggagaaggggaucuaccagacgagcaacuuccgggugcagcccaccgaguccaucguccgcuucccgaacaucaccaaccugugccccuucggcgagguguucaacgccacccgguucgccagcgucuacgccuggaaccgcaagcggaucuccaacugcguggcggacuacagcgugcuguacaacuccgccagcuucuccacguucaagugcuacggcgucagccccaccaagcucaacgaccugugcuucaccaacguguacgccgacuccuucgugauccgcggggacgagguccggcagaucgcccccggccagaccgggaagaucgccgacuacaacuacaagcugccggacgacuucacgggcugcgugaucgcguggaacagcaacaaccucgacuccaaggucgggggcaacuacaacuaccuguaccgccuguuccgcaagagcaaccucaagcccuucgagcgggacaucuccaccgagaucuaccaggccggcaacacccccugcaacgggguggagggcuucaacugcuacuucccccugcaguccuacggguuccagccgaccaacggcgugggguaccagcccuaccggguggucgugcugagcuucgagcuccugcacgcccccgccacggugugcggccccaagaaguccaccaaccuggucaagaacaagugcgugaacuucaacuucaacggccucaccgggaccggcgugcugaccgagagcaacaagaaguuccugccguuccagcaguucgggcgcgacaucgccgacacgaccgacgcgguccgcgacccccagacccuggagauccucgacaucacccccugcagcuucggcgggguguccgugaucacgccgggcaccaacaccagcaaccaggucgccgugcuguaccagggcgugaacugcaccgagguccccguggccauccacgccgaccagcugacgcccaccuggcggguguacuccaccggcagcaacgucuuccagacccgcgccgggugccucaucggcgcggagcacgugaacaacuccuacgagugcgacauccccaucggggccggcaucugcgccagcuaccagacgcagaccaacuccccgcggcgcgcccggagcguggcgucccagagcaucaucgccuacaccaugucccugggcgccgagaacagcgucgccuacuccaacaacagcaucgccauccccaccaacuucacgaucuccgugaccaccgagauccugcccgugagcaugaccaagacgagcgucgacugcaccauguacaucugcggggacuccaccgagugcagcaaccuccugcugcaguacggcuccuucugcacccagcucaaccgcgcgcugacggggaucgccguggagcaggacaagaacacccaggagguguucgcccaggucaagcagaucuacaagacgcccccgaucaaggacuucggcggguucaacuucagccagauccugcccgaccccuccaagcccagcaagcgguccuucaucgaggaccuccuguucaacaaggugacccuggccgacgccggcuucaucaagcaguacggcgacugccucggggacaucgcggcccgcgaccugaucugcgcccagaaguucaacggccugaccgugcucccgccccugcugaccgacgagaugaucgcccaguacaccagcgcccuccuggcggggaccaucacguccggcuggaccuucggggccggcgccgcccugcagauccccuucgcgaugcagauggccuaccgguucaacggcaucggggucacccagaacgugcucuacgagaaccagaagcugaucgccaaccaguucaacagcgccaucggcaagauccaggacucccugagcuccaccgccagcgcgcucgggaagcugcaggacguggucaaccagaacgcccaggcccugaacacgcucgugaagcagcuguccagcaacuucggcgccaucuccagcgugcugaacgacauccucucccgccuggacccgcccgaggccgaggugcagaucgaccggcugaucaccgggcgccuccagagccugcagaccuacgugacccagcagcugauccgggcggccgagauccgcgccagcgccaaccucgccgcgaccaagauguccgagugcguccugggccagagcaagcggguggacuucugcggcaagggguaccaccugauguccuucccccagagcgccccgcacggcguggucuuccuccacgugacguacguccccgcccaggagaagaacuucaccaccgcccccgcgaucugccacgacgggaaggcccacuucccccgcgagggcguguucguguccaacgggacccacugguucgucacgcagcggaacuucuacgagccgcagaucaucaccaccgacaacaccuucgugagcggcaacugcgacguggucaucggcaucgugaacaacacgguguacgacccccugcagcccgagcuggacuccuucaaggaggagcucgacaaguacuucaagaaccacaccagccccgacgucgaccugggggacaucuccggcaucaacgccagcguggugaacauccagaaggagaucgaccgccugaacgaggucgccaagaaccucaacgagucccugaucgaccugcaggagcucgggaaguacgagcaguacaucaaguggccgugguacaucuggcugggcuucaucgccggccugaucgcgaucgugauggugaccaucaugcucugcugcaugaccagcugcugcuccugccugaaggggugcugcagcugcggcuccugcugcaaguucgacgaggacgacagcgagcccguccugaagggggugaagcuccacuacacgugaggacuaguuauaagacugacuagcccgaugggccucccaacgggcccuccuccccuccuugcaccgagauuaauagaucucaaaggcucuuuucagagccaccaaaaaaaaaaaaaaaaaaaaaaaaaaaaaaaaaaaaaaaaaaaaaaaaaaaaaaaaaaaaaaaaaaaaaaaaaaaaaaaaaaaaaaaaaaaaaaaaaaaaa

SEQ ID NO: 24402 - RNA, 4041 nt, Artificial Sequence
  SARS-CoV-2/Wuhan/WIV05/2019__EPI_ISL_402128 spike protein mRNA gc (1-1273)(K986P_V987P_N501Y_D614G)
aggagaaagcuuaccauguucguguuccugguccuccugccccuggugagcucccagugcgugaaccucaccacccgcacgcagcugccgcccgccuacaccaacagcuucacccggggcgucuacuaccccgacaagguguuccgcuccagcgugcugcacuccacccaggaccucuuccugcccuucuucagcaacgucacgugguuccacgccauccacguguccgggaccaacggcaccaagcgguucgacaacccggugcugcccuucaacgacggggucuacuucgcgagcaccgagaaguccaacaucauccgcggcuggaucuucgggacgacccucgacagcaagacccagucccugcugaucgugaacaacgccaccaacguggucaucaaggugugcgaguuccaguucugcaacgaccccuuccucggcguguacuaccacaagaacaacaagagcuggauggaguccgaguuccgggucuacagcuccgccaacaacugcacguucgaguacgugagccagcccuuccugauggaccuggagggcaagcaggggaacuucaagaaccuccgcgaguucguguucaagaacaucgacggcuacuucaagaucuacuccaagcacaccccgaucaaccugguccgggaccugccccagggguucagcgcccucgagccccugguggaccugcccaucggcaucaacaucacccgcuuccagacccuccuggcccugcaccgguccuaccucacgccgggggacagcagcuccggcuggaccgcgggcgccgccgccuacuacgugggguaccugcagccccgcaccuuccugcucaaguacaacgagaacggcaccaucacggacgcggucgacugcgcccuggacccccugagcgagaccaagugcacccucaaguccuucaccguggagaaggggaucuaccagacgagcaacuuccgggugcagcccaccgaguccaucguccgcuucccgaacaucaccaaccugugccccuucggcgagguguucaacgccacccgguucgccagcgucuacgccuggaaccgcaagcggaucuccaacugcguggcggacuacagcgugcuguacaacuccgccagcuucuccacguucaagugcuacggcgucagccccaccaagcucaacgaccugugcuucaccaacguguacgccgacuccuucgugauccgcggggacgagguccggcagaucgcccccggccagaccgggaagaucgccgacuacaacuacaagcugccggacgacuucacgggcugcgugaucgcguggaacagcaacaaccucgacuccaaggucgggggcaacuacaacuaccuguaccgccuguuccgcaagagcaaccucaagcccuucgagcgggacaucuccaccgagaucuaccaggccggcagcacccccugcaacgggguggagggcuucaacugcuacuucccccugcaguccuacggguuccagccgaccuacggcgugggguaccagcccuaccggguggucgugcugagcuucgagcuccugcacgcccccgccacggugugcggccccaagaaguccaccaaccuggucaagaacaagugcgugaacuucaacuucaacggccucaccgggaccggcgugcugaccgagagcaacaagaaguuccugccguuccagcaguucgggcgcgacaucgccgacacgaccgacgcgguccgcgacccccagacccuggagauccucgacaucacccccugcagcuucggcgggguguccgugaucacgccgggcaccaacaccagcaaccaggucgccgugcuguaccagggcgugaacugcaccgagguccccguggccauccacgccgaccagcugacgcccaccuggcggguguacuccaccggcagcaacgucuuccagacccgcgccgggugccucaucggcgcggagcacgugaacaacuccuacgagugcgacauccccaucggggccggcaucugcgccagcuaccagacgcagaccaacuccccgcggcgcgcccggagcguggcgucccagagcaucaucgccuacaccaugucccugggcgccgagaacagcgucgccuacuccaacaacagcaucgccauccccaccaacuucacgaucuccgugaccaccgagauccugcccgugagcaugaccaagacgagcgucgacugcaccauguacaucugcggggacuccaccgagugcagcaaccuccugcugcaguacggcuccuucugcacccagcucaaccgcgcgcugacggggaucgccguggagcaggacaagaacacccaggagguguucgcccaggucaagcagaucuacaagacgcccccgaucaaggacuucggcggguucaacuucagccagauccugcccgaccccuccaagcccagcaagcgguccuucaucgaggaccuccuguucaacaaggugacccuggccgacgccggcuucaucaagcaguacggcgacugccucggggacaucgcggcccgcgaccugaucugcgcccagaaguucaacggccugaccgugcucccgccccugcugaccgacgagaugaucgcccaguacaccagcgcccuccuggcggggaccaucacguccggcuggaccuucggggccggcgccgcccugcagauccccuucgcgaugcagauggccuaccgguucaacggcaucggggucacccagaacgugcucuacgagaaccagaagcugaucgccaaccaguucaacagcgccaucggcaagauccaggacucccugagcuccaccgccagcgcgcucgggaagcugcaggacguggucaaccagaacgcccaggcccugaacacgcucgugaagcagcuguccagcaacuucggcgccaucuccagcgugcugaacgacauccucucccgccuggacccgcccgaggccgaggugcagaucgaccggcugaucaccgggcgccuccagagccugcagaccuacgugacccagcagcugauccgggcggccgagauccgcgccagcgccaaccucgccgcgaccaagauguccgagugcguccugggccagagcaagcggguggacuucugcggcaagggguaccaccugauguccuucccccagagcgccccgcacggcguggucuuccuccacgugacguacguccccgcccaggagaagaacuucaccaccgcccccgcgaucugccacgacgggaaggcccacuucccccgcgagggcguguucguguccaacgggacccacugguucgucacgcagcggaacuucuacgagccgcagaucaucaccaccgacaacaccuucgugagcggcaacugcgacguggucaucggcaucgugaacaacacgguguacgacccccugcagcccgagcuggacuccuucaaggaggagcucgacaaguacuucaagaaccacaccagccccgacgucgaccugggggacaucuccggcaucaacgccagcguggugaacauccagaaggagaucgaccgccugaacgaggucgccaagaaccucaacgagucccugaucgaccugcaggagcucgggaaguacgagcaguacaucaaguggccgugguacaucuggcugggcuucaucgccggccugaucgcgaucgugauggugaccaucaugcucugcugcaugaccagcugcugcuccugccugaaggggugcugcagcugcggcuccugcugcaaguucgacgaggacgacagcgagcccguccugaagggggugaagcuccacuacacgugaggacuaguuauaagacugacuagcccgaugggccucccaacgggcccuccuccccuccuugcaccgagauuaauagaucucaaaggcucuuuucagagccaccaaaaaaaaaaaaaaaaaaaaaaaaaaaaaaaaaaaaaaaaaaaaaaaaaaaaaaaaaaaaaaaaaaaaaaaaaaaaaaaaaaaaaaaaaaaaaaaaaaaaa

SEQ ID NO: 24403 - RNA, 4035 nt, Artificial Sequence
  SARS-CoV-2/Wuhan/WIV05/2019__EPI_ISL_402128 spike protein mRNA gc (1-1273)(K986P_V987P_H69del_V70del_D614G)
aggagaaagcuuaccauguucguguuccugguccuccugccccuggugagcucccagugcgugaaccucaccacccgcacgcagcugccgcccgccuacaccaacagcuucacccggggcgucuacuaccccgacaagguguuccgcuccagcgugcugcacuccacccaggaccucuuccugcccuucuucagcaacgucacgugguuccacgccaucuccgggaccaacggcaccaagcgguucgacaacccggugcugcccuucaacgacggggucuacuucgcgagcaccgagaaguccaacaucauccgcggcuggaucuucgggacgacccucgacagcaagacccagucccugcugaucgugaacaacgccaccaacguggucaucaaggugugcgaguuccaguucugcaacgaccccuuccucggcguguacuaccacaagaacaacaagagcuggauggaguccgaguuccgggucuacagcuccgccaacaacugcacguucgaguacgugagccagcccuuccugauggaccuggagggcaagcaggggaacuucaagaaccuccgcgaguucguguucaagaacaucgacggcuacuucaagaucuacuccaagcacaccccgaucaaccugguccgggaccugccccagggguucagcgcccucgagccccugguggaccugcccaucggcaucaacaucacccgcuuccagacccuccuggcccugcaccgguccuaccucacgccgggggacagcagcuccggcuggaccgcgggcgccgccgccuacuacgugggguaccugcagccccgcaccuuccugcucaaguacaacgagaacggcaccaucacggacgcggucgacugcgcccuggacccccugagcgagaccaagugcacccucaaguccuucaccguggagaaggggaucuaccagacgagcaacuuccgggugcagcccaccgaguccaucguccgcuucccgaacaucaccaaccugugccccuucggcgagguguucaacgccacccgguucgccagcgucuacgccuggaaccgcaagcggaucuccaacugcguggcggacuacagcgugcuguacaacuccgccagcuucuccacguucaagugcuacggcgucagccccaccaagcucaacgaccugugcuucaccaacguguacgccgacuccuucgugauccgcggggacgagguccggcagaucgcccccggccagaccgggaagaucgccgacuacaacuacaagcugccggacgacuucacgggcugcgugaucgcguggaacagcaacaaccucgacuccaaggucgggggcaacuacaacuaccuguaccgccuguuccgcaagagcaaccucaagcccuucgagcgggacaucuccaccgagaucuaccaggccggcagcacccccugcaacgggguggagggcuucaacugcuacuucccccugcaguccuacggguuccagccgaccaacggcgugggguaccagcccuaccggguggucgugcugagcuucgagcuccugcacgcccccgccacggugugcggccccaagaaguccaccaaccuggucaagaacaagugcgugaacuucaacuucaacggccucaccgggaccggcgugcugaccgagagcaacaagaaguuccugccguuccagcaguucgggcgcgacaucgccgacacgaccgacgcgguccgcgacccccagacccuggagauccucgacaucacccccugcagcuucggcgggguguccgugaucacgccgggcaccaacaccagcaaccaggucgccgugcuguaccagggcgugaacugcaccgagguccccguggccauccacgccgaccagcugacgcccaccuggcggguguacuccaccggcagcaacgucuuccagacccgcgccgggugccucaucggcgcggagcacgugaacaacuccuacgagugcgacauccccaucggggccggcaucugcgccagcuaccagacgcagaccaacuccccgcggcgcgcccggagcguggcgucccagagcaucaucgccuacaccaugucccugggcgccgagaacagcgucgccuacuccaacaacagcaucgccauccccaccaacuucacgaucuccgugaccaccgagauccugcccgugagcaugaccaagacgagcgucgacugcaccauguacaucugcggggacuccaccgagugcagcaaccuccugcugcaguacggcuccuucugcacccagcucaaccgcgcgcugacggggaucgccguggagcaggacaagaacacccaggagguguucgcccaggucaagcagaucuacaagacgcccccgaucaaggacuucggcggguucaacuucagccagauccugcccgaccccuccaagcccagcaagcgguccuucaucgaggaccuccuguucaacaaggugacccuggccgacgccggcuucaucaagcaguacggcgacugccucggggacaucgcggcccgcgaccugaucugcgcccagaaguucaacggccugaccgugcucccgccccugcugaccgacgagaugaucgcccaguacaccagcgcccuccuggcggggaccaucacguccggcuggaccuucggggccggcgccgcccugcagauccccuucgcgaugcagauggccuaccgguucaacggcaucggggucacccagaacgugcucuacgagaaccagaagcugaucgccaaccaguucaacagcgccaucggcaagauccaggacucccugagcuccaccgccagcgcgcucgggaagcugcaggacguggucaaccagaacgcccaggcccugaacacgcucgugaagcagcuguccagcaacuucggcgccaucuccagcgugcugaacgacauccucucccgccuggacccgcccgaggccgaggugcagaucgaccggcugaucaccgggcgccuccagagccugcagaccuacgugacccagcagcugauccgggcggccgagauccgcgccagcgccaaccucgccgcgaccaagauguccgagugcguccugggccagagcaagcggguggacuucugcggcaagggguaccaccugauguccuucccccagagcgccccgcacggcguggucuuccuccacgugacguacguccccgcccaggagaagaacuucaccaccgcccccgcgaucugccacgacgggaaggcccacuucccccgcgagggcguguucguguccaacgggacccacugguucgucacgcagcggaacuucuacgagccgcagaucaucaccaccgacaacaccuucgugagcggcaacugcgacguggucaucggcaucgugaacaacacgguguacgacccccugcagcccgagcuggacuccuucaaggaggagcucgacaaguacuucaagaaccacaccagccccgacgucgaccugggggacaucuccggcaucaacgccagcguggugaacauccagaaggagaucgaccgccugaacgaggucgccaagaaccucaacgagucccugaucgaccugcaggagcucgggaaguacgagcaguacaucaaguggccgugguacaucuggcugggcuucaucgccggccugaucgcgaucgugauggugaccaucaugcucugcugcaugaccagcugcugcuccugccugaaggggugcugcagcugcggcuccugcugcaaguucgacgaggacgacagcgagcccguccugaagggggugaagcuccacuacacgugaggacuaguuauaagacugacuagcccgaugggccucccaacgggcccuccuccccuccuugcaccgagauuaauagaucucaaaggcucuuuucagagccaccaaaaaaaaaaaaaaaaaaaaaaaaaaaaaaaaaaaaaaaaaaaaaaaaaaaaaaaaaaaaaaaaaaaaaaaaaaaaaaaaaaaaaaaaaaaaaaaaaaaaa

SEQ ID NO: 24404 - RNA, 4041 nt, Artificial Sequence
  SARS-CoV-2/Wuhan/WIV05/2019__EPI_ISL_402128 spike protein mRNA gc (1-1273)(K986P_V987P_Y453F_D614G)
aggagaaagcuuaccauguucguguuccugguccuccugccccuggugagcucccagugcgugaaccucaccacccgcacgcagcugccgcccgccuacaccaacagcuucacccggggcgucuacuaccccgacaagguguuccgcuccagcgugcugcacuccacccaggaccucuuccugcccuucuucagcaacgucacgugguuccacgccauccacguguccgggaccaacggcaccaagcgguucgacaacccggugcugcccuucaacgacggggucuacuucgcgagcaccgagaaguccaacaucauccgcggcuggaucuucgggacgacccucgacagcaagacccagucccugcugaucgugaacaacgccaccaacguggucaucaaggugugcgaguuccaguucugcaacgaccccuuccucggcguguacuaccacaagaacaacaagagcuggauggaguccgaguuccgggucuacagcuccgccaacaacugcacguucgaguacgugagccagcccuuccugauggaccuggagggcaagcaggggaacuucaagaaccuccgcgaguucguguucaagaacaucgacggcuacuucaagaucuacuccaagcacaccccgaucaaccugguccgggaccugccccagggguucagcgcccucgagccccugguggaccugcccaucggcaucaacaucacccgcuuccagacccuccuggcccugcaccgguccuaccucacgccgggggacagcagcuccggcuggaccgcgggcgccgccgccuacuacgugggguaccugcagccccgcaccuuccugcucaaguacaacgagaacggcaccaucacggacgcggucgacugcgcccuggacccccugagcgagaccaagugcacccucaaguccuucaccguggagaaggggaucuaccagacgagcaacuuccgggugcagcccaccgaguccaucguccgcuucccgaacaucaccaaccugugccccuucggcgagguguucaacgccacccgguucgccagcgucuacgccuggaaccgcaagcggaucuccaacugcguggcggacuacagcgugcuguacaacuccgccagcuucuccacguucaagugcuacggcgucagccccaccaagcucaacgaccugugcuucaccaacguguacgccgacuccuucgugauccgcggggacgagguccggcagaucgcccccggccagaccgggaagaucgccgacuacaacuacaagcugccggacgacuucacgggcugcgugaucgcguggaacagcaacaaccucgacuccaaggucgggggcaacuacaacuaccuguuccgccuguuccgcaagagcaaccucaagcccuucgagcgggacaucuccaccgagaucuaccaggccggcagcacccccugcaacgggguggagggcuucaacugcuacuucccccugcaguccuacggguuccagccgaccaacggcgugggguaccagcccuaccggguggucgugcugagcuucgagcuccugcacgcccccgccacggugugcggccccaagaaguccaccaaccuggucaagaacaagugcgugaacuucaacuucaacggccucaccgggaccggcgugcugaccgagagcaacaagaaguuccugccguuccagcaguucgggcgcgacaucgccgacacgaccgacgcgguccgcgacccccagacccuggagauccucgacaucacccccugcagcuucggcgggguguccgugaucacgccgggcaccaacaccagcaaccaggucgccgugcuguaccagggcgugaacugcaccgagguccccguggccauccacgccgaccagcugacgcccaccuggcggguguacuccaccggcagcaacgucuuccagacccgcgccgggugccucaucggcgcggagcacgugaacaacuccuacgagugcgacauccccaucggggccggcaucugcgccagcuaccagacgcagaccaacuccccgcggcgcgcccggagcguggcgucccagagcaucaucgccuacaccaugucccugggcgccgagaacagcgucgccuacuccaacaacagcaucgccauccccaccaacuucacgaucuccgugaccaccgagauccugcccgugagcaugaccaagacgagcgucgacugcaccauguacaucugcggggacuccaccgagugcagcaaccuccugcugcaguacggcuccuucugcacccagcucaaccgcgcgcugacggggaucgccguggagcaggacaagaacacccaggagguguucgcccaggucaagcagaucuacaagacgcccccgaucaaggacuucggcggguucaacuucagccagauccugcccgaccccuccaagcccagcaagcgguccuucaucgaggaccuccuguucaacaaggugacccuggccgacgccggcuucaucaagcaguacggcgacugccucggggacaucgcggcccgcgaccugaucugcgcccagaaguucaacggccugaccgugcucccgccccugcugaccgacgagaugaucgcccaguacaccagcgcccuccuggcggggaccaucacguccggcuggaccuucggggccggcgccgcccugcagauccccuucgcgaugcagauggccuaccgguucaacggcaucggggucacccagaacgugcucuacgagaaccagaagcugaucgccaaccaguucaacagcgccaucggcaagauccaggacucccugagcuccaccgccagcgcgcucgggaagcugcaggacguggucaaccagaacgcccaggcccugaacacgcucgugaagcagcuguccagcaacuucggcgccaucuccagcgugcugaacgacauccucucccgccuggacccgcccgaggccgaggugcagaucgaccggcugaucaccgggcgccuccagagccugcagaccuacgugacccagcagcugauccgggcggccgagauccgcgccagcgccaaccucgccgcgaccaagauguccgagugcguccugggccagagcaagcggguggacuucugcggcaagggguaccaccugauguccuucccccagagcgccccgcacggcguggucuuccuccacgugacguacguccccgcccaggagaagaacuucaccaccgcccccgcgaucugccacgacgggaaggcccacuucccccgcgagggcguguucguguccaacgggacccacugguucgucacgcagcggaacuucuacgagccgcagaucaucaccaccgacaacaccuucgugagcggcaacugcgacguggucaucggcaucgugaacaacacgguguacgacccccugcagcccgagcuggacuccuucaaggaggagcucgacaaguacuucaagaaccacaccagccccgacgucgaccugggggacaucuccggcaucaacgccagcguggugaacauccagaaggagaucgaccgccugaacgaggucgccaagaaccucaacgagucccugaucgaccugcaggagcucgggaaguacgagcaguacaucaaguggccgugguacaucuggcugggcuucaucgccggccugaucgcgaucgugauggugaccaucaugcucugcugcaugaccagcugcugcuccugccugaaggggugcugcagcugcggcuccugcugcaaguucgacgaggacgacagcgagcccguccugaagggggugaagcuccacuacacgugaggacuaguuauaagacugacuagcccgaugggccucccaacgggcccuccuccccuccuugcaccgagauuaauagaucucaaaggcucuuuucagagccaccaaaaaaaaaaaaaaaaaaaaaaaaaaaaaaaaaaaaaaaaaaaaaaaaaaaaaaaaaaaaaaaaaaaaaaaaaaaaaaaaaaaaaaaaaaaaaaaaaaaaa

SEQ ID NO: 24405 - RNA, 4041 nt, Artificial Sequence
  SARS-CoV-2/Wuhan/WIV05/2019__EPI_ISL_402128 spike protein mRNA gc (1-1273)(K986P_V987P_D614G_I692V)
aggagaaagcuuaccauguucguguuccugguccuccugccccuggugagcucccagugcgugaaccucaccacccgcacgcagcugccgcccgccuacaccaacagcuucacccggggcgucuacuaccccgacaagguguuccgcuccagcgugcugcacuccacccaggaccucuuccugcccuucuucagcaacgucacgugguuccacgccauccacguguccgggaccaacggcaccaagcgguucgacaacccggugcugcccuucaacgacggggucuacuucgcgagcaccgagaaguccaacaucauccgcggcuggaucuucgggacgacccucgacagcaagacccagucccugcugaucgugaacaacgccaccaacguggucaucaaggugugcgaguuccaguucugcaacgaccccuuccucggcguguacuaccacaagaacaacaagagcuggauggaguccgaguuccgggucuacagcuccgccaacaacugcacguucgaguacgugagccagcccuuccugauggaccuggagggcaagcaggggaacuucaagaaccuccgcgaguucguguucaagaacaucgacggcuacuucaagaucuacuccaagcacaccccgaucaaccugguccgggaccugccccagggguucagcgcccucgagccccugguggaccugcccaucggcaucaacaucacccgcuuccagacccuccuggcccugcaccgguccuaccucacgccgggggacagcagcuccggcuggaccgcgggcgccgccgccuacuacgugggguaccugcagccccgcaccuuccugcucaaguacaacgagaacggcaccaucacggacgcggucgacugcgcccuggacccccugagcgagaccaagugcacccucaaguccuucaccguggagaaggggaucuaccagacgagcaacuuccgggugcagcccaccgaguccaucguccgcuucccgaacaucaccaaccugugccccuucggcgagguguucaacgccacccgguucgccagcgucuacgccuggaaccgcaagcggaucuccaacugcguggcggacuacagcgugcuguacaacuccgccagcuucuccacguucaagugcuacggcgucagccccaccaagcucaacgaccugugcuucaccaacguguacgccgacuccuucgugauccgcggggacgagguccggcagaucgcccccggccagaccgggaagaucgccgacuacaacuacaagcugccggacgacuucacgggcugcgugaucgcguggaacagcaacaaccucgacuccaaggucgggggcaacuacaacuaccuguaccgccuguuccgcaagagcaaccucaagcccuucgagcgggacaucuccaccgagaucuaccaggccggcagcacccccugcaacgggguggagggcuucaacugcuacuucccccugcaguccuacggguuccagccgaccaacggcgugggguaccagcccuaccggguggucgugcugagcuucgagcuccugcacgcccccgccacggugugcggccccaagaaguccaccaaccuggucaagaacaagugcgugaacuucaacuucaacggccucaccgggaccggcgugcugaccgagagcaacaagaaguuccugccguuccagcaguucgggcgcgacaucgccgacacgaccgacgcgguccgcgacccccagacccuggagauccucgacaucacccccugcagcuucggcgggguguccgugaucacgccgggcaccaacaccagcaaccaggucgccgugcuguaccagggcgugaacugcaccgagguccccguggccauccacgccgaccagcugacgcccaccuggcggguguacuccaccggcagcaacgucuuccagacccgcgccgggugccucaucggcgcggagcacgugaacaacuccuacgagugcgacauccccaucggggccggcaucugcgccagcuaccagacgcagaccaacuccccgcggcgcgcccggagcguggcgucccagagcgucaucgccuacaccaugucccugggcgccgagaacagcgucgccuacuccaacaacagcaucgccauccccaccaacuucacgaucuccgugaccaccgagauccugcccgugagcaugaccaagacgagcgucgacugcaccauguacaucugcggggacuccaccgagugcagcaaccuccugcugcaguacggcuccuucugcacccagcucaaccgcgcgcugacggggaucgccguggagcaggacaagaacacccaggagguguucgcccaggucaagcagaucuacaagacgcccccgaucaaggacuucggcggguucaacuucagccagauccugcccgaccccuccaagcccagcaagcgguccuucaucgaggaccuccuguucaacaaggugacccuggccgacgccggcuucaucaagcaguacggcgacugccucggggacaucgcggcccgcgaccugaucugcgcccagaaguucaacggccugaccgugcucccgccccugcugaccgacgagaugaucgcccaguacaccagcgcccuccuggcggggaccaucacguccggcuggaccuucggggccggcgccgcccugcagauccccuucgcgaugcagauggccuaccgguucaacggcaucggggucacccagaacgugcucuacgagaaccagaagcugaucgccaaccaguucaacagcgccaucggcaagauccaggacucccugagcuccaccgccagcgcgcucgggaagcugcaggacguggucaaccagaacgcccaggcccugaacacgcucgugaagcagcuguccagcaacuucggcgccaucuccagcgugcugaacgacauccucucccgccuggacccgcccgaggccgaggugcagaucgaccggcugaucaccgggcgccuccagagccugcagaccuacgugacccagcagcugauccgggcggccgagauccgcgccagcgccaaccucgccgcgaccaagauguccgagugcguccugggccagagcaagcggguggacuucugcggcaagggguaccaccugauguccuucccccagagcgccccgcacggcguggucuuccuccacgugacguacguccccgcccaggagaagaacuucaccaccgcccccgcgaucugccacgacgggaaggcccacuucccccgcgagggcguguucguguccaacgggacccacugguucgucacgcagcggaacuucuacgagccgcagaucaucaccaccgacaacaccuucgugagcggcaacugcgacguggucaucggcaucgugaacaacacgguguacgacccccugcagcccgagcuggacuccuucaaggaggagcucgacaaguacuucaagaaccacaccagccccgacgucgaccugggggacaucuccggcaucaacgccagcguggugaacauccagaaggagaucgaccgccugaacgaggucgccaagaaccucaacgagucccugaucgaccugcaggagcucgggaaguacgagcaguacaucaaguggccgugguacaucuggcugggcuucaucgccggccugaucgcgaucgugauggugaccaucaugcucugcugcaugaccagcugcugcuccugccugaaggggugcugcagcugcggcuccugcugcaaguucgacgaggacgacagcgagcccguccugaagggggugaagcuccacuacacgugaggacuaguuauaagacugacuagcccgaugggccucccaacgggcccuccuccccuccuugcaccgagauuaauagaucucaaaggcucuuuucagagccaccaaaaaaaaaaaaaaaaaaaaaaaaaaaaaaaaaaaaaaaaaaaaaaaaaaaaaaaaaaaaaaaaaaaaaaaaaaaaaaaaaaaaaaaaaaaaaaaaaaaaa

SEQ ID NO: 24406 - RNA, 4041 nt, Artificial Sequence
  SARS-CoV-2/Wuhan/WIV05/2019__EPI_ISL_402128 spike protein mRNA gc (1-1273)(K986P_V987P_D614G_M1229I)
aggagaaagcuuaccauguucguguuccugguccuccugccccuggugagcucccagugcgugaaccucaccacccgcacgcagcugccgcccgccuacaccaacagcuucacccggggcgucuacuaccccgacaagguguuccgcuccagcgugcugcacuccacccaggaccucuuccugcccuucuucagcaacgucacgugguuccacgccauccacguguccgggaccaacggcaccaagcgguucgacaacccggugcugcccuucaacgacggggucuacuucgcgagcaccgagaaguccaacaucauccgcggcuggaucuucgggacgacccucgacagcaagacccagucccugcugaucgugaacaacgccaccaacguggucaucaaggugugcgaguuccaguucugcaacgaccccuuccucggcguguacuaccacaagaacaacaagagcuggauggaguccgaguuccgggucuacagcuccgccaacaacugcacguucgaguacgugagccagcccuuccugauggaccuggagggcaagcaggggaacuucaagaaccuccgcgaguucguguucaagaacaucgacggcuacuucaagaucuacuccaagcacaccccgaucaaccugguccgggaccugccccagggguucagcgcccucgagccccugguggaccugcccaucggcaucaacaucacccgcuuccagacccuccuggcccugcaccgguccuaccucacgccgggggacagcagcuccggcuggaccgcgggcgccgccgccuacuacgugggguaccugcagccccgcaccuuccugcucaaguacaacgagaacggcaccaucacggacgcggucgacugcgcccuggacccccugagcgagaccaagugcacccucaaguccuucaccguggagaaggggaucuaccagacgagcaacuuccgggugcagcccaccgaguccaucguccgcuucccgaacaucaccaaccugugccccuucggcgagguguucaacgccacccgguucgccagcgucuacgccuggaaccgcaagcggaucuccaacugcguggcggacuacagcgugcuguacaacuccgccagcuucuccacguucaagugcuacggcgucagccccaccaagcucaacgaccugugcuucaccaacguguacgccgacuccuucgugauccgcggggacgagguccggcagaucgcccccggccagaccgggaagaucgccgacuacaacuacaagcugccggacgacuucacgggcugcgugaucgcguggaacagcaacaaccucgacuccaaggucgggggcaacuacaacuaccuguaccgccuguuccgcaagagcaaccucaagcccuucgagcgggacaucuccaccgagaucuaccaggccggcagcacccccugcaacgggguggagggcuucaacugcuacuucccccugcaguccuacggguuccagccgaccaacggcgugggguaccagcccuaccggguggucgugcugagcuucgagcuccugcacgcccccgccacggugugcggccccaagaaguccaccaaccuggucaagaacaagugcgugaacuucaacuucaacggccucaccgggaccggcgugcugaccgagagcaacaagaaguuccugccguuccagcaguucgggcgcgacaucgccgacacgaccgacgcgguccgcgacccccagacccuggagauccucgacaucacccccugcagcuucggcgggguguccgugaucacgccgggcaccaacaccagcaaccaggucgccgugcuguaccagggcgugaacugcaccgagguccccguggccauccacgccgaccagcugacgcccaccuggcggguguacuccaccggcagcaacgucuuccagacccgcgccgggugccucaucggcgcggagcacgugaacaacuccuacgagugcgacauccccaucggggccggcaucugcgccagcuaccagacgcagaccaacuccccgcggcgcgcccggagcguggcgucccagagcaucaucgccuacaccaugucccugggcgccgagaacagcgucgccuacuccaacaacagcaucgccauccccaccaacuucacgaucuccgugaccaccgagauccugcccgugagcaugaccaagacgagcgucgacugcaccauguacaucugcggggacuccaccgagugcagcaaccuccugcugcaguacggcuccuucugcacccagcucaaccgcgcgcugacggggaucgccguggagcaggacaagaacacccaggagguguucgcccaggucaagcagaucuacaagacgcccccgaucaaggacuucggcggguucaacuucagccagauccugcccgaccccuccaagcccagcaagcgguccuucaucgaggaccuccuguucaacaaggugacccuggccgacgccggcuucaucaagcaguacggcgacugccucggggacaucgcggcccgcgaccugaucugcgcccagaaguucaacggccugaccgugcucccgccccugcugaccgacgagaugaucgcccaguacaccagcgcccuccuggcggggaccaucacguccggcuggaccuucggggccggcgccgcccugcagauccccuucgcgaugcagauggccuaccgguucaacggcaucggggucacccagaacgugcucuacgagaaccagaagcugaucgccaaccaguucaacagcgccaucggcaagauccaggacucccugagcuccaccgccagcgcgcucgggaagcugcaggacguggucaaccagaacgcccaggcccugaacacgcucgugaagcagcuguccagcaacuucggcgccaucuccagcgugcugaacgacauccucucccgccuggacccgcccgaggccgaggugcagaucgaccggcugaucaccgggcgccuccagagccugcagaccuacgugacccagcagcugauccgggcggccgagauccgcgccagcgccaaccucgccgcgaccaagauguccgagugcguccugggccagagcaagcggguggacuucugcggcaagggguaccaccugauguccuucccccagagcgccccgcacggcguggucuuccuccacgugacguacguccccgcccaggagaagaacuucaccaccgcccccgcgaucugccacgacgggaaggcccacuucccccgcgagggcguguucguguccaacgggacccacugguucgucacgcagcggaacuucuacgagccgcagaucaucaccaccgacaacaccuucgugagcggcaacugcgacguggucaucggcaucgugaacaacacgguguacgacccccugcagcccgagcuggacuccuucaaggaggagcucgacaaguacuucaagaaccacaccagccccgacgucgaccugggggacaucuccggcaucaacgccagcguggugaacauccagaaggagaucgaccgccugaacgaggucgccaagaaccucaacgagucccugaucgaccugcaggagcucgggaaguacgagcaguacaucaaguggccgugguacaucuggcugggcuucaucgccggccugaucgcgaucgugaucgugaccaucaugcucugcugcaugaccagcugcugcuccugccugaaggggugcugcagcugcggcuccugcugcaaguucgacgaggacgacagcgagcccguccugaagggggugaagcuccacuacacgugaggacuaguuauaagacugacuagcccgaugggccucccaacgggcccuccuccccuccuugcaccgagauuaauagaucucaaaggcucuuuucagagccaccaaaaaaaaaaaaaaaaaaaaaaaaaaaaaaaaaaaaaaaaaaaaaaaaaaaaaaaaaaaaaaaaaaaaaaaaaaaaaaaaaaaaaaaaaaaaaaaaaaaaa

SEQ ID NO: 24407 - RNA, 4035 nt, Artificial Sequence
  SARS-CoV-2/Wuhan/WIV05/2019__EPI_ISL_402128 spike protein mRNA gc (1-1273)(K986P_V987P_H69del_V70del_A222V_Y453F_S477N_D614G_I692V)
aggagaaagcuuaccauguucguguuccugguccuccugccccuggugagcucccagugcgugaaccucaccacccgcacgcagcugccgcccgccuacaccaacagcuucacccggggcgucuacuaccccgacaagguguuccgcuccagcgugcugcacuccacccaggaccucuuccugcccuucuucagcaacgucacgugguuccacgccaucuccgggaccaacggcaccaagcgguucgacaacccggugcugcccuucaacgacggggucuacuucgcgagcaccgagaaguccaacaucauccgcggcuggaucuucgggacgacccucgacagcaagacccagucccugcugaucgugaacaacgccaccaacguggucaucaaggugugcgaguuccaguucugcaacgaccccuuccucggcguguacuaccacaagaacaacaagagcuggauggaguccgaguuccgggucuacagcuccgccaacaacugcacguucgaguacgugagccagcccuuccugauggaccuggagggcaagcaggggaacuucaagaaccuccgcgaguucguguucaagaacaucgacggcuacuucaagaucuacuccaagcacaccccgaucaaccugguccgggaccugccccagggguucagcguccucgagccccugguggaccugcccaucggcaucaacaucacccgcuuccagacccuccuggcccugcaccgguccuaccucacgccgggggacagcagcuccggcuggaccgcgggcgccgccgccuacuacgugggguaccugcagccccgcaccuuccugcucaaguacaacgagaacggcaccaucacggacgcggucgacugcgcccuggacccccugagcgagaccaagugcacccucaaguccuucaccguggagaaggggaucuaccagacgagcaacuuccgggugcagcccaccgaguccaucguccgcuucccgaacaucaccaaccugugccccuucggcgagguguucaacgccacccgguucgccagcgucuacgccuggaaccgcaagcggaucuccaacugcguggcggacuacagcgugcuguacaacuccgccagcuucuccacguucaagugcuacggcgucagccccaccaagcucaacgaccugugcuucaccaacguguacgccgacuccuucgugauccgcggggacgagguccggcagaucgcccccggccagaccgggaagaucgccgacuacaacuacaagcugccggacgacuucacgggcugcgugaucgcguggaacagcaacaaccucgacuccaaggucgggggcaacuacaacuaccuguuccgccuguuccgcaagagcaaccucaagcccuucgagcgggacaucuccaccgagaucuaccaggccggcaacacccccugcaacgggguggagggcuucaacugcuacuucccccugcaguccuacggguuccagccgaccaacggcgugggguaccagcccuaccggguggucgugcugagcuucgagcuccugcacgcccccgccacggugugcggccccaagaaguccaccaaccuggucaagaacaagugcgugaacuucaacuucaacggccucaccgggaccggcgugcugaccgagagcaacaagaaguuccugccguuccagcaguucgggcgcgacaucgccgacacgaccgacgcgguccgcgacccccagacccuggagauccucgacaucacccccugcagcuucggcgggguguccgugaucacgccgggcaccaacaccagcaaccaggucgccgugcuguaccagggcgugaacugcaccgagguccccguggccauccacgccgaccagcugacgcccaccuggcggguguacuccaccggcagcaacgucuuccagacccgcgccgggugccucaucggcgcggagcacgugaacaacuccuacgagugcgacauccccaucggggccggcaucugcgccagcuaccagacgcagaccaacuccccgcggcgcgcccggagcguggcgucccagagcgucaucgccuacaccaugucccugggcgccgagaacagcgucgccuacuccaacaacagcaucgccauccccaccaacuucacgaucuccgugaccaccgagauccugcccgugagcaugaccaagacgagcgucgacugcaccauguacaucugcggggacuccaccgagugcagcaaccuccugcugcaguacggcuccuucugcacccagcucaaccgcgcgcugacggggaucgccguggagcaggacaagaacacccaggagguguucgcccaggucaagcagaucuacaagacgcccccgaucaaggacuucggcggguucaacuucagccagauccugcccgaccccuccaagcccagcaagcgguccuucaucgaggaccuccuguucaacaaggugacccuggccgacgccggcuucaucaagcaguacggcgacugccucggggacaucgcggcccgcgaccugaucugcgcccagaaguucaacggccugaccgugcucccgccccugcugaccgacgagaugaucgcccaguacaccagcgcccuccuggcggggaccaucacguccggcuggaccuucggggccggcgccgcccugcagauccccuucgcgaugcagauggccuaccgguucaacggcaucggggucacccagaacgugcucuacgagaaccagaagcugaucgccaaccaguucaacagcgccaucggcaagauccaggacucccugagcuccaccgccagcgcgcucgggaagcugcaggacguggucaaccagaacgcccaggcccugaacacgcucgugaagcagcuguccagcaacuucggcgccaucuccagcgugcugaacgacauccucucccgccuggacccgcccgaggccgaggugcagaucgaccggcugaucaccgggcgccuccagagccugcagaccuacgugacccagcagcugauccgggcggccgagauccgcgccagcgccaaccucgccgcgaccaagauguccgagugcguccugggccagagcaagcggguggacuucugcggcaagggguaccaccugauguccuucccccagagcgccccgcacggcguggucuuccuccacgugacguacguccccgcccaggagaagaacuucaccaccgcccccgcgaucugccacgacgggaaggcccacuucccccgcgagggcguguucguguccaacgggacccacugguucgucacgcagcggaacuucuacgagccgcagaucaucaccaccgacaacaccuucgugagcggcaacugcgacguggucaucggcaucgugaacaacacgguguacgacccccugcagcccgagcuggacuccuucaaggaggagcucgacaaguacuucaagaaccacaccagccccgacgucgaccugggggacaucuccggcaucaacgccagcguggugaacauccagaaggagaucgaccgccugaacgaggucgccaagaaccucaacgagucccugaucgaccugcaggagcucgggaaguacgagcaguacaucaaguggccgugguacaucuggcugggcuucaucgccggccugaucgcgaucgugauggugaccaucaugcucugcugcaugaccagcugcugcuccugccugaaggggugcugcagcugcggcuccugcugcaaguucgacgaggacgacagcgagcccguccugaagggggugaagcuccacuacacgugaggacuaguuauaagacugacuagcccgaugggccucccaacgggcccuccuccccuccuugcaccgagauuaauagaucucaaaggcucuuuucagagccaccaaaaaaaaaaaaaaaaaaaaaaaaaaaaaaaaaaaaaaaaaaaaaaaaaaaaaaaaaaaaaaaaaaaaaaaaaaaaaaaaaaaaaaaaaaaaaaaaaaaaa

SEQ ID NO: 24408 - RNA, 4035 nt, Artificial Sequence
  SARS-CoV-2/Wuhan/WIV05/2019__EPI_ISL_402128 spike protein mRNA gc (1-1273)(K986P_V987P_H69del_V70del_Y453F_D614G_I692V_M1229I)
aggagaaagcuuaccauguucguguuccugguccuccugccccuggugagcucccagugcgugaaccucaccacccgcacgcagcugccgcccgccuacaccaacagcuucacccggggcgucuacuaccccgacaagguguuccgcuccagcgugcugcacuccacccaggaccucuuccugcccuucuucagcaacgucacgugguuccacgccaucuccgggaccaacggcaccaagcgguucgacaacccggugcugcccuucaacgacggggucuacuucgcgagcaccgagaaguccaacaucauccgcggcuggaucuucgggacgacccucgacagcaagacccagucccugcugaucgugaacaacgccaccaacguggucaucaaggugugcgaguuccaguucugcaacgaccccuuccucggcguguacuaccacaagaacaacaagagcuggauggaguccgaguuccgggucuacagcuccgccaacaacugcacguucgaguacgugagccagcccuuccugauggaccuggagggcaagcaggggaacuucaagaaccuccgcgaguucguguucaagaacaucgacggcuacuucaagaucuacuccaagcacaccccgaucaaccugguccgggaccugccccagggguucagcgcccucgagccccugguggaccugcccaucggcaucaacaucacccgcuuccagacccuccuggcccugcaccgguccuaccucacgccgggggacagcagcuccggcuggaccgcgggcgccgccgccuacuacgugggguaccugcagccccgcaccuuccugcucaaguacaacgagaacggcaccaucacggacgcggucgacugcgcccuggacccccugagcgagaccaagugcacccucaaguccuucaccguggagaaggggaucuaccagacgagcaacuuccgggugcagcccaccgaguccaucguccgcuucccgaacaucaccaaccugugccccuucggcgagguguucaacgccacccgguucgccagcgucuacgccuggaaccgcaagcggaucuccaacugcguggcggacuacagcgugcuguacaacuccgccagcuucuccacguucaagugcuacggcgucagccccaccaagcucaacgaccugugcuucaccaacguguacgccgacuccuucgugauccgcggggacgagguccggcagaucgcccccggccagaccgggaagaucgccgacuacaacuacaagcugccggacgacuucacgggcugcgugaucgcguggaacagcaacaaccucgacuccaaggucgggggcaacuacaacuaccuguuccgccuguuccgcaagagcaaccucaagcccuucgagcgggacaucuccaccgagaucuaccaggccggcagcacccccugcaacgggguggagggcuucaacugcuacuucccccugcaguccuacggguuccagccgaccaacggcgugggguaccagcccuaccggguggucgugcugagcuucgagcuccugcacgcccccgccacggugugcggccccaagaaguccaccaaccuggucaagaacaagugcgugaacuucaacuucaacggccucaccgggaccggcgugcugaccgagagcaacaagaaguuccugccguuccagcaguucgggcgcgacaucgccgacacgaccgacgcgguccgcgacccccagacccuggagauccucgacaucacccccugcagcuucggcgggguguccgugaucacgccgggcaccaacaccagcaaccaggucgccgugcuguaccagggcgugaacugcaccgagguccccguggccauccacgccgaccagcugacgcccaccuggcggguguacuccaccggcagcaacgucuuccagacccgcgccgggugccucaucggcgcggagcacgugaacaacuccuacgagugcgacauccccaucggggccggcaucugcgccagcuaccagacgcagaccaacuccccgcggcgcgcccggagcguggcgucccagagcgugaucgccuacaccaugucccugggcgccgagaacagcgucgccuacuccaacaacagcaucgccauccccaccaacuucacgaucuccgugaccaccgagauccugcccgugagcaugaccaagacgagcgucgacugcaccauguacaucugcggggacuccaccgagugcagcaaccuccugcugcaguacggcuccuucugcacccagcucaaccgcgcgcugacggggaucgccguggagcaggacaagaacacccaggagguguucgcccaggucaagcagaucuacaagacgcccccgaucaaggacuucggcggguucaacuucagccagauccugcccgaccccuccaagcccagcaagcgguccuucaucgaggaccuccuguucaacaaggugacccuggccgacgccggcuucaucaagcaguacggcgacugccucggggacaucgcggcccgcgaccugaucugcgcccagaaguucaacggccugaccgugcucccgccccugcugaccgacgagaugaucgcccaguacaccagcgcccuccuggcggggaccaucacguccggcuggaccuucggggccggcgccgcccugcagauccccuucgcgaugcagauggccuaccgguucaacggcaucggggucacccagaacgugcucuacgagaaccagaagcugaucgccaaccaguucaacagcgccaucggcaagauccaggacucccugagcuccaccgccagcgcgcucgggaagcugcaggacguggucaaccagaacgcccaggcccugaacacgcucgugaagcagcuguccagcaacuucggcgccaucuccagcgugcugaacgacauccucucccgccuggacccgcccgaggccgaggugcagaucgaccggcugaucaccgggcgccuccagagccugcagaccuacgugacccagcagcugauccgggcggccgagauccgcgccagcgccaaccucgccgcgaccaagauguccgagugcguccugggccagagcaagcggguggacuucugcggcaagggguaccaccugauguccuucccccagagcgccccgcacggcguggucuuccuccacgugacguacguccccgcccaggagaagaacuucaccaccgcccccgcgaucugccacgacgggaaggcccacuucccccgcgagggcguguucguguccaacgggacccacugguucgucacgcagcggaacuucuacgagccgcagaucaucaccaccgacaacaccuucgugagcggcaacugcgacguggucaucggcaucgugaacaacacgguguacgacccccugcagcccgagcuggacuccuucaaggaggagcucgacaaguacuucaagaaccacaccagccccgacgucgaccugggggacaucuccggcaucaacgccagcguggugaacauccagaaggagaucgaccgccugaacgaggucgccaagaaccucaacgagucccugaucgaccugcaggagcucgggaaguacgagcaguacaucaaguggccgugguacaucuggcugggcuucaucgccggccugaucgcgaucgugaucgugaccaucaugcucugcugcaugaccagcugcugcuccugccugaaggggugcugcagcugcggcuccugcugcaaguucgacgaggacgacagcgagcccguccugaagggggugaagcuccacuacacgugaggacuaguuauaagacugacuagcccgaugggccucccaacgggcccuccuccccuccuugcaccgagauuaauagaucucaaaggcucuuuucagagccaccaaaaaaaaaaaaaaaaaaaaaaaaaaaaaaaaaaaaaaaaaaaaaaaaaaaaaaaaaaaaaaaaaaaaaaaaaaaaaaaaaaaaaaaaaaaaaaaaaaaaa

SEQ ID NO: 24409 - RNA, 4032 nt, Artificial Sequence
  SARS-CoV-2/Wuhan/WIV05/2019__EPI_ISL_402128 spike protein mRNA gc (1-1273)(K986P_V987P_K986P_V987P_H69del_V70del_Y144del_N501Y_A570 D_D614G_P681H_T716I_S982A_D1118H)
aggagaaagcuuaccauguucguguuccugguccuccugccccuggugagcucccagugcgugaaccucaccacccgcacgcagcugccgcccgccuacaccaacagcuucacccggggcgucuacuaccccgacaagguguuccgcuccagcgugcugcacuccacccaggaccucuuccugcccuucuucagcaacgucacgugguuccacgccaucuccgggaccaacggcaccaagcgguucgacaacccggugcugcccuucaacgacggggucuacuucgcgagcaccgagaaguccaacaucauccgcggcuggaucuucgggacgacccucgacagcaagacccagucccugcugaucgugaacaacgccaccaacguggucaucaaggugugcgaguuccaguucugcaacgaccccuuccucggcguguaccacaagaacaacaagagcuggauggaguccgaguuccgggucuacagcuccgccaacaacugcacguucgaguacgugagccagcccuuccugauggaccuggagggcaagcaggggaacuucaagaaccuccgcgaguucguguucaagaacaucgacggcuacuucaagaucuacuccaagcacaccccgaucaaccugguccgggaccugccccagggguucagcgcccucgagccccugguggaccugcccaucggcaucaacaucacccgcuuccagacccuccuggcccugcaccgguccuaccucacgccgggggacagcagcuccggcuggaccgcgggcgccgccgccuacuacgugggguaccugcagccccgcaccuuccugcucaaguacaacgagaacggcaccaucacggacgcggucgacugcgcccuggacccccugagcgagaccaagugcacccucaaguccuucaccguggagaaggggaucuaccagacgagcaacuuccgggugcagcccaccgaguccaucguccgcuucccgaacaucaccaaccugugccccuucggcgagguguucaacgccacccgguucgccagcgucuacgccuggaaccgcaagcggaucuccaacugcguggcggacuacagcgugcuguacaacuccgccagcuucuccacguucaagugcuacggcgucagccccaccaagcucaacgaccugugcuucaccaacguguacgccgacuccuucgugauccgcggggacgagguccggcagaucgcccccggccagaccgggaagaucgccgacuacaacuacaagcugccggacgacuucacgggcugcgugaucgcguggaacagcaacaaccucgacuccaaggucgggggcaacuacaacuaccuguaccgccuguuccgcaagagcaaccucaagcccuucgagcgggacaucuccaccgagaucuaccaggccggcagcacccccugcaacgggguggagggcuucaacugcuacuucccccugcaguccuacggguuccagccgaccuacggcgugggguaccagcccuaccggguggucgugcugagcuucgagcuccugcacgcccccgccacggugugcggccccaagaaguccaccaaccuggucaagaacaagugcgugaacuucaacuucaacggccucaccgggaccggcgugcugaccgagagcaacaagaaguuccugccguuccagcaguucgggcgcgacaucgacgacacgaccgacgcgguccgcgacccccagacccuggagauccucgacaucacccccugcagcuucggcgggguguccgugaucacgccgggcaccaacaccagcaaccaggucgccgugcuguaccagggcgugaacugcaccgagguccccguggccauccacgccgaccagcugacgcccaccuggcggguguacuccaccggcagcaacgucuuccagacccgcgccgggugccucaucggcgcggagcacgugaacaacuccuacgagugcgacauccccaucggggccggcaucugcgccagcuaccagacgcagaccaacucccaccggcgcgcccggagcguggcgucccagagcaucaucgccuacaccaugucccugggcgccgagaacagcgucgccuacuccaacaacagcaucgccauccccaucaacuucacgaucuccgugaccaccgagauccugcccgugagcaugaccaagacgagcgucgacugcaccauguacaucugcggggacuccaccgagugcagcaaccuccugcugcaguacggcuccuucugcacccagcucaaccgcgcgcugacggggaucgccguggagcaggacaagaacacccaggagguguucgcccaggucaagcagaucuacaagacgcccccgaucaaggacuucggcggguucaacuucagccagauccugcccgaccccuccaagcccagcaagcgguccuucaucgaggaccuccuguucaacaaggugacccuggccgacgccggcuucaucaagcaguacggcgacugccucggggacaucgcggcccgcgaccugaucugcgcccagaaguucaacggccugaccgugcucccgccccugcugaccgacgagaugaucgcccaguacaccagcgcccuccuggcggggaccaucacguccggcuggaccuucggggccggcgccgcccugcagauccccuucgcgaugcagauggccuaccgguucaacggcaucggggucacccagaacgugcucuacgagaaccagaagcugaucgccaaccaguucaacagcgccaucggcaagauccaggacucccugagcuccaccgccagcgcgcucgggaagcugcaggacguggucaaccagaacgcccaggcccugaacacgcucgugaagcagcuguccagcaacuucggcgccaucuccagcgugcugaacgacauccucgcccgccuggacccgcccgaggccgaggugcagaucgaccggcugaucaccgggcgccuccagagccugcagaccuacgugacccagcagcugauccgggcggccgagauccgcgccagcgccaaccucgccgcgaccaagauguccgagugcguccugggccagagcaagcggguggacuucugcggcaagggguaccaccugauguccuucccccagagcgccccgcacggcguggucuuccuccacgugacguacguccccgcccaggagaagaacuucaccaccgcccccgcgaucugccacgacgggaaggcccacuucccccgcgagggcguguucguguccaacgggacccacugguucgucacgcagcggaacuucuacgagccgcagaucaucaccacccacaacaccuucgugagcggcaacugcgacguggucaucggcaucgugaacaacacgguguacgacccccugcagcccgagcuggacuccuucaaggaggagcucgacaaguacuucaagaaccacaccagccccgacgucgaccugggggacaucuccggcaucaacgccagcguggugaacauccagaaggagaucgaccgccugaacgaggucgccaagaaccucaacgagucccugaucgaccugcaggagcucgggaaguacgagcaguacaucaaguggccgugguacaucuggcugggcuucaucgccggccugaucgcgaucgugauggugaccaucaugcucugcugcaugaccagcugcugcuccugccugaaggggugcugcagcugcggcuccugcugcaaguucgacgaggacgacagcgagcccguccugaagggggugaagcuccacuacacgugaggacuaguuauaagacugacuagcccgaugggccucccaacgggcccuccuccccuccuugcaccgagauuaauagaucucaaaggcucuuuucagagccaccaaaaaaaaaaaaaaaaaaaaaaaaaaaaaaaaaaaaaaaaaaaaaaaaaaaaaaaaaaaaaaaaaaaaaaaaaaaaaaaaaaaaaaaaaaaaaaaaaaaaa

SEQ ID NO: 24410 - RNA, 4041 nt, Artificial Sequence
  SARS-CoV-2/Wuhan/WIV05/2019__EPI_ISL_402128 spike protein mRNA gc (1-1273)(K986P_V987P_K986P_V987P_K417N_E484K_N501Y_D614G)
aggagaaagcuuaccauguucguguuccugguccuccugccccuggugagcucccagugcgugaaccucaccacccgcacgcagcugccgcccgccuacaccaacagcuucacccggggcgucuacuaccccgacaagguguuccgcuccagcgugcugcacuccacccaggaccucuuccugcccuucuucagcaacgucacgugguuccacgccauccacguguccgggaccaacggcaccaagcgguucgacaacccggugcugcccuucaacgacggggucuacuucgcgagcaccgagaaguccaacaucauccgcggcuggaucuucgggacgacccucgacagcaagacccagucccugcugaucgugaacaacgccaccaacguggucaucaaggugugcgaguuccaguucugcaacgaccccuuccucggcguguacuaccacaagaacaacaagagcuggauggaguccgaguuccgggucuacagcuccgccaacaacugcacguucgaguacgugagccagcccuuccugauggaccuggagggcaagcaggggaacuucaagaaccuccgcgaguucguguucaagaacaucgacggcuacuucaagaucuacuccaagcacaccccgaucaaccugguccgggaccugccccagggguucagcgcccucgagccccugguggaccugcccaucggcaucaacaucacccgcuuccagacccuccuggcccugcaccgguccuaccucacgccgggggacagcagcuccggcuggaccgcgggcgccgccgccuacuacgugggguaccugcagccccgcaccuuccugcucaaguacaacgagaacggcaccaucacggacgcggucgacugcgcccuggacccccugagcgagaccaagugcacccucaaguccuucaccguggagaaggggaucuaccagacgagcaacuuccgggugcagcccaccgaguccaucguccgcuucccgaacaucaccaaccugugccccuucggcgagguguucaacgccacccgguucgccagcgucuacgccuggaaccgcaagcggaucuccaacugcguggcggacuacagcgugcuguacaacuccgccagcuucuccacguucaagugcuacggcgucagccccaccaagcucaacgaccugugcuucaccaacguguacgccgacuccuucgugauccgcggggacgagguccggcagaucgcccccggccagaccgggaacaucgccgacuacaacuacaagcugccggacgacuucacgggcugcgugaucgcguggaacagcaacaaccucgacuccaaggucgggggcaacuacaacuaccuguaccgccuguuccgcaagagcaaccucaagcccuucgagcgggacaucuccaccgagaucuaccaggccggcagcacccccugcaacggggugaagggcuucaacugcuacuucccccugcaguccuacggguuccagccgaccuacggcgugggguaccagcccuaccggguggucgugcugagcuucgagcuccugcacgcccccgccacggugugcggccccaagaaguccaccaaccuggucaagaacaagugcgugaacuucaacuucaacggccucaccgggaccggcgugcugaccgagagcaacaagaaguuccugccguuccagcaguucgggcgcgacaucgccgacacgaccgacgcgguccgcgacccccagacccuggagauccucgacaucacccccugcagcuucggcgggguguccgugaucacgccgggcaccaacaccagcaaccaggucgccgugcuguaccagggcgugaacugcaccgagguccccguggccauccacgccgaccagcugacgcccaccuggcggguguacuccaccggcagcaacgucuuccagacccgcgccgggugccucaucggcgcggagcacgugaacaacuccuacgagugcgacauccccaucggggccggcaucugcgccagcuaccagacgcagaccaacuccccgcggcgcgcccggagcguggcgucccagagcaucaucgccuacaccaugucccugggcgccgagaacagcgucgccuacuccaacaacagcaucgccauccccaccaacuucacgaucuccgugaccaccgagauccugcccgugagcaugaccaagacgagcgucgacugcaccauguacaucugcggggacuccaccgagugcagcaaccuccugcugcaguacggcuccuucugcacccagcucaaccgcgcgcugacggggaucgccguggagcaggacaagaacacccaggagguguucgcccaggucaagcagaucuacaagacgcccccgaucaaggacuucggcggguucaacuucagccagauccugcccgaccccuccaagcccagcaagcgguccuucaucgaggaccuccuguucaacaaggugacccuggccgacgccggcuucaucaagcaguacggcgacugccucggggacaucgcggcccgcgaccugaucugcgcccagaaguucaacggccugaccgugcucccgccccugcugaccgacgagaugaucgcccaguacaccagcgcccuccuggcggggaccaucacguccggcuggaccuucggggccggcgccgcccugcagauccccuucgcgaugcagauggccuaccgguucaacggcaucggggucacccagaacgugcucuacgagaaccagaagcugaucgccaaccaguucaacagcgccaucggcaagauccaggacucccugagcuccaccgccagcgcgcucgggaagcugcaggacguggucaaccagaacgcccaggcccugaacacgcucgugaagcagcuguccagcaacuucggcgccaucuccagcgugcugaacgacauccucucccgccuggacccgcccgaggccgaggugcagaucgaccggcugaucaccgggcgccuccagagccugcagaccuacgugacccagcagcugauccgggcggccgagauccgcgccagcgccaaccucgccgcgaccaagauguccgagugcguccugggccagagcaagcggguggacuucugcggcaagggguaccaccugauguccuucccccagagcgccccgcacggcguggucuuccuccacgugacguacguccccgcccaggagaagaacuucaccaccgcccccgcgaucugccacgacgggaaggcccacuucccccgcgagggcguguucguguccaacgggacccacugguucgucacgcagcggaacuucuacgagccgcagaucaucaccaccgacaacaccuucgugagcggcaacugcgacguggucaucggcaucgugaacaacacgguguacgacccccugcagcccgagcuggacuccuucaaggaggagcucgacaaguacuucaagaaccacaccagccccgacgucgaccugggggacaucuccggcaucaacgccagcguggugaacauccagaaggagaucgaccgccugaacgaggucgccaagaaccucaacgagucccugaucgaccugcaggagcucgggaaguacgagcaguacaucaaguggccgugguacaucuggcugggcuucaucgccggccugaucgcgaucgugauggugaccaucaugcucugcugcaugaccagcugcugcuccugccugaaggggugcugcagcugcggcuccugcugcaaguucgacgaggacgacagcgagcccguccugaagggggugaagcuccacuacacgugaggacuaguuauaagacugacuagcccgaugggccucccaacgggcccuccuccccuccuugcaccgagauuaauagaucucaaaggcucuuuucagagccaccaaaaaaaaaaaaaaaaaaaaaaaaaaaaaaaaaaaaaaaaaaaaaaaaaaaaaaaaaaaaaaaaaaaaaaaaaaaaaaaaaaaaaaaaaaaaaaaaaaaaa

SEQ ID NO: 24411 - RNA, 4032 nt, Artificial Sequence
  SARS-CoV-2/Wuhan/WIV05/2019__EPI_ISL_402128 spike protein mRNA gc (1-1273)(K986P_V987P_K986P_V987P_L18F_D80A_D215G_L242del_A243del_ L244del_R246I_K417N_E484K_N501Y_D614G_A701V)
aggagaaagcuuaccauguucguguuccugguccuccugccccuggugagcucccagugcgugaacuucaccacccgcacgcagcugccgcccgccuacaccaacagcuucacccggggcgucuacuaccccgacaagguguuccgcuccagcgugcugcacuccacccaggaccucuuccugcccuucuucagcaacgucacgugguuccacgccauccacguguccgggaccaacggcaccaagcgguucgccaacccggugcugcccuucaacgacggggucuacuucgcgagcaccgagaaguccaacaucauccgcggcuggaucuucgggacgacccucgacagcaagacccagucccugcugaucgugaacaacgccaccaacguggucaucaaggugugcgaguuccaguucugcaacgaccccuuccucggcguguacuaccacaagaacaacaagagcuggauggaguccgaguuccgggucuacagcuccgccaacaacugcacguucgaguacgugagccagcccuuccugauggaccuggagggcaagcaggggaacuucaagaaccuccgcgaguucguguucaagaacaucgacggcuacuucaagaucuacuccaagcacaccccgaucaaccugguccggggccugccccagggguucagcgcccucgagccccugguggaccugcccaucggcaucaacaucacccgcuuccagacccuccacaucuccuaccucacgccgggggacagcagcuccggcuggaccgcgggcgccgccgccuacuacgugggguaccugcagccccgcaccuuccugcucaaguacaacgagaacggcaccaucacggacgcggucgacugcgcccuggacccccugagcgagaccaagugcacccucaaguccuucaccguggagaaggggaucuaccagacgagcaacuuccgggugcagcccaccgaguccaucguccgcuucccgaacaucaccaaccugugccccuucggcgagguguucaacgccacccgguucgccagcgucuacgccuggaaccgcaagcggaucuccaacugcguggcggacuacagcgugcuguacaacuccgccagcuucuccacguucaagugcuacggcgucagccccaccaagcucaacgaccugugcuucaccaacguguacgccgacuccuucgugauccgcggggacgagguccggcagaucgcccccggccagaccgggaacaucgccgacuacaacuacaagcugccggacgacuucacgggcugcgugaucgcguggaacagcaacaaccucgacuccaaggucgggggcaacuacaacuaccuguaccgccuguuccgcaagagcaaccucaagcccuucgagcgggacaucuccaccgagaucuaccaggccggcagcacccccugcaacggggugaagggcuucaacugcuacuucccccugcaguccuacggguuccagccgaccuacggcgugggguaccagcccuaccggguggucgugcugagcuucgagcuccugcacgcccccgccacggugugcggccccaagaaguccaccaaccuggucaagaacaagugcgugaacuucaacuucaacggccucaccgggaccggcgugcugaccgagagcaacaagaaguuccugccguuccagcaguucgggcgcgacaucgccgacacgaccgacgcgguccgcgacccccagacccuggagauccucgacaucacccccugcagcuucggcgggguguccgugaucacgccgggcaccaacaccagcaaccaggucgccgugcuguaccagggcgugaacugcaccgagguccccguggccauccacgccgaccagcugacgcccaccuggcggguguacuccaccggcagcaacgucuuccagacccgcgccgggugccucaucggcgcggagcacgugaacaacuccuacgagugcgacauccccaucggggccggcaucugcgccagcuaccagacgcagaccaacuccccgcggcgcgcccggagcguggcgucccagagcaucaucgccuacaccaugucccugggcguggagaacagcgucgccuacuccaacaacagcaucgccauccccaccaacuucacgaucuccgugaccaccgagauccugcccgugagcaugaccaagacgagcgucgacugcaccauguacaucugcggggacuccaccgagugcagcaaccuccugcugcaguacggcuccuucugcacccagcucaaccgcgcgcugacggggaucgccguggagcaggacaagaacacccaggagguguucgcccaggucaagcagaucuacaagacgcccccgaucaaggacuucggcggguucaacuucagccagauccugcccgaccccuccaagcccagcaagcgguccuucaucgaggaccuccuguucaacaaggugacccuggccgacgccggcuucaucaagcaguacggcgacugccucggggacaucgcggcccgcgaccugaucugcgcccagaaguucaacggccugaccgugcucccgccccugcugaccgacgagaugaucgcccaguacaccagcgcccuccuggcggggaccaucacguccggcuggaccuucggggccggcgccgcccugcagauccccuucgcgaugcagauggccuaccgguucaacggcaucggggucacccagaacgugcucuacgagaaccagaagcugaucgccaaccaguucaacagcgccaucggcaagauccaggacucccugagcuccaccgccagcgcgcucgggaagcugcaggacguggucaaccagaacgcccaggcccugaacacgcucgugaagcagcuguccagcaacuucggcgccaucuccagcgugcugaacgacauccucucccgccuggacccgcccgaggccgaggugcagaucgaccggcugaucaccgggcgccuccagagccugcagaccuacgugacccagcagcugauccgggcggccgagauccgcgccagcgccaaccucgccgcgaccaagauguccgagugcguccugggccagagcaagcggguggacuucugcggcaagggguaccaccugauguccuucccccagagcgccccgcacggcguggucuuccuccacgugacguacguccccgcccaggagaagaacuucaccaccgcccccgcgaucugccacgacgggaaggcccacuucccccgcgagggcguguucguguccaacgggacccacugguucgucacgcagcggaacuucuacgagccgcagaucaucaccaccgacaacaccuucgugagcggcaacugcgacguggucaucggcaucgugaacaacacgguguacgacccccugcagcccgagcuggacuccuucaaggaggagcucgacaaguacuucaagaaccacaccagccccgacgucgaccugggggacaucuccggcaucaacgccagcguggugaacauccagaaggagaucgaccgccugaacgaggucgccaagaaccucaacgagucccugaucgaccugcaggagcucgggaaguacgagcaguacaucaaguggccgugguacaucuggcugggcuucaucgccggccugaucgcgaucgugauggugaccaucaugcucugcugcaugaccagcugcugcuccugccugaaggggugcugcagcugcggcuccugcugcaaguucgacgaggacgacagcgagcccguccugaagggggugaagcuccacuacacgugaggacuaguuauaagacugacuagcccgaugggccucccaacgggcccuccuccccuccuugcaccgagauuaauagaucucaaaggcucuuuucagagccaccaaaaaaaaaaaaaaaaaaaaaaaaaaaaaaaaaaaaaaaaaaaaaaaaaaaaaaaaaaaaaaaaaaaaaaaaaaaaaaaaaaaaaaaaaaaaaaaaaaaaa

SEQ ID NO: 24412 - RNA, 4041 nt, Artificial Sequence
  SARS-CoV-2/Wuhan/WIV05/2019__EPI_ISL_402128 spike protein mRNA gc (1-1273)(K986P_V987P_K986P_V987P_E484K_D614G)
aggagaaagcuuaccauguucguguuccugguccuccugccccuggugagcucccagugcgugaaccucaccacccgcacgcagcugccgcccgccuacaccaacagcuucacccggggcgucuacuaccccgacaagguguuccgcuccagcgugcugcacuccacccaggaccucuuccugcccuucuucagcaacgucacgugguuccacgccauccacguguccgggaccaacggcaccaagcgguucgacaacccggugcugcccuucaacgacggggucuacuucgcgagcaccgagaaguccaacaucauccgcggcuggaucuucgggacgacccucgacagcaagacccagucccugcugaucgugaacaacgccaccaacguggucaucaaggugugcgaguuccaguucugcaacgaccccuuccucggcguguacuaccacaagaacaacaagagcuggauggaguccgaguuccgggucuacagcuccgccaacaacugcacguucgaguacgugagccagcccuuccugauggaccuggagggcaagcaggggaacuucaagaaccuccgcgaguucguguucaagaacaucgacggcuacuucaagaucuacuccaagcacaccccgaucaaccugguccgggaccugccccagggguucagcgcccucgagccccugguggaccugcccaucggcaucaacaucacccgcuuccagacccuccuggcccugcaccgguccuaccucacgccgggggacagcagcuccggcuggaccgcgggcgccgccgccuacuacgugggguaccugcagccccgcaccuuccugcucaaguacaacgagaacggcaccaucacggacgcggucgacugcgcccuggacccccugagcgagaccaagugcacccucaaguccuucaccguggagaaggggaucuaccagacgagcaacuuccgggugcagcccaccgaguccaucguccgcuucccgaacaucaccaaccugugccccuucggcgagguguucaacgccacccgguucgccagcgucuacgccuggaaccgcaagcggaucuccaacugcguggcggacuacagcgugcuguacaacuccgccagcuucuccacguucaagugcuacggcgucagccccaccaagcucaacgaccugugcuucaccaacguguacgccgacuccuucgugauccgcggggacgagguccggcagaucgcccccggccagaccgggaagaucgccgacuacaacuacaagcugccggacgacuucacgggcugcgugaucgcguggaacagcaacaaccucgacuccaaggucgggggcaacuacaacuaccuguaccgccuguuccgcaagagcaaccucaagcccuucgagcgggacaucuccaccgagaucuaccaggccggcagcacccccugcaacggggugaagggcuucaacugcuacuucccccugcaguccuacggguuccagccgaccaacggcgugggguaccagcccuaccggguggucgugcugagcuucgagcuccugcacgcccccgccacggugugcggccccaagaaguccaccaaccuggucaagaacaagugcgugaacuucaacuucaacggccucaccgggaccggcgugcugaccgagagcaacaagaaguuccugccguuccagcaguucgggcgcgacaucgccgacacgaccgacgcgguccgcgacccccagacccuggagauccucgacaucacccccugcagcuucggcgggguguccgugaucacgccgggcaccaacaccagcaaccaggucgccgugcuguaccagggcgugaacugcaccgagguccccguggccauccacgccgaccagcugacgcccaccuggcggguguacuccaccggcagcaacgucuuccagacccgcgccgggugccucaucggcgcggagcacgugaacaacuccuacgagugcgacauccccaucggggccggcaucugcgccagcuaccagacgcagaccaacuccccgcggcgcgcccggagcguggcgucccagagcaucaucgccuacaccaugucccugggcgccgagaacagcgucgccuacuccaacaacagcaucgccauccccaccaacuucacgaucuccgugaccaccgagauccugcccgugagcaugaccaagacgagcgucgacugcaccauguacaucugcggggacuccaccgagugcagcaaccuccugcugcaguacggcuccuucugcacccagcucaaccgcgcgcugacggggaucgccguggagcaggacaagaacacccaggagguguucgcccaggucaagcagaucuacaagacgcccccgaucaaggacuucggcggguucaacuucagccagauccugcccgaccccuccaagcccagcaagcgguccuucaucgaggaccuccuguucaacaaggugacccuggccgacgccggcuucaucaagcaguacggcgacugccucggggacaucgcggcccgcgaccugaucugcgcccagaaguucaacggccugaccgugcucccgccccugcugaccgacgagaugaucgcccaguacaccagcgcccuccuggcggggaccaucacguccggcuggaccuucggggccggcgccgcccugcagauccccuucgcgaugcagauggccuaccgguucaacggcaucggggucacccagaacgugcucuacgagaaccagaagcugaucgccaaccaguucaacagcgccaucggcaagauccaggacucccugagcuccaccgccagcgcgcucgggaagcugcaggacguggucaaccagaacgcccaggcccugaacacgcucgugaagcagcuguccagcaacuucggcgccaucuccagcgugcugaacgacauccucucccgccuggacccgcccgaggccgaggugcagaucgaccggcugaucaccgggcgccuccagagccugcagaccuacgugacccagcagcugauccgggcggccgagauccgcgccagcgccaaccucgccgcgaccaagauguccgagugcguccugggccagagcaagcggguggacuucugcggcaagggguaccaccugauguccuucccccagagcgccccgcacggcguggucuuccuccacgugacguacguccccgcccaggagaagaacuucaccaccgcccccgcgaucugccacgacgggaaggcccacuucccccgcgagggcguguucguguccaacgggacccacugguucgucacgcagcggaacuucuacgagccgcagaucaucaccaccgacaacaccuucgugagcggcaacugcgacguggucaucggcaucgugaacaacacgguguacgacccccugcagcccgagcuggacuccuucaaggaggagcucgacaaguacuucaagaaccacaccagccccgacgucgaccugggggacaucuccggcaucaacgccagcguggugaacauccagaaggagaucgaccgccugaacgaggucgccaagaaccucaacgagucccugaucgaccugcaggagcucgggaaguacgagcaguacaucaaguggccgugguacaucuggcugggcuucaucgccggccugaucgcgaucgugauggugaccaucaugcucugcugcaugaccagcugcugcuccugccugaaggggugcugcagcugcggcuccugcugcaaguucgacgaggacgacagcgagcccguccugaagggggugaagcuccacuacacgugaggacuaguuauaagacugacuagcccgaugggccucccaacgggcccuccuccccuccuugcaccgagauuaauagaucucaaaggcucuuuucagagccaccaaaaaaaaaaaaaaaaaaaaaaaaaaaaaaaaaaaaaaaaaaaaaaaaaaaaaaaaaaaaaaaaaaaaaaaaaaaaaaaaaaaaaaaaaaaaaaaaaaaaa

SEQ ID NO: 24413 - RNA, 4041 nt, Artificial Sequence
  SARS-CoV-2/Wuhan/WIV05/2019__EPI_ISL_402128 spike protein mRNA gc (1-1273)(K986P_V987P_K986P_V987P_L18F_T20N_P26S_D138Y_R190S_K417T _E484K_N501Y_D614G_H655Y_T1027I)
aggagaaagcuuaccauguucguguuccugguccuccugccccuggugagcucccagugcgugaacuucaccaaccgcacgcagcugccgagcgccuacaccaacagcuucacccggggcgucuacuaccccgacaagguguuccgcuccagcgugcugcacuccacccaggaccucuuccugcccuucuucagcaacgucacgugguuccacgccauccacguguccgggaccaacggcaccaagcgguucgacaacccggugcugcccuucaacgacggggucuacuucgcgagcaccgagaaguccaacaucauccgcggcuggaucuucgggacgacccucgacagcaagacccagucccugcugaucgugaacaacgccaccaacguggucaucaaggugugcgaguuccaguucugcaacuaccccuuccucggcguguacuaccacaagaacaacaagagcuggauggaguccgaguuccgggucuacagcuccgccaacaacugcacguucgaguacgugagccagcccuuccugauggaccuggagggcaagcaggggaacuucaagaaccucagcgaguucguguucaagaacaucgacggcuacuucaagaucuacuccaagcacaccccgaucaaccugguccgggaccugccccagggguucagcgcccucgagccccugguggaccugcccaucggcaucaacaucacccgcuuccagacccuccuggcccugcaccgguccuaccucacgccgggggacagcagcuccggcuggaccgcgggcgccgccgccuacuacgugggguaccugcagccccgcaccuuccugcucaaguacaacgagaacggcaccaucacggacgcggucgacugcgcccuggacccccugagcgagaccaagugcacccucaaguccuucaccguggagaaggggaucuaccagacgagcaacuuccgggugcagcccaccgaguccaucguccgcuucccgaacaucaccaaccugugccccuucggcgagguguucaacgccacccgguucgccagcgucuacgccuggaaccgcaagcggaucuccaacugcguggcggacuacagcgugcuguacaacuccgccagcuucuccacguucaagugcuacggcgucagccccaccaagcucaacgaccugugcuucaccaacguguacgccgacuccuucgugauccgcggggacgagguccggcagaucgcccccggccagaccgggaccaucgccgacuacaacuacaagcugccggacgacuucacgggcugcgugaucgcguggaacagcaacaaccucgacuccaaggucgggggcaacuacaacuaccuguaccgccuguuccgcaagagcaaccucaagcccuucgagcgggacaucuccaccgagaucuaccaggccggcagcacccccugcaacggggugaagggcuucaacugcuacuucccccugcaguccuacggguuccagccgaccuacggcgugggguaccagcccuaccggguggucgugcugagcuucgagcuccugcacgcccccgccacggugugcggccccaagaaguccaccaaccuggucaagaacaagugcgugaacuucaacuucaacggccucaccgggaccggcgugcugaccgagagcaacaagaaguuccugccguuccagcaguucgggcgcgacaucgccgacacgaccgacgcgguccgcgacccccagacccuggagauccucgacaucacccccugcagcuucggcgggguguccgugaucacgccgggcaccaacaccagcaaccaggucgccgugcuguaccagggcgugaacugcaccgagguccccguggccauccacgccgaccagcugacgcccaccuggcggguguacuccaccggcagcaacgucuuccagacccgcgccgggugccucaucggcgcggaguacgugaacaacuccuacgagugcgacauccccaucggggccggcaucugcgccagcuaccagacgcagaccaacuccccgcggcgcgcccggagcguggcgucccagagcaucaucgccuacaccaugucccugggcgccgagaacagcgucgccuacuccaacaacagcaucgccauccccaccaacuucacgaucuccgugaccaccgagauccugcccgugagcaugaccaagacgagcgucgacugcaccauguacaucugcggggacuccaccgagugcagcaaccuccugcugcaguacggcuccuucugcacccagcucaaccgcgcgcugacggggaucgccguggagcaggacaagaacacccaggagguguucgcccaggucaagcagaucuacaagacgcccccgaucaaggacuucggcggguucaacuucagccagauccugcccgaccccuccaagcccagcaagcgguccuucaucgaggaccuccuguucaacaaggugacccuggccgacgccggcuucaucaagcaguacggcgacugccucggggacaucgcggcccgcgaccugaucugcgcccagaaguucaacggccugaccgugcucccgccccugcugaccgacgagaugaucgcccaguacaccagcgcccuccuggcggggaccaucacguccggcuggaccuucggggccggcgccgcccugcagauccccuucgcgaugcagauggccuaccgguucaacggcaucggggucacccagaacgugcucuacgagaaccagaagcugaucgccaaccaguucaacagcgccaucggcaagauccaggacucccugagcuccaccgccagcgcgcucgggaagcugcaggacguggucaaccagaacgcccaggcccugaacacgcucgugaagcagcuguccagcaacuucggcgccaucuccagcgugcugaacgacauccucucccgccuggacccgcccgaggccgaggugcagaucgaccggcugaucaccgggcgccuccagagccugcagaccuacgugacccagcagcugauccgggcggccgagauccgcgccagcgccaaccucgccgcgaucaagauguccgagugcguccugggccagagcaagcggguggacuucugcggcaagggguaccaccugauguccuucccccagagcgccccgcacggcguggucuuccuccacgugacguacguccccgcccaggagaagaacuucaccaccgcccccgcgaucugccacgacgggaaggcccacuucccccgcgagggcguguucguguccaacgggacccacugguucgucacgcagcggaacuucuacgagccgcagaucaucaccaccgacaacaccuucgugagcggcaacugcgacguggucaucggcaucgugaacaacacgguguacgacccccugcagcccgagcuggacuccuucaaggaggagcucgacaaguacuucaagaaccacaccagccccgacgucgaccugggggacaucuccggcaucaacgccagcguggugaacauccagaaggagaucgaccgccugaacgaggucgccaagaaccucaacgagucccugaucgaccugcaggagcucgggaaguacgagcaguacaucaaguggccgugguacaucuggcugggcuucaucgccggccugaucgcgaucgugauggugaccaucaugcucugcugcaugaccagcugcugcuccugccugaaggggugcugcagcugcggcuccugcugcaaguucgacgaggacgacagcgagcccguccugaagggggugaagcuccacuacacgugaggacuaguuauaagacugacuagcccgaugggccucccaacgggcccuccuccccuccuugcaccgagauuaauagaucucaaaggcucuuuucagagccaccaaaaaaaaaaaaaaaaaaaaaaaaaaaaaaaaaaaaaaaaaaaaaaaaaaaaaaaaaaaaaaaaaaaaaaaaaaaaaaaaaaaaaaaaaaaaaaaaaaaaa

SEQ ID NO: 24414 - RNA, 4041 nt, Artificial Sequence
  SARS-CoV-2/Wuhan/WIV05/2019__EPI_ISL_402128 spike protein mRNA gc (1-1273)(K986P_V987P_K986P_V987P_S13I_W152C_L452R_D614G)
aggagaaagcuuaccauguucguguuccugguccuccugccccuggugagcauccagugcgugaaccucaccacccgcacgcagcugccgcccgccuacaccaacagcuucacccggggcgucuacuaccccgacaagguguuccgcuccagcgugcugcacuccacccaggaccucuuccugcccuucuucagcaacgucacgugguuccacgccauccacguguccgggaccaacggcaccaagcgguucgacaacccggugcugcccuucaacgacggggucuacuucgcgagcaccgagaaguccaacaucauccgcggcuggaucuucgggacgacccucgacagcaagacccagucccugcugaucgugaacaacgccaccaacguggucaucaaggugugcgaguuccaguucugcaacgaccccuuccucggcguguacuaccacaagaacaacaagagcugcauggaguccgaguuccgggucuacagcuccgccaacaacugcacguucgaguacgugagccagcccuuccugauggaccuggagggcaagcaggggaacuucaagaaccuccgcgaguucguguucaagaacaucgacggcuacuucaagaucuacuccaagcacaccccgaucaaccugguccgggaccugccccagggguucagcgcccucgagccccugguggaccugcccaucggcaucaacaucacccgcuuccagacccuccuggcccugcaccgguccuaccucacgccgggggacagcagcuccggcuggaccgcgggcgccgccgccuacuacgugggguaccugcagccccgcaccuuccugcucaaguacaacgagaacggcaccaucacggacgcggucgacugcgcccuggacccccugagcgagaccaagugcacccucaaguccuucaccguggagaaggggaucuaccagacgagcaacuuccgggugcagcccaccgaguccaucguccgcuucccgaacaucaccaaccugugccccuucggcgagguguucaacgccacccgguucgccagcgucuacgccuggaaccgcaagcggaucuccaacugcguggcggacuacagcgugcuguacaacuccgccagcuucuccacguucaagugcuacggcgucagccccaccaagcucaacgaccugugcuucaccaacguguacgccgacuccuucgugauccgcggggacgagguccggcagaucgcccccggccagaccgggaagaucgccgacuacaacuacaagcugccggacgacuucacgggcugcgugaucgcguggaacagcaacaaccucgacuccaaggucgggggcaacuacaacuaccgcuaccgccuguuccgcaagagcaaccucaagcccuucgagcgggacaucuccaccgagaucuaccaggccggcagcacccccugcaacgggguggagggcuucaacugcuacuucccccugcaguccuacggguuccagccgaccaacggcgugggguaccagcccuaccggguggucgugcugagcuucgagcuccugcacgcccccgccacggugugcggccccaagaaguccaccaaccuggucaagaacaagugcgugaacuucaacuucaacggccucaccgggaccggcgugcugaccgagagcaacaagaaguuccugccguuccagcaguucgggcgcgacaucgccgacacgaccgacgcgguccgcgacccccagacccuggagauccucgacaucacccccugcagcuucggcgggguguccgugaucacgccgggcaccaacaccagcaaccaggucgccgugcuguaccagggcgugaacugcaccgagguccccguggccauccacgccgaccagcugacgcccaccuggcggguguacuccaccggcagcaacgucuuccagacccgcgccgggugccucaucggcgcggagcacgugaacaacuccuacgagugcgacauccccaucggggccggcaucugcgccagcuaccagacgcagaccaacuccccgcggcgcgcccggagcguggcgucccagagcaucaucgccuacaccaugucccugggcgccgagaacagcgucgccuacuccaacaacagcaucgccauccccaccaacuucacgaucuccgugaccaccgagauccugcccgugagcaugaccaagacgagcgucgacugcaccauguacaucugcggggacuccaccgagugcagcaaccuccugcugcaguacggcuccuucugcacccagcucaaccgcgcgcugacggggaucgccguggagcaggacaagaacacccaggagguguucgcccaggucaagcagaucuacaagacgcccccgaucaaggacuucggcggguucaacuucagccagauccugcccgaccccuccaagcccagcaagcgguccuucaucgaggaccuccuguucaacaaggugacccuggccgacgccggcuucaucaagcaguacggcgacugccucggggacaucgcggcccgcgaccugaucugcgcccagaaguucaacggccugaccgugcucccgccccugcugaccgacgagaugaucgcccaguacaccagcgcccuccuggcggggaccaucacguccggcuggaccuucggggccggcgccgcccugcagauccccuucgcgaugcagauggccuaccgguucaacggcaucggggucacccagaacgugcucuacgagaaccagaagcugaucgccaaccaguucaacagcgccaucggcaagauccaggacucccugagcuccaccgccagcgcgcucgggaagcugcaggacguggucaaccagaacgcccaggcccugaacacgcucgugaagcagcuguccagcaacuucggcgccaucuccagcgugcugaacgacauccucucccgccuggacccgcccgaggccgaggugcagaucgaccggcugaucaccgggcgccuccagagccugcagaccuacgugacccagcagcugauccgggcggccgagauccgcgccagcgccaaccucgccgcgaccaagauguccgagugcguccugggccagagcaagcggguggacuucugcggcaagggguaccaccugauguccuucccccagagcgccccgcacggcguggucuuccuccacgugacguacguccccgcccaggagaagaacuucaccaccgcccccgcgaucugccacgacgggaaggcccacuucccccgcgagggcguguucguguccaacgggacccacugguucgucacgcagcggaacuucuacgagccgcagaucaucaccaccgacaacaccuucgugagcggcaacugcgacguggucaucggcaucgugaacaacacgguguacgacccccugcagcccgagcuggacuccuucaaggaggagcucgacaaguacuucaagaaccacaccagccccgacgucgaccugggggacaucuccggcaucaacgccagcguggugaacauccagaaggagaucgaccgccugaacgaggucgccaagaaccucaacgagucccugaucgaccugcaggagcucgggaaguacgagcaguacaucaaguggccgugguacaucuggcugggcuucaucgccggccugaucgcgaucgugauggugaccaucaugcucugcugcaugaccagcugcugcuccugccugaaggggugcugcagcugcggcuccugcugcaaguucgacgaggacgacagcgagcccguccugaagggggugaagcuccacuacacgugaggacuaguuauaagacugacuagcccgaugggccucccaacgggcccuccuccccuccuugcaccgagauuaauagaucucaaaggcucuuuucagagccaccaaaaaaaaaaaaaaaaaaaaaaaaaaaaaaaaaaaaaaaaaaaaaaaaaaaaaaaaaaaaaaaaaaaaaaaaaaaaaaaaaaaaaaaaaaaaaaaaaaaaa

SEQ ID NO: 24415 - RNA, 4041 nt, Artificial Sequence
  SARS-CoV-2/Wuhan/WIV05/2019__EPI_ISL_402128 spike protein mRNA gc (1-1273)(K986P_V987P)
aggagaaagcuuaccauguucguguuccugguccuccugccccuggugagcucccagugcgugaaccucaccacccgcacgcagcugccgcccgccuacaccaacagcuucacccggggcgucuacuaccccgacaagguguuccgcuccagcgugcugcacuccacccaggaccucuuccugcccuucuucagcaacgucacgugguuccacgccauccacguguccgggaccaacggcaccaagcgguucgacaacccggugcugcccuucaacgacggggucuacuucgcgagcaccgagaaguccaacaucauccgcggcuggaucuucgggacgacccucgacagcaagacccagucccugcugaucgugaacaacgccaccaacguggucaucaaggugugcgaguuccaguucugcaacgaccccuuccucggcguguacuaccacaagaacaacaagagcuggauggaguccgaguuccgggucuacagcuccgccaacaacugcacguucgaguacgugagccagcccuuccugauggaccuggagggcaagcaggggaacuucaagaaccuccgcgaguucguguucaagaacaucgacggcuacuucaagaucuacuccaagcacaccccgaucaaccugguccgggaccugccccagggguucagcgcccucgagccccugguggaccugcccaucggcaucaacaucacccgcuuccagacccuccuggcccugcaccgguccuaccucacgccgggggacagcagcuccggcuggaccgcgggcgccgccgccuacuacgugggguaccugcagccccgcaccuuccugcucaaguacaacgagaacggcaccaucacggacgcggucgacugcgcccuggacccccugagcgagaccaagugcacccucaaguccuucaccguggagaaggggaucuaccagacgagcaacuuccgggugcagcccaccgaguccaucguccgcuucccgaacaucaccaaccugugccccuucggcgagguguucaacgccacccgguucgccagcgucuacgccuggaaccgcaagcggaucuccaacugcguggcggacuacagcgugcuguacaacuccgccagcuucuccacguucaagugcuacggcgucagccccaccaagcucaacgaccugugcuucaccaacguguacgccgacuccuucgugauccgcggggacgagguccggcagaucgcccccggccagaccgggaagaucgccgacuacaacuacaagcugccggacgacuucacgggcugcgugaucgcguggaacagcaacaaccucgacuccaaggucgggggcaacuacaacuaccuguaccgccuguuccgcaagagcaaccucaagcccuucgagcgggacaucuccaccgagaucuaccaggccggcagcacccccugcaacgggguggagggcuucaacugcuacuucccccugcaguccuacggguuccagccgaccaacggcgugggguaccagcccuaccggguggucgugcugagcuucgagcuccugcacgcccccgccacggugugcggccccaagaaguccaccaaccuggucaagaacaagugcgugaacuucaacuucaacggccucaccgggaccggcgugcugaccgagagcaacaagaaguuccugccguuccagcaguucgggcgcgacaucgccgacacgaccgacgcgguccgcgacccccagacccuggagauccucgacaucacccccugcagcuucggcgggguguccgugaucacgccgggcaccaacaccagcaaccaggucgccgugcuguaccaggacgugaacugcaccgagguccccguggccauccacgccgaccagcugacgcccaccuggcggguguacuccaccggcagcaacgucuuccagacccgcgccgggugccucaucggcgcggagcacgugaacaacuccuacgagugcgacauccccaucggggccggcaucugcgccagcuaccagacgcagaccaacuccccgcggcgcgcccggagcguggcgucccagagcaucaucgccuacaccaugucccugggcgccgagaacagcgucgccuacuccaacaacagcaucgccauccccaccaacuucacgaucuccgugaccaccgagauccugcccgugagcaugaccaagacgagcgucgacugcaccauguacaucugcggggacuccaccgagugcagcaaccuccugcugcaguacggcuccuucugcacccagcucaaccgcgcgcugacggggaucgccguggagcaggacaagaacacccaggagguguucgcccaggucaagcagaucuacaagacgcccccgaucaaggacuucggcggguucaacuucagccagauccugcccgaccccuccaagcccagcaagcgguccuucaucgaggaccuccuguucaacaaggugacccuggccgacgccggcuucaucaagcaguacggcgacugccucggggacaucgcggcccgcgaccugaucugcgcccagaaguucaacggccugaccgugcucccgccccugcugaccgacgagaugaucgcccaguacaccagcgcccuccuggcggggaccaucacguccggcuggaccuucggggccggcgccgcccugcagauccccuucgcgaugcagauggccuaccgguucaacggcaucggggucacccagaacgugcucuacgagaaccagaagcugaucgccaaccaguucaacagcgccaucggcaagauccaggacucccugagcuccaccgccagcgcgcucgggaagcugcaggacguggucaaccagaacgcccaggcccugaacacgcucgugaagcagcuguccagcaacuucggcgccaucuccagcgugcugaacgacauccucucccgccuggacccgcccgaggccgagguccagaucgaccggcugaucaccgggcgccuccagagccugcagaccuacgugacccagcagcugauccgggcggccgagauccgcgccagcgccaaccucgccgcgaccaagauguccgagugcgugcugggccagagcaagcgggucgacuucugcggcaagggguaccaccugauguccuucccccagagcgcgccccacggcgugguguuccuccacgucacguacgugcccgcccaggagaagaacuucaccaccgccccggccaucugccacgacgggaaggcccacuucccccgcgagggcgucuucguguccaacgggacccacugguucgugacgcagcggaacuucuacgagccccagaucaucaccaccgacaacaccuucgucagcggcaacugcgacguggugaucggcaucgucaacaacacgguguacgacccccugcagccggagcuggacuccuucaaggaggagcucgacaaguacuucaagaaccacaccagccccgacguggaccugggggacaucuccggcaucaacgccagcgucgugaacauccagaaggagaucgaccgccugaacgagguggccaagaaccucaacgagucccugaucgaccugcaggagcucgggaaguacgagcaguacaucaaguggcccugguacaucuggcugggcuucaucgccggccugaucgcgaucgucauggugaccaucaugcucugcugcaugaccagcugcugcuccugccugaaggggugcugcagcugcggcuccugcugcaaguucgacgaggacgacagcgagccggugcugaagggggucaagcuccacuacacgugaggacuaguuauaagacugacuagcccgaugggccucccaacgggcccuccuccccuccuugcaccgagauuaauagaucucaaaggcucuuuucagagccaccaaaaaaaaaaaaaaaaaaaaaaaaaaaaaaaaaaaaaaaaaaaaaaaaaaaaaaaaaaaaaaaaaaaaaaaaaaaaaaaaaaaaaaaaaaaaaaaaaaaaa

SEQ ID NO: 24416 - RNA, 4041 nt, Artificial Sequence
  SARS-CoV-2/Wuhan/WIV05/2019__EPI_ISL_402128 spike protein mRNA gc (1-1273)(K986P_V987P_ D614G)
aggagaaagcuuaccauguucguguuccugguccuccugccccuggugagcucccagugcgugaaccucaccacccgcacgcagcugccgcccgccuacaccaacagcuucacccggggcgucuacuaccccgacaagguguuccgcuccagcgugcugcacuccacccaggaccucuuccugcccuucuucagcaacgucacgugguuccacgccauccacguguccgggaccaacggcaccaagcgguucgacaacccggugcugcccuucaacgacggggucuacuucgcgagcaccgagaaguccaacaucauccgcggcuggaucuucgggacgacccucgacagcaagacccagucccugcugaucgugaacaacgccaccaacguggucaucaaggugugcgaguuccaguucugcaacgaccccuuccucggcguguacuaccacaagaacaacaagagcuggauggaguccgaguuccgggucuacagcuccgccaacaacugcacguucgaguacgugagccagcccuuccugauggaccuggagggcaagcaggggaacuucaagaaccuccgcgaguucguguucaagaacaucgacggcuacuucaagaucuacuccaagcacaccccgaucaaccugguccgggaccugccccagggguucagcgcccucgagccccugguggaccugcccaucggcaucaacaucacccgcuuccagacccuccuggcccugcaccgguccuaccucacgccgggggacagcagcuccggcuggaccgcgggcgccgccgccuacuacgugggguaccugcagccccgcaccuuccugcucaaguacaacgagaacggcaccaucacggacgcggucgacugcgcccuggacccccugagcgagaccaagugcacccucaaguccuucaccguggagaaggggaucuaccagacgagcaacuuccgggugcagcccaccgaguccaucguccgcuucccgaacaucaccaaccugugccccuucggcgagguguucaacgccacccgguucgccagcgucuacgccuggaaccgcaagcggaucuccaacugcguggcggacuacagcgugcuguacaacuccgccagcuucuccacguucaagugcuacggcgucagccccaccaagcucaacgaccugugcuucaccaacguguacgccgacuccuucgugauccgcggggacgagguccggcagaucgcccccggccagaccgggaagaucgccgacuacaacuacaagcugccggacgacuucacgggcugcgugaucgcguggaacagcaacaaccucgacuccaaggucgggggcaacuacaacuaccuguaccgccuguuccgcaagagcaaccucaagcccuucgagcgggacaucuccaccgagaucuaccaggccggcagcacccccugcaacgggguggagggcuucaacugcuacuucccccugcaguccuacggguuccagccgaccaacggcgugggguaccagcccuaccggguggucgugcugagcuucgagcuccugcacgcccccgccacggugugcggccccaagaaguccaccaaccuggucaagaacaagugcgugaacuucaacuucaacggccucaccgggaccggcgugcugaccgagagcaacaagaaguuccugccguuccagcaguucgggcgcgacaucgccgacacgaccgacgcgguccgcgacccccagacccuggagauccucgacaucacccccugcagcuucggcgggguguccgugaucacgccgggcaccaacaccagcaaccaggucgccgugcuguaccagggcgugaacugcaccgagguccccguggccauccacgccgaccagcugacgcccaccuggcggguguacuccaccgggagcaacgucuuccagacccgcgccggcugccucaucggggcggagcacgugaacaacuccuacgagugcgacauccccaucggcgccggcaucugcgccagcuaccagacgcagaccaacuccccgcggcgcgcccggagcguggcgucccagagcaucaucgccuacaccaugucccugggggccgagaacagcgucgccuacuccaacaacagcaucgccauccccaccaacuucacgaucuccgugaccaccgagauccugcccgugagcaugaccaagacgagcgucgacugcaccauguacaucugcggcgacuccaccgagugcagcaaccuccugcugcaguacggguccuucugcacccagcucaaccgcgcgcugacgggcaucgccguggagcaggacaagaacacccaggagguguucgcccaggucaagcagaucuacaagacgcccccgaucaaggacuucgggggcuucaacuucagccagauccugcccgaccccuccaagcccagcaagcgguccuucaucgaggaccuccuguucaacaaggugacccuggccgacgccggcuucaucaagcaguacggggacugccucggcgacaucgcggcccgcgaccugaucugcgcccagaaguucaacgggcugaccgugcucccgccccugcugaccgacgagaugaucgcccaguacaccagcgcccuccuggcgggcaccaucacguccggguggaccuucggcgccggcgccgcccugcagauccccuucgcgaugcagauggccuaccgguucaacgggaucggcgucacccagaacgugcucuacgagaaccagaagcugaucgccaaccaguucaacagcgccaucgggaagauccaggacucccugagcuccaccgccagcgcgcucggcaagcugcaggacguggucaaccagaacgcccaggcccugaacacgcucgugaagcagcuguccagcaacuucggggccaucuccagcgugcugaacgacauccucucccgccuggacccgcccgaggccgagguccagaucgaccggcugaucaccggccgccuccagagccugcagaccuacgugacccagcagcugauccgggcggccgagauccgcgccagcgccaaccucgccgcgaccaagauguccgagugcgugcugggccagagcaagcgggucgacuucugcgggaagggcuaccaccugauguccuucccccagagcgcgccccacggggugguguuccuccacgucacguacgugcccgcccaggagaagaacuucaccaccgccccggccaucugccacgacggcaaggcccacuucccccgcgagggggucuucguguccaacggcacccacugguucgugacgcagcggaacuucuacgagccccagaucaucaccaccgacaacaccuucgucagcggcaacugcgacguggugaucgggaucgucaacaacacgguguacgacccccugcagccggagcuggacuccuucaaggaggagcucgacaaguacuucaagaaccacaccagccccgacguggaccugggcgacaucuccgggaucaacgccagcgucgugaacauccagaaggagaucgaccgccugaacgagguggccaagaaccucaacgagucccugaucgaccugcaggagcucggcaaguacgagcaguacaucaaguggcccugguacaucuggcugggcuucaucgccgggcugaucgcgaucgucauggugaccaucaugcucugcugcaugaccagcugcugcuccugccugaagggcugcugcagcugcggguccugcugcaaguucgacgaggacgacagcgagccggugcugaagggcgucaagcuccacuacacgugaggacuaguuauaagacugacuagcccgaugggccucccaacgggcccuccuccccuccuugcaccgagauuaauagaucucaaaggcucuuuucagagccaccaaaaaaaaaaaaaaaaaaaaaaaaaaaaaaaaaaaaaaaaaaaaaaaaaaaaaaaaaaaaaaaaaaaaaaaaaaaaaaaaaaaaaaaaaaaaaaaaaaaaa

SEQ ID NO: 24417 - RNA, 4041 nt, Artificial Sequence
  SARS-CoV-2/Wuhan/WIV05/2019__EPI_ISL_402128 spike protein mRNA gc (1-1273)(K986P_V987P_A222V_D614G)
aggagaaagcuuaccauguucguguuccugguccuccugccccuggugagcucccagugcgugaaccucaccacccgcacgcagcugccgcccgccuacaccaacagcuucacccggggcgucuacuaccccgacaagguguuccgcuccagcgugcugcacuccacccaggaccucuuccugcccuucuucagcaacgucacgugguuccacgccauccacguguccgggaccaacggcaccaagcgguucgacaacccggugcugcccuucaacgacggggucuacuucgcgagcaccgagaaguccaacaucauccgcggcuggaucuucgggacgacccucgacagcaagacccagucccugcugaucgugaacaacgccaccaacguggucaucaaggugugcgaguuccaguucugcaacgaccccuuccucggcguguacuaccacaagaacaacaagagcuggauggaguccgaguuccgggucuacagcuccgccaacaacugcacguucgaguacgugagccagcccuuccugauggaccuggagggcaagcaggggaacuucaagaaccuccgcgaguucguguucaagaacaucgacggcuacuucaagaucuacuccaagcacaccccgaucaaccugguccgggaccugccccagggguucagcgugcucgagccccugguggaccugcccaucggcaucaacaucacccgcuuccagacccuccuggcccugcaccgguccuaccucacgccgggggacagcagcuccggcuggaccgccggcgcggccgccuacuacgucggguaccugcagccccgcaccuuccugcucaaguacaacgagaacggcaccaucacggacgccguggacugcgcgcuggacccccugagcgagaccaagugcacccucaaguccuucaccguggagaaggggaucuaccagacgagcaacuuccggguccagcccaccgaguccaucgugcgcuucccgaacaucaccaaccugugccccuucggcgaggucuucaacgccacccgguucgccagcguguacgccuggaaccgcaagcggaucuccaacugcguggccgacuacagcguccuguacaacuccgcgagcuucuccacguucaagugcuacggcgugagccccaccaagcucaacgaccugugcuucaccaacguguacgccgacuccuucgucauccgcggggacgaggugcggcagaucgcccccggccagaccgggaagaucgccgacuacaacuacaagcugccggacgacuucacgggcugcgugaucgccuggaacagcaacaaccucgacuccaaggucgggggcaacuacaacuaccuguaccgccuguuccgcaagagcaaccucaagcccuucgagcgggacaucuccaccgagaucuaccaggcgggcagcacccccugcaacgggguggagggcuucaacugcuacuucccccugcaguccuacggguuccagccgaccaacggcgugggguaccagcccuaccgggucguggugcugagcuucgagcuccugcacgcccccgccacggucugcggccccaagaaguccaccaaccuggugaagaacaagugcgugaacuucaacuucaacggccucaccgggaccggcguccugaccgagagcaacaagaaguuccugccguuccagcaguucgggcgcgacaucgccgacacgaccgacgccgugcgcgacccccagacccuggagauccucgacaucacccccugcagcuucggcgggguguccgucaucacgccgggcaccaacaccagcaaccagguggcggugcuguaccagggcgucaacugcaccgaggugcccguggccauccacgccgaccagcugacgcccaccuggcgggucuacuccaccgggagcaacguguuccagacccgcgccggcugccucaucggggccgagcacgugaacaacuccuacgagugcgacauccccaucggcgcgggcaucugcgccagcuaccagacgcagaccaacuccccgcggcgcgcccggagcgucgccucccagagcaucaucgcguacaccaugucccugggggccgagaacagcguggccuacuccaacaacagcaucgccauccccaccaacuucacgaucuccgugaccaccgagauccugcccgucagcaugaccaagacgagcguggacugcaccauguacaucugcggcgacuccaccgagugcagcaaccuccugcugcaguacggguccuucugcacccagcucaaccgcgcccugacgggcaucgcgguggagcaggacaagaacacccaggaggucuucgcccaggugaagcagaucuacaagacgcccccgaucaaggacuucgggggcuucaacuucagccagauccugcccgaccccuccaagcccagcaagcgguccuucaucgaggaccuccuguucaacaaggugacccuggccgacgccggcuucaucaagcaguacggggacugccucggcgacaucgccgcgcgcgaccugaucugcgcccagaaguucaacgggcugaccguccucccgccccugcugaccgacgagaugaucgcccaguacaccagcgcccuccuggccggcaccaucacguccggguggaccuucggcgcgggcgccgcccugcagauccccuucgccaugcagauggcguaccgguucaacgggaucggcgugacccagaacgugcucuacgagaaccagaagcugaucgccaaccaguucaacagcgccaucgggaagauccaggacucccugagcuccaccgccagcgcccucggcaagcugcaggacgucgugaaccagaacgcgcaggcccugaacacgcucgugaagcagcuguccagcaacuucggggccaucuccagcguccugaacgacauccucucccgccuggacccgcccgaggccgaggugcagaucgaccggcugaucaccggccgccuccagagccugcagaccuacgugacccagcagcugauccgggccgcggagauccgcgccagcgccaaccucgccgccaccaagauguccgagugcguccugggccagagcaagcggguggacuucugcgggaagggcuaccaccugauguccuucccccagagcgcgccccacgggguggucuuccuccacgugacguacguccccgcccaggagaagaacuucaccaccgccccggccaucugccacgacggcaaggcgcacuucccccgcgaggggguguucguguccaacggcacccacugguucgucacgcagcggaacuucuacgagccccagaucaucaccaccgacaacaccuucgugagcggcaacugcgacguggucaucgggaucgugaacaacacgguguacgacccccugcagccggagcuggacuccuucaaggaggagcucgacaaguacuucaagaaccacaccagccccgacgucgaccugggcgacaucuccgggaucaacgccagcguggugaacauccagaaggagaucgaccgccugaacgaggucgccaagaaccucaacgagucccugaucgaccugcaggagcucggcaaguacgagcaguacaucaaguggcccugguacaucuggcugggcuucaucgccgggcugaucgccaucgugauggugaccaucaugcucugcugcaugaccagcugcugcuccugccugaagggcugcugcagcugcggguccugcugcaaguucgacgaggacgacagcgagccgguccugaagggcgugaagcuccacuacacgugaggacuaguuauaagacugacuagcccgaugggccucccaacgggcccuccuccccuccuugcaccgagauuaauagaucucaaaggcucuuuucagagccaccaaaaaaaaaaaaaaaaaaaaaaaaaaaaaaaaaaaaaaaaaaaaaaaaaaaaaaaaaaaaaaaaaaaaaaaaaaaaaaaaaaaaaaaaaaaaaaaaaaaaa

SEQ ID NO: 24418 - RNA, 4041 nt, Artificial Sequence
  SARS-CoV-2/Wuhan/WIV05/2019__EPI_ISL_402128 spike protein mRNA gc (1-1273)(K986P_V987P_N439K_D614G)
aggagaaagcuuaccauguucguguuccugguccuccugccccuggugagcucccagugcgugaaccucaccacccgcacgcagcugccgcccgccuacaccaacagcuucacccggggcgucuacuaccccgacaagguguuccgcuccagcgugcugcacuccacccaggaccucuuccugcccuucuucagcaacgucacgugguuccacgccauccacguguccgggaccaacggcaccaagcgguucgacaacccggugcugcccuucaacgacggggucuacuucgcgagcaccgagaaguccaacaucauccgcggcuggaucuucgggacgacccucgacagcaagacccagucccugcugaucgugaacaacgccaccaacguggucaucaaggugugcgaguuccaguucugcaacgaccccuuccucggcguguacuaccacaagaacaacaagagcuggauggaguccgaguuccgggucuacagcuccgccaacaacugcacguucgaguacgugagccagcccuuccugauggaccuggagggcaagcaggggaacuucaagaaccuccgcgaguucguguucaagaacaucgacggcuacuucaagaucuacuccaagcacaccccgaucaaccugguccgggaccugccccagggguucagcgcccucgagccccugguggaccugcccaucggcaucaacaucacccgcuuccagacccuccuggcccugcaccgguccuaccucacgccgggggacagcagcuccggcuggaccgcgggcgccgccgccuacuacgugggguaccugcagccccgcaccuuccugcucaaguacaacgagaacggcaccaucacggacgcggucgacugcgcccuggacccccugagcgagaccaagugcacccucaaguccuucaccguggagaaggggaucuaccagacgagcaacuuccgggugcagcccaccgaguccaucguccgcuucccgaacaucaccaaccugugccccuucggcgagguguucaacgccacccgguucgccagcgucuacgccuggaaccgcaagcggaucuccaacugcguggcggacuacagcgugcuguacaacuccgccagcuucuccacguucaagugcuacggcgucagccccaccaagcucaacgaccugugcuucaccaacguguacgccgacuccuucgugauccgcggggacgagguccggcagaucgcccccggccagaccgggaagaucgccgacuacaacuacaagcugccggacgacuucacgggcugcgugaucgcguggaacagcaagaaccucgacuccaaggucgggggcaacuacaacuaccuguaccgccuguuccgcaagagcaaccucaagcccuucgagcgggacaucuccaccgagaucuaccaggccggcagcacccccugcaacgggguggagggcuucaacugcuacuucccccugcaguccuacggguuccagccgaccaacggcgugggguaccagcccuaccggguggucgugcugagcuucgagcuccugcacgcccccgccacggugugcggccccaagaaguccaccaaccuggucaagaacaagugcgugaacuucaacuucaacggccucaccgggaccggcgugcugaccgagagcaacaagaaguuccugccguuccagcaguucgggcgcgacaucgccgacacgaccgacgcgguccgcgacccccagacccuggagauccucgacaucacccccugcagcuucggcgggguguccgugaucacgccgggcaccaacaccagcaaccaggucgccgugcuguaccagggcgugaacugcaccgagguccccguggccauccacgccgaccagcugacgcccaccuggcggguguacuccaccgggagcaacgucuuccagacccgcgccggcugccucaucggggcggagcacgugaacaacuccuacgagugcgacauccccaucggcgccggcaucugcgccagcuaccagacgcagaccaacuccccgcggcgcgcccggagcguggcgucccagagcaucaucgccuacaccaugucccugggggccgagaacagcgucgccuacuccaacaacagcaucgccauccccaccaacuucacgaucuccgugaccaccgagauccugcccgugagcaugaccaagacgagcgucgacugcaccauguacaucugcggcgacuccaccgagugcagcaaccuccugcugcaguacggguccuucugcacccagcucaaccgcgcgcugacgggcaucgccguggagcaggacaagaacacccaggagguguucgcccaggucaagcagaucuacaagacgcccccgaucaaggacuucgggggcuucaacuucagccagauccugcccgaccccuccaagcccagcaagcgguccuucaucgaggaccuccuguucaacaaggugacccuggccgacgccggcuucaucaagcaguacggggacugccucggcgacaucgcggcccgcgaccugaucugcgcccagaaguucaacgggcugaccgugcucccgccccugcugaccgacgagaugaucgcccaguacaccagcgcccuccuggcgggcaccaucacguccggguggaccuucggcgccggcgccgcccugcagauccccuucgcgaugcagauggccuaccgguucaacgggaucggcgucacccagaacgugcucuacgagaaccagaagcugaucgccaaccaguucaacagcgccaucgggaagauccaggacucccugagcuccaccgccagcgcgcucggcaagcugcaggacguggucaaccagaacgcccaggcccugaacacgcucgugaagcagcuguccagcaacuucggggccaucuccagcgugcugaacgacauccucucccgccuggacccgcccgaggccgagguccagaucgaccggcugaucaccggccgccuccagagccugcagaccuacgugacccagcagcugauccgggcggccgagauccgcgccagcgccaaccucgccgcgaccaagauguccgagugcgugcugggccagagcaagcgggucgacuucugcgggaagggcuaccaccugauguccuucccccagagcgcgccccacggggugguguuccuccacgucacguacgugcccgcccaggagaagaacuucaccaccgccccggccaucugccacgacggcaaggcccacuucccccgcgagggggucuucguguccaacggcacccacugguucgugacgcagcggaacuucuacgagccccagaucaucaccaccgacaacaccuucgucagcggcaacugcgacguggugaucgggaucgucaacaacacgguguacgacccccugcagccggagcuggacuccuucaaggaggagcucgacaaguacuucaagaaccacaccagccccgacguggaccugggcgacaucuccgggaucaacgccagcgucgugaacauccagaaggagaucgaccgccugaacgagguggccaagaaccucaacgagucccugaucgaccugcaggagcucggcaaguacgagcaguacaucaaguggcccugguacaucuggcugggcuucaucgccgggcugaucgcgaucgucauggugaccaucaugcucugcugcaugaccagcugcugcuccugccugaagggcugcugcagcugcggguccugcugcaaguucgacgaggacgacagcgagccggugcugaagggcgucaagcuccacuacacgugaggacuaguuauaagacugacuagcccgaugggccucccaacgggcccuccuccccuccuugcaccgagauuaauagaucucaaaggcucuuuucagagccaccaaaaaaaaaaaaaaaaaaaaaaaaaaaaaaaaaaaaaaaaaaaaaaaaaaaaaaaaaaaaaaaaaaaaaaaaaaaaaaaaaaaaaaaaaaaaaaaaaaaaa

SEQ ID NO: 24419 - RNA, 4041 nt, Artificial Sequence
  SARS-CoV-2/Wuhan/WIV05/2019__EPI_ISL_402128 spike protein mRNA gc (1-1273)(K986P_V987P_S477N_D614G)
aggagaaagcuuaccauguucguguuccugguccuccugccccuggugagcucccagugcgugaaccucaccacccgcacgcagcugccgcccgccuacaccaacagcuucacccggggcgucuacuaccccgacaagguguuccgcuccagcgugcugcacuccacccaggaccucuuccugcccuucuucagcaacgucacgugguuccacgccauccacguguccgggaccaacggcaccaagcgguucgacaacccggugcugcccuucaacgacggggucuacuucgcgagcaccgagaaguccaacaucauccgcggcuggaucuucgggacgacccucgacagcaagacccagucccugcugaucgugaacaacgccaccaacguggucaucaaggugugcgaguuccaguucugcaacgaccccuuccucggcguguacuaccacaagaacaacaagagcuggauggaguccgaguuccgggucuacagcuccgccaacaacugcacguucgaguacgugagccagcccuuccugauggaccuggagggcaagcaggggaacuucaagaaccuccgcgaguucguguucaagaacaucgacggcuacuucaagaucuacuccaagcacaccccgaucaaccugguccgggaccugccccagggguucagcgcccucgagccccugguggaccugcccaucggcaucaacaucacccgcuuccagacccuccuggcccugcaccgguccuaccucacgccgggggacagcagcuccggcuggaccgcgggcgccgccgccuacuacgugggguaccugcagccccgcaccuuccugcucaaguacaacgagaacggcaccaucacggacgcggucgacugcgcccuggacccccugagcgagaccaagugcacccucaaguccuucaccguggagaaggggaucuaccagacgagcaacuuccgggugcagcccaccgaguccaucguccgcuucccgaacaucaccaaccugugccccuucggcgagguguucaacgccacccgguucgccagcgucuacgccuggaaccgcaagcggaucuccaacugcguggcggacuacagcgugcuguacaacuccgccagcuucuccacguucaagugcuacggcgucagccccaccaagcucaacgaccugugcuucaccaacguguacgccgacuccuucgugauccgcggggacgagguccggcagaucgcccccggccagaccgggaagaucgccgacuacaacuacaagcugccggacgacuucacgggcugcgugaucgcguggaacagcaacaaccucgacuccaaggucgggggcaacuacaacuaccuguaccgccuguuccgcaagagcaaccucaagcccuucgagcgggacaucuccaccgagaucuaccaggccggcaacacccccugcaacgggguggagggcuucaacugcuacuucccccugcagagcuacggguuccagccgaccaacggcgugggguaccagcccuaccggguggucgugcuguccuucgagcuccugcacgcccccgccacggugugcggccccaagaaguccaccaaccuggucaagaacaagugcgugaacuucaacuucaacggccucaccgggaccggcgugcugaccgagagcaacaagaaguuccugccguuccagcaguucgggcgcgacaucgccgacacgaccgacgcgguccgcgacccccagacccuggagauccucgacaucacccccugcagcuucggcggggugagcgugaucacgccgggcaccaacaccuccaaccaggucgccgugcuguaccagggcgugaacugcaccgagguccccguggccauccacgccgaccagcugacgcccaccuggcggguguacagcaccggguccaacgucuuccagacccgcgccggcugccucaucggggcggagcacgugaacaacagcuacgagugcgacauccccaucggcgccggcaucugcgccuccuaccagacgcagaccaacagcccgcggcgcgcccgguccguggcgagccaguccaucaucgccuacaccaugagccugggggccgagaacuccgucgccuacagcaacaacuccaucgccauccccaccaacuucacgaucagcgugaccaccgagauccugcccguguccaugaccaagacgagcgucgacugcaccauguacaucugcggcgacagcaccgagugcuccaaccuccugcugcaguacgggagcuucugcacccagcucaaccgcgcgcugacgggcaucgccguggagcaggacaagaacacccaggagguguucgcccaggucaagcagaucuacaagacgcccccgaucaaggacuucgggggcuucaacuucucccagauccugcccgaccccagcaagcccuccaagcggagcuucaucgaggaccuccuguucaacaaggugacccuggccgacgccggcuucaucaagcaguacggggacugccucggcgacaucgcggcccgcgaccugaucugcgcccagaaguucaacgggcugaccgugcucccgccccugcugaccgacgagaugaucgcccaguacaccuccgcccuccuggcgggcaccaucacgagcggguggaccuucggcgccggcgccgcccugcagauccccuucgcgaugcagauggccuaccgguucaacgggaucggcgucacccagaacgugcucuacgagaaccagaagcugaucgccaaccaguucaacuccgccaucgggaagauccaggacagccuguccagcaccgccuccgcgcucggcaagcugcaggacguggucaaccagaacgcccaggcccugaacacgcucgugaagcagcugagcuccaacuucggggccaucagcuccgugcugaacgacauccucagccgccuggacccgcccgaggccgagguccagaucgaccggcugaucaccggccgccuccagucccugcagaccuacgugacccagcagcugauccgggcggccgagauccgcgccagcgccaaccucgccgcgaccaagaugagcgagugcgugcugggccaguccaagcgggucgacuucugcgggaagggcuaccaccugaugagcuucccccaguccgcgccccacggggugguguuccuccacgucacguacgugcccgcccaggagaagaacuucaccaccgccccggccaucugccacgacggcaaggcccacuucccccgcgagggggucuucgugagcaacggcacccacugguucgugacgcagcggaacuucuacgagccccagaucaucaccaccgacaacaccuucgucuccggcaacugcgacguggugaucgggaucgucaacaacacgguguacgacccccugcagccggagcuggacagcuucaaggaggagcucgacaaguacuucaagaaccacaccucccccgacguggaccugggcgacaucagcgggaucaacgccuccgucgugaacauccagaaggagaucgaccgccugaacgagguggccaagaaccucaacgagagccugaucgaccugcaggagcucggcaaguacgagcaguacaucaaguggcccugguacaucuggcugggcuucaucgccgggcugaucgcgaucgucauggugaccaucaugcucugcugcaugaccuccugcugcagcugccugaagggcugcugcuccugcgggagcugcugcaaguucgacgaggacgacuccgagccggugcugaagggcgucaagcuccacuacacgugaggacuaguuauaagacugacuagcccgaugggccucccaacgggcccuccuccccuccuugcaccgagauuaauagaucucaaaggcucuuuucagagccaccaaaaaaaaaaaaaaaaaaaaaaaaaaaaaaaaaaaaaaaaaaaaaaaaaaaaaaaaaaaaaaaaaaaaaaaaaaaaaaaaaaaaaaaaaaaaaaaaaaaaa

SEQ ID NO: 24420 - RNA, 4041 nt, Artificial Sequence
  SARS-CoV-2/Wuhan/WIV05/2019__EPI_ISL_402128 spike protein mRNA gc (1-1273)(K986P_V987P_N501Y_D614G)
aggagaaagcuuaccauguucguguuccugguccuccugccccuggugagcucccagugcgugaaccucaccacccgcacgcagcugccgcccgccuacaccaacagcuucacccggggcgucuacuaccccgacaagguguuccgcuccagcgugcugcacuccacccaggaccucuuccugcccuucuucagcaacgucacgugguuccacgccauccacguguccgggaccaacggcaccaagcgguucgacaacccggugcugcccuucaacgacggggucuacuucgcgagcaccgagaaguccaacaucauccgcggcuggaucuucgggacgacccucgacagcaagacccagucccugcugaucgugaacaacgccaccaacguggucaucaaggugugcgaguuccaguucugcaacgaccccuuccucggcguguacuaccacaagaacaacaagagcuggauggaguccgaguuccgggucuacagcuccgccaacaacugcacguucgaguacgugagccagcccuuccugauggaccuggagggcaagcaggggaacuucaagaaccuccgcgaguucguguucaagaacaucgacggcuacuucaagaucuacuccaagcacaccccgaucaaccugguccgggaccugccccagggguucagcgcccucgagccccugguggaccugcccaucggcaucaacaucacccgcuuccagacccuccuggcccugcaccgguccuaccucacgccgggggacagcagcuccggcuggaccgcgggcgccgccgccuacuacgugggguaccugcagccccgcaccuuccugcucaaguacaacgagaacggcaccaucacggacgcggucgacugcgcccuggacccccugagcgagaccaagugcacccucaaguccuucaccguggagaaggggaucuaccagacgagcaacuuccgggugcagcccaccgaguccaucguccgcuucccgaacaucaccaaccugugccccuucggcgagguguucaacgccacccgguucgccagcgucuacgccuggaaccgcaagcggaucuccaacugcguggcggacuacagcgugcuguacaacuccgccagcuucuccacguucaagugcuacggcgucagccccaccaagcucaacgaccugugcuucaccaacguguacgccgacuccuucgugauccgcggggacgagguccggcagaucgcccccggccagaccgggaagaucgccgacuacaacuacaagcugccggacgacuucacgggcugcgugaucgcguggaacagcaacaaccucgacuccaaggucgggggcaacuacaacuaccuguaccgccuguuccgcaagagcaaccucaagcccuucgagcgggacaucuccaccgagaucuaccaggccggcagcacccccugcaacgggguggagggcuucaacugcuacuucccccugcaguccuacggguuccagccgaccuacggcgugggguaccagcccuaccggguggucgugcugagcuucgagcuccugcacgcccccgccacggugugcggccccaagaaguccaccaaccuggucaagaacaagugcgugaacuucaacuucaacggccucaccgggaccggcgugcugaccgagagcaacaagaaguuccugccguuccagcaguucgggcgcgacaucgccgacacgaccgacgcgguccgcgacccccagacccuggagauccucgacaucacccccugcagcuucggcgggguguccgugaucacgccgggcaccaacaccagcaaccaggucgccgugcuguaccagggcgugaacugcaccgagguccccguggccauccacgccgaccagcugacgcccaccuggcggguguacuccaccgggagcaacgucuuccagacccgcgccggcugccucaucggggcggagcacgugaacaacuccuacgagugcgacauccccaucggcgccggcaucugcgccagcuaccagacgcagaccaacuccccgcggcgcgcccggagcguggcgucccagagcaucaucgccuacaccaugucccugggggccgagaacagcgucgccuacuccaacaacagcaucgccauccccaccaacuucacgaucuccgugaccaccgagauccugcccgugagcaugaccaagacgagcgucgacugcaccauguacaucugcggcgacuccaccgagugcagcaaccuccugcugcaguacggguccuucugcacccagcucaaccgcgcgcugacgggcaucgccguggagcaggacaagaacacccaggagguguucgcccaggucaagcagaucuacaagacgcccccgaucaaggacuucgggggcuucaacuucagccagauccugcccgaccccuccaagcccagcaagcgguccuucaucgaggaccuccuguucaacaaggugacccuggccgacgccggcuucaucaagcaguacggggacugccucggcgacaucgcggcccgcgaccugaucugcgcccagaaguucaacgggcugaccgugcucccgccccugcugaccgacgagaugaucgcccaguacaccagcgcccuccuggcgggcaccaucacguccggguggaccuucggcgccggcgccgcccugcagauccccuucgcgaugcagauggccuaccgguucaacgggaucggcgucacccagaacgugcucuacgagaaccagaagcugaucgccaaccaguucaacagcgccaucgggaagauccaggacucccugagcuccaccgccagcgcgcucggcaagcugcaggacguggucaaccagaacgcccaggcccugaacacgcucgugaagcagcuguccagcaacuucggggccaucuccagcgugcugaacgacauccucucccgccuggacccgcccgaggccgagguccagaucgaccggcugaucaccggccgccuccagagccugcagaccuacgugacccagcagcugauccgggcggccgagauccgcgccagcgccaaccucgccgcgaccaagauguccgagugcgugcugggccagagcaagcgggucgacuucugcgggaagggcuaccaccugauguccuucccccagagcgcgccccacggggugguguuccuccacgucacguacgugcccgcccaggagaagaacuucaccaccgccccggccaucugccacgacggcaaggcccacuucccccgcgagggggucuucguguccaacggcacccacugguucgugacgcagcggaacuucuacgagccccagaucaucaccaccgacaacaccuucgucagcggcaacugcgacguggugaucgggaucgucaacaacacgguguacgacccccugcagccggagcuggacuccuucaaggaggagcucgacaaguacuucaagaaccacaccagccccgacguggaccugggcgacaucuccgggaucaacgccagcgucgugaacauccagaaggagaucgaccgccugaacgagguggccaagaaccucaacgagucccugaucgaccugcaggagcucggcaaguacgagcaguacaucaaguggcccugguacaucuggcugggcuucaucgccgggcugaucgcgaucgucauggugaccaucaugcucugcugcaugaccagcugcugcuccugccugaagggcugcugcagcugcggguccugcugcaaguucgacgaggacgacagcgagccggugcugaagggcgucaagcuccacuacacgugaggacuaguuauaagacugacuagcccgaugggccucccaacgggcccuccuccccuccuugcaccgagauuaauagaucucaaaggcucuuuucagagccaccaaaaaaaaaaaaaaaaaaaaaaaaaaaaaaaaaaaaaaaaaaaaaaaaaaaaaaaaaaaaaaaaaaaaaaaaaaaaaaaaaaaaaaaaaaaaaaaaaaaaa

SEQ ID NO: 24421 - RNA, 4035 nt, Artificial Sequence
  SARS-CoV-2/Wuhan/WIV05/2019__EPI_ISL_402128 spike protein mRNA gc (1-1273)(K986P_V987P_H69del_V70del_D614G)
aggagaaagcuuaccauguucguguuccugguccuccugccccuggugagcucccagugcgugaaccucaccacccgcacgcagcugccgcccgccuacaccaacagcuucacccggggcgucuacuaccccgacaagguguuccgcuccagcgugcugcacuccacccaggaccucuuccugcccuucuucagcaacgucacgugguuccacgccaucuccgggaccaacggcaccaagcgguucgacaacccggugcugcccuucaacgacgggguguacuucgcgagcaccgagaaguccaacaucauccgcggcuggaucuucgggacgacccucgacagcaagacccagucccugcugaucgucaacaacgccaccaacguggugaucaaggucugcgaguuccaguucugcaacgaccccuuccucggcguguacuaccacaagaacaacaagagcuggauggaguccgaguuccggguguacagcuccgccaacaacugcacguucgaguacgucagccagcccuuccugauggaccuggagggcaagcaggggaacuucaagaaccuccgcgaguucguguucaagaacaucgacggcuacuucaagaucuacuccaagcacaccccgaucaaccuggugcgggaccugccccagggguucagcgcccucgagccccuggucgaccugcccaucggcaucaacaucacccgcuuccagacccuccuggcccugcaccgguccuaccucacgccgggggacagcagcuccggcuggaccgcgggcgccgccgccuacuacgugggguaccugcagccccgcaccuuccugcucaaguacaacgagaacggcaccaucacggacgcgguggacugcgcccuggacccccugagcgagaccaagugcacccucaaguccuucaccgucgagaaggggaucuaccagacgagcaacuuccgggugcagcccaccgaguccaucgugcgcuucccgaacaucaccaaccugugccccuucggcgaggucuucaacgccacccgguucgccagcguguacgccuggaaccgcaagcggaucuccaacugcgucgcggacuacagcgugcuguacaacuccgccagcuucuccacguucaagugcuacggcgugagccccaccaagcucaacgaccugugcuucaccaacgucuacgccgacuccuucgugauccgcggggacgaggugcggcagaucgcccccggccagaccgggaagaucgccgacuacaacuacaagcugccggacgacuucacgggcugcgucaucgcguggaacagcaacaaccucgacuccaaggucgggggcaacuacaacuaccuguaccgccuguuccgcaagagcaaccucaagcccuucgagcgggacaucuccaccgagaucuaccaggccggcagcacccccugcaacgggguggagggcuucaacugcuacuucccccugcaguccuacggguuccagccgaccaacggcgugggguaccagcccuaccggguggugguccugagcuucgagcuccugcacgcccccgccacggugugcggccccaagaaguccaccaaccuggugaagaacaagugcgucaacuucaacuucaacggccucaccgggaccggcgugcugaccgagagcaacaagaaguuccugccguuccagcaguucgggcgcgacaucgccgacacgaccgacgcggugcgcgacccccagacccuggagauccucgacaucacccccugcagcuucggcggggucuccgugaucacgccgggcaccaacaccagcaaccagguggccguccuguaccagggcgugaacugcaccgaggugcccgucgccauccacgccgaccagcugacgcccaccuggcggguguacuccaccgggagcaacguguuccagacccgcgccggcugccucaucggggcggagcacgucaacaacuccuacgagugcgacauccccaucggcgccggcaucugcgccagcuaccagacgcagaccaacuccccgcggcgcgcccggagcguggcgucccagagcaucaucgccuacaccaugucccugggggccgagaacagcguggccuacuccaacaacagcaucgccauccccaccaacuucacgaucuccgucaccaccgagauccugcccgugagcaugaccaagacgagcguggacugcaccauguacaucugcggcgacuccaccgagugcagcaaccuccugcugcaguacggguccuucugcacccagcucaaccgcgcgcugacgggcaucgccgucgagcaggacaagaacacccaggagguguucgcccaggugaagcagaucuacaagacgcccccgaucaaggacuucgggggcuucaacuucagccagauccugcccgaccccuccaagcccagcaagcgguccuucaucgaggaccuccuguucaacaaggucacccuggccgacgccggcuucaucaagcaguacggggacugccucggcgacaucgcggcccgcgaccugaucugcgcccagaaguucaacgggcugaccgugcucccgccccugcugaccgacgagaugaucgcccaguacaccagcgcccuccuggcgggcaccaucacguccggguggaccuucggcgccggcgccgcccugcagauccccuucgcgaugcagauggccuaccgguucaacgggaucggcgugacccagaacguccucuacgagaaccagaagcugaucgccaaccaguucaacagcgccaucgggaagauccaggacucccugagcuccaccgccagcgcgcucggcaagcugcaggacguggugaaccagaacgcccaggcccugaacacgcucgucaagcagcuguccagcaacuucggggccaucuccagcgugcugaacgacauccucucccgccuggacccgcccgaggccgaggugcagaucgaccggcugaucaccggccgccuccagagccugcagaccuacgucacccagcagcugauccgggcggccgagauccgcgccagcgccaaccucgccgcgaccaagauguccgagugcgugcugggccagagcaagcggguggacuucugcgggaagggcuaccaccugauguccuucccccagagcgcgccccacggggucguguuccuccacgugacguacguccccgcccaggagaagaacuucaccaccgccccggccaucugccacgacggcaaggcccacuucccccgcgaggggguguucgucuccaacggcacccacugguucgugacgcagcggaacuucuacgagccccagaucaucaccaccgacaacaccuucgugagcggcaacugcgacgucgugaucgggaucgugaacaacacggucuacgacccccugcagccggagcuggacuccuucaaggaggagcucgacaaguacuucaagaaccacaccagccccgacguggaccugggcgacaucuccgggaucaacgccagcguggucaacauccagaaggagaucgaccgccugaacgagguggccaagaaccucaacgagucccugaucgaccugcaggagcucggcaaguacgagcaguacaucaaguggcccugguacaucuggcugggcuucaucgccgggcugaucgcgaucgugauggucaccaucaugcucugcugcaugaccagcugcugcuccugccugaagggcugcugcagcugcggguccugcugcaaguucgacgaggacgacagcgagccggugcugaagggcgugaagcuccacuacacgugaggacuaguuauaagacugacuagcccgaugggccucccaacgggcccuccuccccuccuugcaccgagauuaauagaucucaaaggcucuuuucagagccaccaaaaaaaaaaaaaaaaaaaaaaaaaaaaaaaaaaaaaaaaaaaaaaaaaaaaaaaaaaaaaaaaaaaaaaaaaaaaaaaaaaaaaaaaaaaaaaaaaaaaa

SEQ ID NO: 24422 - RNA, 4041 nt, Artificial Sequence
  SARS-CoV-2/Wuhan/WIV05/2019__EPI_ISL_402128 spike protein mRNA gc (1-1273)(K986P_V987P_Y453F_D614G)
aggagaaagcuuaccauguucguguuccugguccuccugccccuggugagcucccagugcgugaaccucaccacccgcacgcagcugccgcccgccuacaccaacagcuucacccggggcgucuacuaccccgacaagguguuccgcuccagcgugcugcacuccacccaggaccucuuccugcccuucuucagcaacgucacgugguuccacgccauccacguguccgggaccaacggcaccaagcgguucgacaacccggugcugcccuucaacgacggggucuacuucgcgagcaccgagaaguccaacaucauccgcggcuggaucuucgggacgacccucgacagcaagacccagucccugcugaucgugaacaacgccaccaacguggucaucaaggugugcgaguuccaguucugcaacgaccccuuccucggcguguacuaccacaagaacaacaagagcuggauggaguccgaguuccgggucuacagcuccgccaacaacugcacguucgaguacgugagccagcccuuccugauggaccuggagggcaagcaggggaacuucaagaaccuccgcgaguucguguucaagaacaucgacggcuacuucaagaucuacuccaagcacaccccgaucaaccugguccgggaccugccccagggguucagcgcccucgagccccugguggaccugcccaucggcaucaacaucacccgcuuccagacccuccuggcccugcaccgguccuaccucacgccgggggacagcagcuccggcuggaccgcgggcgccgccgccuacuacgugggguaccugcagccccgcaccuuccugcucaaguacaacgagaacggcaccaucacggacgcggucgacugcgcccuggacccccugagcgagaccaagugcacccucaaguccuucaccguggagaaggggaucuaccagacgagcaacuuccgggugcagcccaccgaguccaucguccgcuucccgaacaucaccaaccugugccccuucggcgagguguucaacgccacccgguucgccagcgucuacgccuggaaccgcaagcggaucuccaacugcguggcggacuacagcgugcuguacaacuccgccagcuucuccacguucaagugcuacggcgucagccccaccaagcucaacgaccugugcuucaccaacguguacgccgacuccuucgugauccgcggggacgagguccggcagaucgcccccggccagaccgggaagaucgccgacuacaacuacaagcugccggacgacuucacgggcugcgugaucgcguggaacagcaacaaccucgacuccaaggucgggggcaacuacaacuaccuguuccgccuguuccgcaagagcaaccucaagcccuucgagcgggacaucuccaccgagaucuaccaggccggcagcacccccugcaacgggguggagggcuucaacugcuacuucccccugcaguccuacggguuccagccgaccaacggcgugggguaccagcccuaccggguggucgugcugagcuucgagcuccugcacgcccccgccacggugugcggccccaagaaguccaccaaccuggucaagaacaagugcgugaacuucaacuucaacggccucaccgggaccggcgugcugaccgagagcaacaagaaguuccugccguuccagcaguucgggcgcgacaucgccgacacgaccgacgcgguccgcgacccccagacccuggagauccucgacaucacccccugcagcuucggcgggguguccgugaucacgccgggcaccaacaccagcaaccaggucgccgugcuguaccagggcgugaacugcaccgagguccccguggccauccacgccgaccagcugacgcccaccuggcggguguacuccaccgggagcaacgucuuccagacccgcgccggcugccucaucggggcggagcacgugaacaacuccuacgagugcgacauccccaucggcgccggcaucugcgccagcuaccagacgcagaccaacuccccgcggcgcgcccggagcguggcgucccagagcaucaucgccuacaccaugucccugggggccgagaacagcgucgccuacuccaacaacagcaucgccauccccaccaacuucacgaucuccgugaccaccgagauccugcccgugagcaugaccaagacgagcgucgacugcaccauguacaucugcggcgacuccaccgagugcagcaaccuccugcugcaguacggguccuucugcacccagcucaaccgcgcgcugacgggcaucgccguggagcaggacaagaacacccaggagguguucgcccaggucaagcagaucuacaagacgcccccgaucaaggacuucgggggcuucaacuucagccagauccugcccgaccccuccaagcccagcaagcgguccuucaucgaggaccuccuguucaacaaggugacccuggccgacgccggcuucaucaagcaguacggggacugccucggcgacaucgcggcccgcgaccugaucugcgcccagaaguucaacgggcugaccgugcucccgccccugcugaccgacgagaugaucgcccaguacaccagcgcccuccuggcgggcaccaucacguccggguggaccuucggcgccggcgccgcccugcagauccccuucgcgaugcagauggccuaccgguucaacgggaucggcgucacccagaacgugcucuacgagaaccagaagcugaucgccaaccaguucaacagcgccaucgggaagauccaggacucccugagcuccaccgccagcgcgcucggcaagcugcaggacguggucaaccagaacgcccaggcccugaacacgcucgugaagcagcuguccagcaacuucggggccaucuccagcgugcugaacgacauccucucccgccuggacccgcccgaggccgagguccagaucgaccggcugaucaccggccgccuccagagccugcagaccuacgugacccagcagcugauccgggcggccgagauccgcgccagcgccaaccucgccgcgaccaagauguccgagugcgugcugggccagagcaagcgggucgacuucugcgggaagggcuaccaccugauguccuucccccagagcgcgccccacggggugguguuccuccacgucacguacgugcccgcccaggagaagaacuucaccaccgccccggccaucugccacgacggcaaggcccacuucccccgcgagggggucuucguguccaacggcacccacugguucgugacgcagcggaacuucuacgagccccagaucaucaccaccgacaacaccuucgucagcggcaacugcgacguggugaucgggaucgucaacaacacgguguacgacccccugcagccggagcuggacuccuucaaggaggagcucgacaaguacuucaagaaccacaccagccccgacguggaccugggcgacaucuccgggaucaacgccagcgucgugaacauccagaaggagaucgaccgccugaacgagguggccaagaaccucaacgagucccugaucgaccugcaggagcucggcaaguacgagcaguacaucaaguggcccugguacaucuggcugggcuucaucgccgggcugaucgcgaucgucauggugaccaucaugcucugcugcaugaccagcugcugcuccugccugaagggcugcugcagcugcggguccugcugcaaguucgacgaggacgacagcgagccggugcugaagggcgucaagcuccacuacacgugaggacuaguuauaagacugacuagcccgaugggccucccaacgggcccuccuccccuccuugcaccgagauuaauagaucucaaaggcucuuuucagagccaccaaaaaaaaaaaaaaaaaaaaaaaaaaaaaaaaaaaaaaaaaaaaaaaaaaaaaaaaaaaaaaaaaaaaaaaaaaaaaaaaaaaaaaaaaaaaaaaaaaaaa

SEQ ID NO: 24423 - RNA, 4041 nt, Artificial Sequence
  SARS-CoV-2/Wuhan/WIV05/2019__EPI_ISL_402128 spike protein mRNA gc (1-1273)(K986P_V987P_D614G_I692V)
aggagaaagcuuaccauguucguguuccugguccuccugccccuggugagcucccagugcgugaaccucaccacccgcacgcagcugccgcccgccuacaccaacagcuucacccggggcgucuacuaccccgacaagguguuccgcuccagcgugcugcacuccacccaggaccucuuccugcccuucuucagcaacgucacgugguuccacgccauccacguguccgggaccaacggcaccaagcgguucgacaacccggugcugcccuucaacgacggggucuacuucgcgagcaccgagaaguccaacaucauccgcggcuggaucuucgggacgacccucgacagcaagacccagucccugcugaucgugaacaacgccaccaacguggucaucaaggugugcgaguuccaguucugcaacgaccccuuccucggcguguacuaccacaagaacaacaagagcuggauggaguccgaguuccgggucuacagcuccgccaacaacugcacguucgaguacgugagccagcccuuccugauggaccuggagggcaagcaggggaacuucaagaaccuccgcgaguucguguucaagaacaucgacggcuacuucaagaucuacuccaagcacaccccgaucaaccugguccgggaccugccccagggguucagcgcccucgagccccugguggaccugcccaucggcaucaacaucacccgcuuccagacccuccuggcccugcaccgguccuaccucacgccgggggacagcagcuccggcuggaccgcgggcgccgccgccuacuacgugggguaccugcagccccgcaccuuccugcucaaguacaacgagaacggcaccaucacggacgcggucgacugcgcccuggacccccugagcgagaccaagugcacccucaaguccuucaccguggagaaggggaucuaccagacgagcaacuuccgggugcagcccaccgaguccaucguccgcuucccgaacaucaccaaccugugccccuucggcgagguguucaacgccacccgguucgccagcgucuacgccuggaaccgcaagcggaucuccaacugcguggcggacuacagcgugcuguacaacuccgccagcuucuccacguucaagugcuacggcgucagccccaccaagcucaacgaccugugcuucaccaacguguacgccgacuccuucgugauccgcggggacgagguccggcagaucgcccccggccagaccgggaagaucgccgacuacaacuacaagcugccggacgacuucacgggcugcgugaucgcguggaacagcaacaaccucgacuccaaggucgggggcaacuacaacuaccuguaccgccuguuccgcaagagcaaccucaagcccuucgagcgggacaucuccaccgagaucuaccaggccggcagcacccccugcaacgggguggagggcuucaacugcuacuucccccugcaguccuacggguuccagccgaccaacggcgugggguaccagcccuaccggguggucgugcugagcuucgagcuccugcacgcccccgccacggugugcggccccaagaaguccaccaaccuggucaagaacaagugcgugaacuucaacuucaacggccucaccgggaccggcgugcugaccgagagcaacaagaaguuccugccguuccagcaguucgggcgcgacaucgccgacacgaccgacgcgguccgcgacccccagacccuggagauccucgacaucacccccugcagcuucggcgggguguccgugaucacgccgggcaccaacaccagcaaccaggucgccgugcuguaccagggcgugaacugcaccgagguccccguggccauccacgccgaccagcugacgcccaccuggcggguguacuccaccgggagcaacgucuuccagacccgcgccggcugccucaucggggcggagcacgugaacaacuccuacgagugcgacauccccaucggcgccggcaucugcgccagcuaccagacgcagaccaacuccccgcggcgcgcccggagcguggcgucccagagcgucaucgccuacaccaugucccugggggccgagaacagcguggccuacuccaacaacagcaucgccauccccaccaacuucacgaucuccgugaccaccgagauccugcccgucagcaugaccaagacgagcguggacugcaccauguacaucugcggcgacuccaccgagugcagcaaccuccugcugcaguacggguccuucugcacccagcucaaccgcgcgcugacgggcaucgccguggagcaggacaagaacacccaggaggucuucgcccaggugaagcagaucuacaagacgcccccgaucaaggacuucgggggcuucaacuucagccagauccugcccgaccccuccaagcccagcaagcgguccuucaucgaggaccuccuguucaacaaggugacccuggccgacgccggcuucaucaagcaguacggggacugccucggcgacaucgcggcccgcgaccugaucugcgcccagaaguucaacgggcugaccguccucccgccccugcugaccgacgagaugaucgcccaguacaccagcgcccuccuggcgggcaccaucacguccggguggaccuucggcgccggcgccgcccugcagauccccuucgcgaugcagauggccuaccgguucaacgggaucggcgugacccagaacgugcucuacgagaaccagaagcugaucgccaaccaguucaacagcgccaucgggaagauccaggacucccugagcuccaccgccagcgcgcucggcaagcugcaggacgucgugaaccagaacgcccaggcccugaacacgcucgugaagcagcuguccagcaacuucggggccaucuccagcguccugaacgacauccucucccgccuggacccgcccgaggccgaggugcagaucgaccggcugaucaccggccgccuccagagccugcagaccuacgugacccagcagcugauccgggcggccgagauccgcgccagcgccaaccucgccgcgaccaagauguccgagugcguccugggccagagcaagcggguggacuucugcgggaagggcuaccaccugauguccuucccccagagcgcgccccacgggguggucuuccuccacgugacguacguccccgcccaggagaagaacuucaccaccgccccggccaucugccacgacggcaaggcccacuucccccgcgaggggguguucguguccaacggcacccacugguucgucacgcagcggaacuucuacgagccccagaucaucaccaccgacaacaccuucgugagcggcaacugcgacguggucaucgggaucgugaacaacacgguguacgacccccugcagccggagcuggacuccuucaaggaggagcucgacaaguacuucaagaaccacaccagccccgacgucgaccugggcgacaucuccgggaucaacgccagcguggugaacauccagaaggagaucgaccgccugaacgaggucgccaagaaccucaacgagucccugaucgaccugcaggagcucggcaaguacgagcaguacaucaaguggcccugguacaucuggcugggcuucaucgccgggcugaucgcgaucgugauggugaccaucaugcucugcugcaugaccagcugcugcuccugccugaagggcugcugcagcugcggguccugcugcaaguucgacgaggacgacagcgagccgguccugaagggcgugaagcuccacuacacgugaggacuaguuauaagacugacuagcccgaugggccucccaacgggcccuccuccccuccuugcaccgagauuaauagaucucaaaggcucuuuucagagccaccaaaaaaaaaaaaaaaaaaaaaaaaaaaaaaaaaaaaaaaaaaaaaaaaaaaaaaaaaaaaaaaaaaaaaaaaaaaaaaaaaaaaaaaaaaaaaaaaaaaaa

SEQ ID NO: 24424 - RNA, 4041 nt, Artificial Sequence
  SARS-CoV-2/Wuhan/WIV05/2019__EPI_ISL_402128 spike protein mRNA gc (1-1273)(K986P_V987P_D614G_M1229I)
aggagaaagcuuaccauguucguguuccugguccuccugccccuggugagcucccagugcgugaaccucaccacccgcacgcagcugccgcccgccuacaccaacagcuucacccggggcgucuacuaccccgacaagguguuccgcuccagcgugcugcacuccacccaggaccucuuccugcccuucuucagcaacgucacgugguuccacgccauccacguguccgggaccaacggcaccaagcgguucgacaacccggugcugcccuucaacgacggggucuacuucgcgagcaccgagaaguccaacaucauccgcggcuggaucuucgggacgacccucgacagcaagacccagucccugcugaucgugaacaacgccaccaacguggucaucaaggugugcgaguuccaguucugcaacgaccccuuccucggcguguacuaccacaagaacaacaagagcuggauggaguccgaguuccgggucuacagcuccgccaacaacugcacguucgaguacgugagccagcccuuccugauggaccuggagggcaagcaggggaacuucaagaaccuccgcgaguucguguucaagaacaucgacggcuacuucaagaucuacuccaagcacaccccgaucaaccugguccgggaccugccccagggguucagcgcccucgagccccugguggaccugcccaucggcaucaacaucacccgcuuccagacccuccuggcccugcaccgguccuaccucacgccgggggacagcagcuccggcuggaccgcgggcgccgccgccuacuacgugggguaccugcagccccgcaccuuccugcucaaguacaacgagaacggcaccaucacggacgcggucgacugcgcccuggacccccugagcgagaccaagugcacccucaaguccuucaccguggagaaggggaucuaccagacgagcaacuuccgggugcagcccaccgaguccaucguccgcuucccgaacaucaccaaccugugccccuucggcgagguguucaacgccacccgguucgccagcgucuacgccuggaaccgcaagcggaucuccaacugcguggcggacuacagcgugcuguacaacuccgccagcuucuccacguucaagugcuacggcgucagccccaccaagcucaacgaccugugcuucaccaacguguacgccgacuccuucgugauccgcggggacgagguccggcagaucgcccccggccagaccgggaagaucgccgacuacaacuacaagcugccggacgacuucacgggcugcgugaucgcguggaacagcaacaaccucgacuccaaggucgggggcaacuacaacuaccuguaccgccuguuccgcaagagcaaccucaagcccuucgagcgggacaucuccaccgagaucuaccaggccggcagcacccccugcaacgggguggagggcuucaacugcuacuucccccugcaguccuacggguuccagccgaccaacggcgugggguaccagcccuaccggguggucgugcugagcuucgagcuccugcacgcccccgccacggugugcggccccaagaaguccaccaaccuggucaagaacaagugcgugaacuucaacuucaacggccucaccgggaccggcgugcugaccgagagcaacaagaaguuccugccguuccagcaguucgggcgcgacaucgccgacacgaccgacgcgguccgcgacccccagacccuggagauccucgacaucacccccugcagcuucggcgggguguccgugaucacgccgggcaccaacaccagcaaccaggucgccgugcuguaccagggcgugaacugcaccgagguccccguggccauccacgccgaccagcugacgcccaccuggcggguguacuccaccgggagcaacgucuuccagacccgcgccggcugccucaucggggcggagcacgugaacaacuccuacgagugcgacauccccaucggcgccggcaucugcgccagcuaccagacgcagaccaacuccccgcggcgcgcccggagcguggcgucccagagcaucaucgccuacaccaugucccugggggccgagaacagcgucgccuacuccaacaacagcaucgccauccccaccaacuucacgaucuccgugaccaccgagauccugcccgugagcaugaccaagacgagcgucgacugcaccauguacaucugcggcgacuccaccgagugcagcaaccuccugcugcaguacggguccuucugcacccagcucaaccgcgcgcugacgggcaucgccguggagcaggacaagaacacccaggagguguucgcccaggucaagcagaucuacaagacgcccccgaucaaggacuucgggggcuucaacuucagccagauccugcccgaccccuccaagcccagcaagcgguccuucaucgaggaccuccuguucaacaaggugacccuggccgacgccggcuucaucaagcaguacggggacugccucggcgacaucgcggcccgcgaccugaucugcgcccagaaguucaacgggcugaccgugcucccgccccugcugaccgacgagaugaucgcccaguacaccagcgcccuccuggcgggcaccaucacguccggguggaccuucggcgccggcgccgcccugcagauccccuucgcgaugcagauggccuaccgguucaacgggaucggcgucacccagaacgugcucuacgagaaccagaagcugaucgccaaccaguucaacagcgccaucgggaagauccaggacucccugagcuccaccgccagcgcgcucggcaagcugcaggacguggucaaccagaacgcccaggcccugaacacgcucgugaagcagcuguccagcaacuucggggccaucuccagcgugcugaacgacauccucucccgccuggacccgcccgaggccgagguccagaucgaccggcugaucaccggccgccuccagagccugcagaccuacgugacccagcagcugauccgggcggccgagauccgcgccagcgccaaccucgccgcgaccaagauguccgagugcgugcugggccagagcaagcgggucgacuucugcgggaagggcuaccaccugauguccuucccccagagcgcgccccacggggugguguuccuccacgucacguacgugcccgcccaggagaagaacuucaccaccgccccggccaucugccacgacggcaaggcccacuucccccgcgagggggucuucguguccaacggcacccacugguucgugacgcagcggaacuucuacgagccccagaucaucaccaccgacaacaccuucgucagcggcaacugcgacguggugaucgggaucgucaacaacacgguguacgacccccugcagccggagcuggacuccuucaaggaggagcucgacaaguacuucaagaaccacaccagccccgacguggaccugggcgacaucuccgggaucaacgccagcgucgugaacauccagaaggagaucgaccgccugaacgagguggccaagaaccucaacgagucccugaucgaccugcaggagcucggcaaguacgagcaguacaucaaguggcccugguacaucuggcugggcuucaucgccgggcugaucgcgaucgucaucgugaccaucaugcucugcugcaugaccagcugcugcuccugccugaagggcugcugcagcugcggguccugcugcaaguucgacgaggacgacagcgagccggugcugaagggcgucaagcuccacuacacgugaggacuaguuauaagacugacuagcccgaugggccucccaacgggcccuccuccccuccuugcaccgagauuaauagaucucaaaggcucuuuucagagccaccaaaaaaaaaaaaaaaaaaaaaaaaaaaaaaaaaaaaaaaaaaaaaaaaaaaaaaaaaaaaaaaaaaaaaaaaaaaaaaaaaaaaaaaaaaaaaaaaaaaaa

SEQ ID NO: 24425 - RNA, 4035 nt, Artificial Sequence
  SARS-CoV-2/Wuhan/WIV05/2019__EPI_ISL_402128 spike protein mRNA gc (1-1273)(K986P_V987P_H69del_V70del_A222V_Y453F_S477N_D614G_I692V)
aggagaaagcuuaccauguucguguuccugguccuccugccccuggugagcucccagugcgugaaccucaccacccgcacgcagcugccgcccgccuacaccaacagcuucacccggggcgucuacuaccccgacaagguguuccgcuccagcgugcugcacuccacccaggaccucuuccugcccuucuucagcaacgucacgugguuccacgccaucuccgggaccaacggcaccaagcgguucgacaacccggugcugcccuucaacgacgggguguacuucgcgagcaccgagaaguccaacaucauccgcggcuggaucuucgggacgacccucgacagcaagacccagucccugcugaucgucaacaacgccaccaacguggugaucaaggucugcgaguuccaguucugcaacgaccccuuccucggcguguacuaccacaagaacaacaagagcuggauggaguccgaguuccggguguacagcuccgccaacaacugcacguucgaguacgucagccagcccuuccugauggaccuggagggcaagcaggggaacuucaagaaccuccgcgaguucguguucaagaacaucgacggcuacuucaagaucuacuccaagcacaccccgaucaaccuggugcgggaccugccccagggguucagcguccucgagccccugguggaccugcccaucggcaucaacaucacccgcuuccagacccuccuggcccugcaccgguccuaccucacgccgggggacagcagcuccggcuggaccgccggcgcggccgccuacuacgugggguaccugcagccccgcaccuuccugcucaaguacaacgagaacggcaccaucacggacgccgucgacugcgcgcuggacccccugagcgagaccaagugcacccucaaguccuucaccguggagaaggggaucuaccagacgagcaacuuccgggugcagcccaccgaguccaucguccgcuucccgaacaucaccaaccugugccccuucggcgagguguucaacgccacccgguucgccagcgucuacgccuggaaccgcaagcggaucuccaacugcguggccgacuacagcgugcuguacaacuccgcgagcuucuccacguucaagugcuacggcgucagccccaccaagcucaacgaccugugcuucaccaacguguacgccgacuccuucgugauccgcggggacgagguccggcagaucgcccccggccagaccgggaagaucgccgacuacaacuacaagcugccggacgacuucacgggcugcgugaucgccuggaacagcaacaaccucgacuccaaggucgggggcaacuacaacuaccuguuccgccuguuccgcaagagcaaccucaagcccuucgagcgggacaucuccaccgagaucuaccaggcgggcaacacccccugcaacgggguggagggcuucaacugcuacuucccccugcagagcuacggguuccagccgaccaacggcgugggguaccagcccuaccggguggucgugcuguccuucgagcuccugcacgcccccgccacggugugcggccccaagaaguccaccaaccuggucaagaacaagugcgugaacuucaacuucaacggccucaccgggaccggcgugcugaccgagagcaacaagaaguuccugccguuccagcaguucgggcgcgacaucgccgacacgaccgacgccguccgcgacccccagacccuggagauccucgacaucacccccugcagcuucggcggggugagcgugaucacgccgggcaccaacaccuccaaccaggucgcggugcuguaccagggcgugaacugcaccgagguccccguggccauccacgccgaccagcugacgcccaccuggcggguguacagcaccggguccaacgucuuccagacccgcgccggcugccucaucggggccgagcacgugaacaacagcuacgagugcgacauccccaucggcgcgggcaucugcgccuccuaccagacgcagaccaacagcccgcggcgcgcccgguccguggccagccaguccgucaucgcguacaccaugagccugggggccgagaacuccguggccuacagcaacaacuccaucgccauccccaccaacuucacgaucagcgugaccaccgagauccugcccgucuccaugaccaagacgagcguggacugcaccauguacaucugcggcgacagcaccgagugcuccaaccuccugcugcaguacgggagcuucugcacccagcucaaccgcgcccugacgggcaucgcgguggagcaggacaagaacacccaggaggucuucgcccaggugaagcagaucuacaagacgcccccgaucaaggacuucgggggcuucaacuucucccagauccugcccgaccccagcaagcccuccaagcggagcuucaucgaggaccuccuguucaacaaggugacccuggccgacgccggcuucaucaagcaguacggggacugccucggcgacaucgccgcgcgcgaccugaucugcgcccagaaguucaacgggcugaccguccucccgccccugcugaccgacgagaugaucgcccaguacaccuccgcccuccuggccggcaccaucacgagcggguggaccuucggcgcgggcgccgcccugcagauccccuucgccaugcagauggcguaccgguucaacgggaucggcgugacccagaacgugcucuacgagaaccagaagcugaucgccaaccaguucaacuccgccaucgggaagauccaggacagccuguccagcaccgccuccgcccucggcaagcugcaggacgucgugaaccagaacgcgcaggcccugaacacgcucgugaagcagcugagcuccaacuucggggccaucagcuccguccugaacgacauccucagccgccuggacccgcccgaggccgaggugcagaucgaccggcugaucaccggccgccuccagucccugcagaccuacgugacccagcagcugauccgggccgcggagauccgcgccagcgccaaccucgccgccaccaagaugagcgagugcguccugggccaguccaagcggguggacuucugcgggaagggcuaccaccugaugagcuucccccaguccgcgccccacgggguggucuuccuccacgugacguacguccccgcccaggagaagaacuucaccaccgccccggccaucugccacgacggcaaggcgcacuucccccgcgaggggguguucgugagcaacggcacccacugguucgucacgcagcggaacuucuacgagccccagaucaucaccaccgacaacaccuucguguccggcaacugcgacguggucaucgggaucgugaacaacacgguguacgacccccugcagccggagcuggacagcuucaaggaggagcucgacaaguacuucaagaaccacaccucccccgacgucgaccugggcgacaucagcgggaucaacgccuccguggugaacauccagaaggagaucgaccgccugaacgaggucgccaagaaccucaacgagagccugaucgaccugcaggagcucggcaaguacgagcaguacaucaaguggcccugguacaucuggcugggcuucaucgccgggcugaucgccaucgugauggugaccaucaugcucugcugcaugaccuccugcugcagcugccugaagggcugcugcuccugcgggagcugcugcaaguucgacgaggacgacuccgagccgguccugaagggcgugaagcuccacuacacgugaggacuaguuauaagacugacuagcccgaugggccucccaacgggcccuccuccccuccuugcaccgagauuaauagaucucaaaggcucuuuucagagccaccaaaaaaaaaaaaaaaaaaaaaaaaaaaaaaaaaaaaaaaaaaaaaaaaaaaaaaaaaaaaaaaaaaaaaaaaaaaaaaaaaaaaaaaaaaaaaaaaaaaaa

SEQ ID NO: 24426 - RNA, 4035 nt, Artificial Sequence
  SARS-CoV-2/Wuhan/WIV05/2019__EPI_ISL_402128 spike protein mRNA gc (1-1273)(K986P_V987P_H69del_V70del_Y453F_D614G_I692V_M1229I)
aggagaaagcuuaccauguucguguuccugguccuccugccccuggugagcucccagugcgugaaccucaccacccgcacgcagcugccgcccgccuacaccaacagcuucacccggggcgucuacuaccccgacaagguguuccgcuccagcgugcugcacuccacccaggaccucuuccugcccuucuucagcaacgucacgugguuccacgccaucuccgggaccaacggcaccaagcgguucgacaacccggugcugcccuucaacgacgggguguacuucgcgagcaccgagaaguccaacaucauccgcggcuggaucuucgggacgacccucgacagcaagacccagucccugcugaucgucaacaacgccaccaacguggugaucaaggucugcgaguuccaguucugcaacgaccccuuccucggcguguacuaccacaagaacaacaagagcuggauggaguccgaguuccggguguacagcuccgccaacaacugcacguucgaguacgucagccagcccuuccugauggaccuggagggcaagcaggggaacuucaagaaccuccgcgaguucguguucaagaacaucgacggcuacuucaagaucuacuccaagcacaccccgaucaaccuggugcgggaccugccccagggguucagcgcccucgagccccuggucgaccugcccaucggcaucaacaucacccgcuuccagacccuccuggcccugcaccgguccuaccucacgccgggggacagcagcuccggcuggaccgcgggcgccgccgccuacuacgugggguaccugcagccccgcaccuuccugcucaaguacaacgagaacggcaccaucacggacgcgguggacugcgcccuggacccccugagcgagaccaagugcacccucaaguccuucaccgucgagaaggggaucuaccagacgagcaacuuccgggugcagcccaccgaguccaucgugcgcuucccgaacaucaccaaccugugccccuucggcgaggucuucaacgccacccgguucgccagcguguacgccuggaaccgcaagcggaucuccaacugcgucgcggacuacagcgugcuguacaacuccgccagcuucuccacguucaagugcuacggcgugagccccaccaagcucaacgaccugugcuucaccaacgucuacgccgacuccuucgugauccgcggggacgaggugcggcagaucgcccccggccagaccgggaagaucgccgacuacaacuacaagcugccggacgacuucacgggcugcgucaucgcguggaacagcaacaaccucgacuccaaggucgggggcaacuacaacuaccuguuccgccuguuccgcaagagcaaccucaagcccuucgagcgggacaucuccaccgagaucuaccaggccggcagcacccccugcaacgggguggagggcuucaacugcuacuucccccugcaguccuacggguuccagccgaccaacggcgugggguaccagcccuaccggguggugguccugagcuucgagcuccugcacgcccccgccacggugugcggccccaagaaguccaccaaccuggugaagaacaagugcgucaacuucaacuucaacggccucaccgggaccggcgugcugaccgagagcaacaagaaguuccugccguuccagcaguucgggcgcgacaucgccgacacgaccgacgcggugcgcgacccccagacccuggagauccucgacaucacccccugcagcuucggcggggucuccgugaucacgccgggcaccaacaccagcaaccagguggccguccuguaccagggcgugaacugcaccgaggugcccgucgccauccacgccgaccagcugacgcccaccuggcggguguacuccaccgggagcaacguguuccagacccgcgccggcugccucaucggggcggagcacgucaacaacuccuacgagugcgacauccccaucggcgccggcaucugcgccagcuaccagacgcagaccaacuccccgcggcgcgcccggagcguggcgucccagagcgugaucgccuacaccaugucccugggggccgagaacagcgucgccuacuccaacaacagcaucgccauccccaccaacuucacgaucuccgugaccaccgagauccugcccgugagcaugaccaagacgagcgucgacugcaccauguacaucugcggcgacuccaccgagugcagcaaccuccugcugcaguacggguccuucugcacccagcucaaccgcgcgcugacgggcaucgccguggagcaggacaagaacacccaggagguguucgcccaggucaagcagaucuacaagacgcccccgaucaaggacuucgggggcuucaacuucagccagauccugcccgaccccuccaagcccagcaagcgguccuucaucgaggaccuccuguucaacaaggugacccuggccgacgccggcuucaucaagcaguacggggacugccucggcgacaucgcggcccgcgaccugaucugcgcccagaaguucaacgggcugaccgugcucccgccccugcugaccgacgagaugaucgcccaguacaccagcgcccuccuggcgggcaccaucacguccggguggaccuucggcgccggcgccgcccugcagauccccuucgcgaugcagauggccuaccgguucaacgggaucggcgucacccagaacgugcucuacgagaaccagaagcugaucgccaaccaguucaacagcgccaucgggaagauccaggacucccugagcuccaccgccagcgcgcucggcaagcugcaggacguggucaaccagaacgcccaggcccugaacacgcucgugaagcagcuguccagcaacuucggggccaucuccagcgugcugaacgacauccucucccgccuggacccgcccgaggccgagguccagaucgaccggcugaucaccggccgccuccagagccugcagaccuacgugacccagcagcugauccgggcggccgagauccgcgccagcgccaaccucgccgcgaccaagauguccgagugcgugcugggccagagcaagcgggucgacuucugcgggaagggcuaccaccugauguccuucccccagagcgcgccccacggggugguguuccuccacgucacguacgugcccgcccaggagaagaacuucaccaccgccccggccaucugccacgacggcaaggcccacuucccccgcgagggggucuucguguccaacggcacccacugguucgugacgcagcggaacuucuacgagccccagaucaucaccaccgacaacaccuucgucagcggcaacugcgacguggugaucgggaucgucaacaacacgguguacgacccccugcagccggagcuggacuccuucaaggaggagcucgacaaguacuucaagaaccacaccagccccgacguggaccugggcgacaucuccgggaucaacgccagcgucgugaacauccagaaggagaucgaccgccugaacgagguggccaagaaccucaacgagucccugaucgaccugcaggagcucggcaaguacgagcaguacaucaaguggcccugguacaucuggcugggcuucaucgccgggcugaucgcgaucgucaucgugaccaucaugcucugcugcaugaccagcugcugcuccugccugaagggcugcugcagcugcggguccugcugcaaguucgacgaggacgacagcgagccggugcugaagggcgucaagcuccacuacacgugaggacuaguuauaagacugacuagcccgaugggccucccaacgggcccuccuccccuccuugcaccgagauuaauagaucucaaaggcucuuuucagagccaccaaaaaaaaaaaaaaaaaaaaaaaaaaaaaaaaaaaaaaaaaaaaaaaaaaaaaaaaaaaaaaaaaaaaaaaaaaaaaaaaaaaaaaaaaaaaaaaaaaaaa

SEQ ID NO: 24427 - RNA, 4032 nt, Artificial Sequence
  SARS-CoV-2/Wuhan/WIV05/2019__EPI_ISL_402128 spike protein mRNA gc (1-1273)(K986P_V987P_K986P_V987P_H69del_V70del_Y144del_N501Y_A570 D_D614G_P681H_T716I_S982A_D1118H)
aggagaaagcuuaccauguucguguuccugguccuccugccccuggugagcucccagugcgugaaccucaccacccgcacgcagcugccgcccgccuacaccaacagcuucacccggggcgucuacuaccccgacaagguguuccgcuccagcgugcugcacuccacccaggaccucuuccugcccuucuucagcaacgucacgugguuccacgccaucuccgggaccaacggcaccaagcgguucgacaacccggugcugcccuucaacgacgggguguacuucgcgagcaccgagaaguccaacaucauccgcggcuggaucuucgggacgacccucgacagcaagacccagucccugcugaucgucaacaacgccaccaacguggugaucaaggucugcgaguuccaguucugcaacgaccccuuccucggcguguaccacaagaacaacaagagcuggauggaguccgaguuccggguguacagcuccgccaacaacugcacguucgaguacgucagccagcccuuccugauggaccuggagggcaagcaggggaacuucaagaaccuccgcgaguucguguucaagaacaucgacggcuacuucaagaucuacuccaagcacaccccgaucaaccuggugcgggaccugccccagggguucagcgcccucgagccccuggucgaccugcccaucggcaucaacaucacccgcuuccagacccuccuggcccugcaccgguccuaccucacgccgggggacagcagcuccggcuggaccgcgggcgccgccgccuacuacgugggguaccugcagccccgcaccuuccugcucaaguacaacgagaacggcaccaucacggacgcgguggacugcgcccuggacccccugagcgagaccaagugcacccucaaguccuucaccgucgagaaggggaucuaccagacgagcaacuuccgggugcagcccaccgaguccaucgugcgcuucccgaacaucaccaaccugugccccuucggcgaggucuucaacgccacccgguucgccagcguguacgccuggaaccgcaagcggaucuccaacugcgucgcggacuacagcgugcuguacaacuccgccagcuucuccacguucaagugcuacggcgugagccccaccaagcucaacgaccugugcuucaccaacgucuacgccgacuccuucgugauccgcggggacgaggugcggcagaucgcccccggccagaccgggaagaucgccgacuacaacuacaagcugccggacgacuucacgggcugcgucaucgcguggaacagcaacaaccucgacuccaaggucgggggcaacuacaacuaccuguaccgccuguuccgcaagagcaaccucaagcccuucgagcgggacaucuccaccgagaucuaccaggccggcagcacccccugcaacgggguggagggcuucaacugcuacuucccccugcaguccuacggguuccagccgaccuacggcgugggguaccagcccuaccggguggugguccugagcuucgagcuccugcacgcccccgccacggugugcggccccaagaaguccaccaaccuggugaagaacaagugcgucaacuucaacuucaacggccucaccgggaccggcgugcugaccgagagcaacaagaaguuccugccguuccagcaguucgggcgcgacaucgacgacacgaccgacgccgugcgcgacccccagacccuggagauccucgacaucacccccugcagcuucggcggggucuccgugaucacgccgggcaccaacaccagcaaccagguggcgguccuguaccagggcgugaacugcaccgaggugcccgucgccauccacgccgaccagcugacgcccaccuggcggguguacuccaccgggagcaacguguuccagacccgcgccggcugccucaucggggccgagcacgucaacaacuccuacgagugcgacauccccaucggcgcgggcaucugcgccagcuaccagacgcagaccaacucccaccggcgcgcccggagcguggccucccagagcaucaucgcguacaccaugucccugggggccgagaacagcguggccuacuccaacaacagcaucgccaucccgaucaacuucaccaucuccgucacgaccgagauccugcccgugagcaugaccaagaccagcguggacugcacgauguacaucugcggcgacuccaccgagugcagcaaccuccugcugcaguacggguccuucugcacccagcucaaccgcgcccugaccggcaucgcggucgagcaggacaagaacacgcaggagguguucgcccaggugaagcagaucuacaagaccccgcccaucaaggacuucgggggcuucaacuucagccagauccugcccgaccccuccaagcccagcaagcgguccuucaucgaggaccuccuguucaacaaggucacccuggccgacgccggcuucaucaagcaguacggggacugccucggcgacaucgccgcgcgcgaccugaucugcgcccagaaguucaacgggcugaccgugcugcccccgcuccugacggacgagaugaucgcccaguacaccagcgcccuccuggccggcaccaucaccuccggguggacguucggcgcgggcgccgcccugcagauccccuucgccaugcagauggcguaccgguucaacgggaucggcgugacccagaacguccucuacgagaaccagaagcugaucgccaaccaguucaacagcgccaucgggaagauccaggacucccugagcuccaccgccagcgcccucggcaagcugcaggacguggugaaccagaacgcgcaggcccugaacacccucgucaagcagcuguccagcaacuucggggccaucuccagcgugcugaacgacauccucgcccgccuggacccgcccgaggccgaggugcagaucgaccggcugaucacgggccgccuccagucccugcagaccuacgucacccagcagcugauccgggcggccgagauccgcgccagcgccaaccucgccgcgaccaagaugagcgagugcgugcugggccaguccaagcggguggacuucugcgggaagggcuaccaccugaugagcuucccccaguccgcgccccacggggucguguuccuccacgugaccuacguccccgcccaggagaagaacuucacgaccgcccccgccaucugccacgacggcaaggcccacuucccgcgcgaggggguguucgucagcaacggcacccacugguucgugacccagcggaacuucuacgagccccagaucaucacgacccacaacaccuucguguccggcaacugcgacgucgugaucgggaucgugaacaacaccgucuacgacccccugcagcccgagcuggacagcuucaaggaggagcucgacaaguacuucaagaaccacacguccccggacguggaccugggcgacaucagcgggaucaacgccuccguggucaacauccagaaggagaucgaccgccugaacgagguggccaagaaccucaacgagagccugaucgaccugcaggagcucggcaaguacgagcaguacaucaaguggcccugguacaucuggcugggcuucaucgccgggcugaucgcgaucgugauggucaccaucaugcucugcugcaugaccuccugcugcagcugccugaagggcugcugcuccugcgggagcugcugcaaguucgacgaggacgacuccgagcccgugcugaagggcgugaagcuccacuacaccugaggacuaguuauaagacugacuagcccgaugggccucccaacgggcccuccuccccuccuugcaccgagauuaauagaucucaaaggcucuuuucagagccaccaaaaaaaaaaaaaaaaaaaaaaaaaaaaaaaaaaaaaaaaaaaaaaaaaaaaaaaaaaaaaaaaaaaaaaaaaaaaaaaaaaaaaaaaaaaaaaaaaaaaa

SEQ ID NO: 24428 - RNA, 4041 nt, Artificial Sequence
  SARS-CoV-2/Wuhan/WIV05/2019__EPI_ISL_402128 spike protein mRNA gc (1-1273)(K986P_V987P_K986P_V987P_K417N_E484K_N501Y_D614G)
aggagaaagcuuaccauguucguguuccugguccuccugccccuggugagcucccagugcgugaaccucaccacccgcacgcagcugccgcccgccuacaccaacagcuucacccggggcgucuacuaccccgacaagguguuccgcuccagcgugcugcacuccacccaggaccucuuccugcccuucuucagcaacgucacgugguuccacgccauccacguguccgggaccaacggcaccaagcgguucgacaacccggugcugcccuucaacgacggggucuacuucgcgagcaccgagaaguccaacaucauccgcggcuggaucuucgggacgacccucgacagcaagacccagucccugcugaucgugaacaacgccaccaacguggucaucaaggugugcgaguuccaguucugcaacgaccccuuccucggcguguacuaccacaagaacaacaagagcuggauggaguccgaguuccgggucuacagcuccgccaacaacugcacguucgaguacgugagccagcccuuccugauggaccuggagggcaagcaggggaacuucaagaaccuccgcgaguucguguucaagaacaucgacggcuacuucaagaucuacuccaagcacaccccgaucaaccugguccgggaccugccccagggguucagcgcccucgagccccugguggaccugcccaucggcaucaacaucacccgcuuccagacccuccuggcccugcaccgguccuaccucacgccgggggacagcagcuccggcuggaccgcgggcgccgccgccuacuacgugggguaccugcagccccgcaccuuccugcucaaguacaacgagaacggcaccaucacggacgcggucgacugcgcccuggacccccugagcgagaccaagugcacccucaaguccuucaccguggagaaggggaucuaccagacgagcaacuuccgggugcagcccaccgaguccaucguccgcuucccgaacaucaccaaccugugccccuucggcgagguguucaacgccacccgguucgccagcgucuacgccuggaaccgcaagcggaucuccaacugcguggcggacuacagcgugcuguacaacuccgccagcuucuccacguucaagugcuacggcgucagccccaccaagcucaacgaccugugcuucaccaacguguacgccgacuccuucgugauccgcggggacgagguccggcagaucgcccccggccagaccgggaacaucgccgacuacaacuacaagcugccggacgacuucacgggcugcgugaucgcguggaacagcaacaaccucgacuccaaggucgggggcaacuacaacuaccuguaccgccuguuccgcaagagcaaccucaagcccuucgagcgggacaucuccaccgagaucuaccaggccggcagcacccccugcaacggggugaagggcuucaacugcuacuucccccugcaguccuacggguuccagccgaccuacggcgugggguaccagcccuaccggguggucgugcugagcuucgagcuccugcacgcccccgccacggugugcggccccaagaaguccaccaaccuggucaagaacaagugcgugaacuucaacuucaacggccucaccgggaccggcgugcugaccgagagcaacaagaaguuccugccguuccagcaguucgggcgcgacaucgccgacacgaccgacgcgguccgcgacccccagacccuggagauccucgacaucacccccugcagcuucggcgggguguccgugaucacgccgggcaccaacaccagcaaccaggucgccgugcuguaccagggcgugaacugcaccgagguccccguggccauccacgccgaccagcugacgcccaccuggcggguguacuccaccgggagcaacgucuuccagacccgcgccggcugccucaucggggcggagcacgugaacaacuccuacgagugcgacauccccaucggcgccggcaucugcgccagcuaccagacgcagaccaacuccccgcggcgcgcccggagcguggcgucccagagcaucaucgccuacaccaugucccugggggccgagaacagcgucgccuacuccaacaacagcaucgccauccccaccaacuucacgaucuccgugaccaccgagauccugcccgugagcaugaccaagacgagcgucgacugcaccauguacaucugcggcgacuccaccgagugcagcaaccuccugcugcaguacggguccuucugcacccagcucaaccgcgcgcugacgggcaucgccguggagcaggacaagaacacccaggagguguucgcccaggucaagcagaucuacaagacgcccccgaucaaggacuucgggggcuucaacuucagccagauccugcccgaccccuccaagcccagcaagcgguccuucaucgaggaccuccuguucaacaaggugacccuggccgacgccggcuucaucaagcaguacggggacugccucggcgacaucgcggcccgcgaccugaucugcgcccagaaguucaacgggcugaccgugcucccgccccugcugaccgacgagaugaucgcccaguacaccagcgcccuccuggcgggcaccaucacguccggguggaccuucggcgccggcgccgcccugcagauccccuucgcgaugcagauggccuaccgguucaacgggaucggcgucacccagaacgugcucuacgagaaccagaagcugaucgccaaccaguucaacagcgccaucgggaagauccaggacucccugagcuccaccgccagcgcgcucggcaagcugcaggacguggucaaccagaacgcccaggcccugaacacgcucgugaagcagcuguccagcaacuucggggccaucuccagcgugcugaacgacauccucucccgccuggacccgcccgaggccgagguccagaucgaccggcugaucaccggccgccuccagagccugcagaccuacgugacccagcagcugauccgggcggccgagauccgcgccagcgccaaccucgccgcgaccaagauguccgagugcgugcugggccagagcaagcgggucgacuucugcgggaagggcuaccaccugauguccuucccccagagcgcgccccacggggugguguuccuccacgucacguacgugcccgcccaggagaagaacuucaccaccgccccggccaucugccacgacggcaaggcccacuucccccgcgagggggucuucguguccaacggcacccacugguucgugacgcagcggaacuucuacgagccccagaucaucaccaccgacaacaccuucgucagcggcaacugcgacguggugaucgggaucgucaacaacacgguguacgacccccugcagccggagcuggacuccuucaaggaggagcucgacaaguacuucaagaaccacaccagccccgacguggaccugggcgacaucuccgggaucaacgccagcgucgugaacauccagaaggagaucgaccgccugaacgagguggccaagaaccucaacgagucccugaucgaccugcaggagcucggcaaguacgagcaguacaucaaguggcccugguacaucuggcugggcuucaucgccgggcugaucgcgaucgucauggugaccaucaugcucugcugcaugaccagcugcugcuccugccugaagggcugcugcagcugcggguccugcugcaaguucgacgaggacgacagcgagccggugcugaagggcgucaagcuccacuacacgugaggacuaguuauaagacugacuagcccgaugggccucccaacgggcccuccuccccuccuugcaccgagauuaauagaucucaaaggcucuuuucagagccaccaaaaaaaaaaaaaaaaaaaaaaaaaaaaaaaaaaaaaaaaaaaaaaaaaaaaaaaaaaaaaaaaaaaaaaaaaaaaaaaaaaaaaaaaaaaaaaaaaaaaa

SEQ ID NO: 24429 - RNA, 4032 nt, Artificial Sequence
  SARS-CoV-2/Wuhan/WIV05/2019__EPI_ISL_402128 spike protein mRNA gc (1-1273)(K986P_V987P_K986P_V987P_L18F_D80A_D215G_L242del_A243del_ L244del_R246I_K417N_E484K_N501Y_D614G_A701V)
aggagaaagcuuaccauguucguguuccugguccuccugccccuggugagcucccagugcgugaacuucaccacccgcacgcagcucccgcccgccuacaccaacagcuucacccggggcgucuacuaccccgacaagguguuccgcuccagcgugcugcacuccacccaggaccuguuccuccccuucuucagcaacgucacgugguuccacgccauccacguguccgggaccaacggcaccaagcgguucgcgaacccggugcugcccuucaacgacggggucuacuucgccagcaccgagaaguccaacaucauccgcggcuggaucuucgggacgacccuggacagcaagacccagucccuccugaucgugaacaacgccaccaacguggucaucaaggugugcgaguuccaguucugcaacgaccccuuccugggcguguacuaccacaagaacaacaagagcuggauggaguccgaguuccgggucuacagcuccgccaacaacugcacguucgaguacgugagccagcccuuccucauggaccuggagggcaagcaggggaacuucaagaaccugcgcgaguucguguucaagaacaucgacggcuacuucaagaucuacuccaagcacaccccgaucaaccucguccgggggcugccccagggcuucagcgcccuggagccccucguggaccugcccaucgggaucaacaucacccgcuuccagacccugcacaucuccuaccucacgccgggcgacagcagcuccggcuggaccgcgggggccgccgccuacuacgugggcuaccugcagccccggaccuuccugcucaaguacaacgagaacgggaccaucacggacgcggucgacugcgcccuggacccccugagcgagaccaagugcacccucaaguccuucaccguggagaagggcaucuaccagacgagcaacuuccgcgugcagcccaccgaguccaucguccgguucccgaacaucaccaaccugugccccuucggcgagguguucaacgccacccgcuucgccagcgucuacgccuggaaccggaagcgcaucuccaacugcguggcggacuacagcgugcuguacaacuccgccagcuucuccacguucaagugcuacggggucagccccaccaagcucaacgaccugugcuucaccaacguguacgccgacuccuucgugauccggggcgacgagguccgccagaucgcccccgggcagaccggcaacaucgccgacuacaacuacaagcugccggacgacuucacggggugcgugaucgcguggaacagcaacaaccucgacuccaaggugggcggcaacuacaacuaccuguaccggcuguuccgcaagagcaaccucaagcccuucgagcgggacaucuccaccgagaucuaccaggccgggagcacccccugcaacggcgucaagggguucaacugcuacuucccccugcaguccuacggcuuccagccgaccuacggggugggcuaccagcccuaccgcguggucgugcugagcuucgagcuccugcacgcccccgccacggugugcggccccaagaaguccaccaaccuggucaagaacaagugcgugaacuucaacuucaacgggcucaccggcaccggggugcugaccgagagcaacaagaaguuccugccguuccagcaguucggccgggacaucgccgacacgaccgacgcgguccgcgacccccagacccucgagauccuggacaucacccccugcagcuucgggggcguguccgugaucacgccgggcaccaacaccagcaaccaggucgccgugcuguaccagggggugaacugcaccgagguccccguggccauccacgccgaccagcugacgcccaccuggcgcguguacuccaccggcagcaacgucuuccagacccgggccgggugccucaucggcgcggagcacgugaacaacuccuacgagugcgacauccccaucggcgccgggaucugcgccagcuaccagacgcagaccaacuccccgcgccgggcccgcagcguggcgucccagagcaucaucgccuacaccaugucccugggcgucgagaacagcguggccuacuccaacaacagcaucgccauccccaccaacuucacgaucuccgugaccaccgagauccugcccgucagcaugaccaagacgagcguggacugcaccauguacaucugcggggacuccaccgagugcagcaaccuccugcugcaguacggcuccuucugcacccagcucaaccgggcccugacggggaucgcgguggagcaggacaagaacacccaggaggucuucgcccaggugaagcagaucuacaagacgcccccgaucaaggacuucggcggcuucaacuucagccagauccugcccgaccccuccaagcccagcaagcgcuccuucaucgaggaccuccuguucaacaaggugacccuggccgacgccggguucaucaagcaguacggcgacugccucggggacaucgccgcgcgggaccugaucugcgcccagaaguucaacggccugaccguccucccgccccugcugaccgacgagaugaucgcccaguacaccagcgcccuccuggccgggaccaucacguccggcuggaccuucggcgcgggggccgcccugcagauccccuucgccaugcagauggcguaccgcuucaacggcaucggggugacccagaacgugcucuacgagaaccagaagcugaucgccaaccaguucaacagcgccaucggcaagauccaggacucccugagcuccaccgccagcgcccucgggaagcugcaggacgucgugaaccagaacgcgcaggcccugaacacgcucgugaagcagcuguccagcaacuucggcgccaucuccagcguccugaacgacauccucucccggcuggacccgcccgaggccgaggugcagaucgaccgccugaucaccggccggcuccagagccugcagaccuacgugacccagcagcugauccgcgccgcggagauccgggccagcgccaaccucgccgccaccaagauguccgagugcguccuggggcagagcaagcgcguggacuucugcggcaagggguaccaccugauguccuucccccagagcgcgccccacggcguggucuuccuccacgugacguacguccccgcccaggagaagaacuucaccaccgccccggccaucugccacgacgggaaggcgcacuucccccgggagggcguguucguguccaacggcacccacugguucgucacgcagcgcaacuucuacgagccccagaucaucaccaccgacaacaccuucgugagcgggaacugcgacguggucaucggcaucgugaacaacacgguguacgacccccugcagccggagcuggacuccuucaaggaggagcucgacaaguacuucaagaaccacaccagccccgacgucgaccugggggacaucuccggcaucaacgccagcguggugaacauccagaaggagaucgaccggcugaacgaggucgccaagaaccucaacgagucccugaucgaccugcaggagcucggcaaguacgagcaguacaucaaguggcccugguacaucuggcugggguucaucgccggccugaucgccaucgugauggugaccaucaugcucugcugcaugaccagcugcugcuccugccugaaggggugcugcagcugcggcuccugcugcaaguucgacgaggacgacagcgagccgguccugaagggggugaagcuccacuacacgugaggacuaguuauaagacugacuagcccgaugggccucccaacgggcccuccuccccuccuugcaccgagauuaauagaucucaaaggcucuuuucagagccaccaaaaaaaaaaaaaaaaaaaaaaaaaaaaaaaaaaaaaaaaaaaaaaaaaaaaaaaaaaaaaaaaaaaaaaaaaaaaaaaaaaaaaaaaaaaaaaaaaaaaa

SEQ ID NO: 24430 - RNA, 4041 nt, Artificial Sequence
  SARS-CoV-2/Wuhan/WIV05/2019__EPI_ISL_402128 spike protein mRNA gc (1-1273)(K986P_V987P_K986P_V987P_E484K_D614G)
aggagaaagcuuaccauguucguguuccugguccuccugccccuggugagcucccagugcgugaaccucaccacccgcacgcagcugccgcccgccuacaccaacagcuucacccggggcgucuacuaccccgacaagguguuccgcuccagcgugcugcacuccacccaggaccucuuccugcccuucuucagcaacgucacgugguuccacgccauccacguguccgggaccaacggcaccaagcgguucgacaacccggugcugcccuucaacgacggggucuacuucgcgagcaccgagaaguccaacaucauccgcggcuggaucuucgggacgacccucgacagcaagacccagucccugcugaucgugaacaacgccaccaacguggucaucaaggugugcgaguuccaguucugcaacgaccccuuccucggcguguacuaccacaagaacaacaagagcuggauggaguccgaguuccgggucuacagcuccgccaacaacugcacguucgaguacgugagccagcccuuccugauggaccuggagggcaagcaggggaacuucaagaaccuccgcgaguucguguucaagaacaucgacggcuacuucaagaucuacuccaagcacaccccgaucaaccugguccgggaccugccccagggguucagcgcccucgagccccugguggaccugcccaucggcaucaacaucacccgcuuccagacccuccuggcccugcaccgguccuaccucacgccgggggacagcagcuccggcuggaccgcgggcgccgccgccuacuacgugggguaccugcagccccgcaccuuccugcucaaguacaacgagaacggcaccaucacggacgcggucgacugcgcccuggacccccugagcgagaccaagugcacccucaaguccuucaccguggagaaggggaucuaccagacgagcaacuuccgggugcagcccaccgaguccaucguccgcuucccgaacaucaccaaccugugccccuucggcgagguguucaacgccacccgguucgccagcgucuacgccuggaaccgcaagcggaucuccaacugcguggcggacuacagcgugcuguacaacuccgccagcuucuccacguucaagugcuacggcgucagccccaccaagcucaacgaccugugcuucaccaacguguacgccgacuccuucgugauccgcggggacgagguccggcagaucgcccccggccagaccgggaagaucgccgacuacaacuacaagcugccggacgacuucacgggcugcgugaucgcguggaacagcaacaaccucgacuccaaggucgggggcaacuacaacuaccuguaccgccuguuccgcaagagcaaccucaagcccuucgagcgggacaucuccaccgagaucuaccaggccggcagcacccccugcaacggggugaagggcuucaacugcuacuucccccugcaguccuacggguuccagccgaccaacggcgugggguaccagcccuaccggguggucgugcugagcuucgagcuccugcacgcccccgccacggugugcggccccaagaaguccaccaaccuggucaagaacaagugcgugaacuucaacuucaacggccucaccgggaccggcgugcugaccgagagcaacaagaaguuccugccguuccagcaguucgggcgcgacaucgccgacacgaccgacgcgguccgcgacccccagacccuggagauccucgacaucacccccugcagcuucggcgggguguccgugaucacgccgggcaccaacaccagcaaccaggucgccgugcuguaccagggcgugaacugcaccgagguccccguggccauccacgccgaccagcugacgcccaccuggcggguguacuccaccgggagcaacgucuuccagacccgcgccggcugccucaucggggcggagcacgugaacaacuccuacgagugcgacauccccaucggcgccggcaucugcgccagcuaccagacgcagaccaacuccccgcggcgcgcccggagcguggcgucccagagcaucaucgccuacaccaugucccugggggccgagaacagcgucgccuacuccaacaacagcaucgccauccccaccaacuucacgaucuccgugaccaccgagauccugcccgugagcaugaccaagacgagcgucgacugcaccauguacaucugcggcgacuccaccgagugcagcaaccuccugcugcaguacggguccuucugcacccagcucaaccgcgcgcugacgggcaucgccguggagcaggacaagaacacccaggagguguucgcccaggucaagcagaucuacaagacgcccccgaucaaggacuucgggggcuucaacuucagccagauccugcccgaccccuccaagcccagcaagcgguccuucaucgaggaccuccuguucaacaaggugacccuggccgacgccggcuucaucaagcaguacggggacugccucggcgacaucgcggcccgcgaccugaucugcgcccagaaguucaacgggcugaccgugcucccgccccugcugaccgacgagaugaucgcccaguacaccagcgcccuccuggcgggcaccaucacguccggguggaccuucggcgccggcgccgcccugcagauccccuucgcgaugcagauggccuaccgguucaacgggaucggcgucacccagaacgugcucuacgagaaccagaagcugaucgccaaccaguucaacagcgccaucgggaagauccaggacucccugagcuccaccgccagcgcgcucggcaagcugcaggacguggucaaccagaacgcccaggcccugaacacgcucgugaagcagcuguccagcaacuucggggccaucuccagcgugcugaacgacauccucucccgccuggacccgcccgaggccgagguccagaucgaccggcugaucaccggccgccuccagagccugcagaccuacgugacccagcagcugauccgggcggccgagauccgcgccagcgccaaccucgccgcgaccaagauguccgagugcgugcugggccagagcaagcgggucgacuucugcgggaagggcuaccaccugauguccuucccccagagcgcgccccacggggugguguuccuccacgucacguacgugcccgcccaggagaagaacuucaccaccgccccggccaucugccacgacggcaaggcccacuucccccgcgagggggucuucguguccaacggcacccacugguucgugacgcagcggaacuucuacgagccccagaucaucaccaccgacaacaccuucgucagcggcaacugcgacguggugaucgggaucgucaacaacacgguguacgacccccugcagccggagcuggacuccuucaaggaggagcucgacaaguacuucaagaaccacaccagccccgacguggaccugggcgacaucuccgggaucaacgccagcgucgugaacauccagaaggagaucgaccgccugaacgagguggccaagaaccucaacgagucccugaucgaccugcaggagcucggcaaguacgagcaguacaucaaguggcccugguacaucuggcugggcuucaucgccgggcugaucgcgaucgucauggugaccaucaugcucugcugcaugaccagcugcugcuccugccugaagggcugcugcagcugcggguccugcugcaaguucgacgaggacgacagcgagccggugcugaagggcgucaagcuccacuacacgugaggacuaguuauaagacugacuagcccgaugggccucccaacgggcccuccuccccuccuugcaccgagauuaauagaucucaaaggcucuuuucagagccaccaaaaaaaaaaaaaaaaaaaaaaaaaaaaaaaaaaaaaaaaaaaaaaaaaaaaaaaaaaaaaaaaaaaaaaaaaaaaaaaaaaaaaaaaaaaaaaaaaaaaa

SEQ ID NO: 24431 - RNA, 4041 nt, Artificial Sequence
  SARS-CoV-2/Wuhan/WIV05/2019__EPI_ISL_402128 spike protein mRNA gc (1-1273)(K986P_V987P_K986P_V987P_L18F_T20N_P26S_D138Y_R190S_K417T _E484K_N501Y_D614G_H655Y_T1027I)
aggagaaagcuuaccauguucguguuccugguccuccugccccuggugagcucccagugcgugaacuucaccaaccgcacccagcucccgagcgccuacacgaacuccuucacccggggcgucuacuaccccgacaagguguuccgcagcuccgugcugcacagcacccaggaccuguuccuccccuucuucuccaacgucaccugguuccacgccauccacgugagcgggacgaacggcaccaagcgguucgacaaccccgugcugccguucaacgacggggucuacuucgcguccaccgagaaguccaacaucauccgcggcuggaucuucgggaccacgcuggacuccaagacccagagccuccugaucgugaacaacgccaccaacguggucaucaaggugugcgaguuccaguucugcaacuaccccuuccugggcguguacuaccacaagaacaacaaguccuggauggagagcgaguuccgggucuacuccagcgccaacaacugcaccuucgaguacgugucccagcccuuccucauggaccuggagggcaagcaggggaacuucaagaaccugagcgaguucguguucaagaacaucgacggcuacuucaagaucuacuccaagcacacgcccaucaaccucguccgcgaccugccgcagggguucagcgcccuggagccccucguggaccugcccaucggcaucaacaucacccgguuccagacccugcucgcccugcaccgcagcuaccugacccccggggacuccagcuccggcuggacggcgggcgccgccgccuacuacgugggguaccuccagccgcggaccuuccugcugaaguacaacgagaacggcaccaucaccgacgcggucgacugcgcccucgacccccugagcgagacgaagugcacccugaaguccuucaccguggagaaggggaucuaccagaccagcaacuuccgcgugcagcccacggaguccaucguccgguuccccaacaucaccaaccucugcccguucggcgagguguucaacgccacccgcuucgccagcgucuacgccuggaaccggaagcgcaucuccaacugcguggcggacuacagcgugcuguacaacuccgccagcuucuccaccuucaagugcuacggcgucagccccacgaagcugaacgaccucugcuucaccaacguguacgccgacuccuucgugauccgcggggacgagguccggcagaucgcccccggccagaccgggaccaucgccgacuacaacuacaagcugcccgacgacuucacgggcugcgugaucgcguggaacagcaacaaccuggacuccaaggucgggggcaacuacaacuaccucuaccggcuguuccgcaagagcaaccugaagccguucgagcgggacaucuccaccgagaucuaccaggccggcagcacccccugcaacggggugaagggcuucaacugcuacuucccccuccagagcuacggguuccagcccaccuacggcgugggguaccagccguaccgcguggucgugcuguccuucgagcugcuccacgcccccgccacggugugcggccccaagaaguccaccaaccuggucaagaacaagugcgugaacuucaacuucaacggccugaccgggaccggcgugcucaccgagagcaacaagaaguuccugcccuuccagcaguucgggcgggacaucgccgacacgaccgacgcgguccgcgacccgcagacccuggagauccuggacaucacccccugcagcuucggcgggguguccgugaucacgcccggcaccaacaccagcaaccaggucgccgugcucuaccagggcgugaacugcaccgaggucccgguggccauccacgccgaccagcugacgcccaccuggcgcguguacuccaccgggagcaacgucuuccagacccgggccggcugccugaucggggcggaguacgugaacaacuccuacgagugcgacauccccaucggcgccggcaucugcgccagcuaccagacgcagaccaacagcccccgccgggcccgcagcguggcgucccagagcaucaucgccuacaccaugucccucggggccgagaacagcgucgccuacuccaacaacagcaucgccaucccgaccaacuucacgaucagcgugaccaccgagauccugcccguguccaugaccaagacgagcgucgacugcaccauguacaucugcggcgacuccaccgagugcagcaaccugcuccugcaguacggguccuucugcacccagcugaaccgggcgcucacgggcaucgccguggagcaggacaagaacacccaggagguguucgcccaggucaagcagaucuacaagaccccgcccaucaaggacuucgggggcuucaacuucagccagauccugcccgaccccuccaagcccagcaagcgcuccuucaucgaggaccuccuguucaacaaggugacccuggccgacgccggcuucaucaagcaguacggggacugccugggcgacaucgcggcccgggaccucaucugcgcccagaaguucaacgggcugacggugcugcccccgcuccugaccgacgagaugaucgcccaguacaccagcgcccugcucgcgggcaccaucacguccggguggaccuucggcgccggcgccgcccugcagauccccuucgcgaugcagauggccuaccgcuucaacgggaucggcgucacccagaacgugcuguacgagaaccagaagcucaucgccaaccaguucaacagcgccaucgggaagauccaggacucccugagcuccaccgccagcgcgcugggcaagcuccaggacguggucaaccagaacgcccaggcccugaacacgcuggugaagcagcucuccagcaacuucggggccaucuccagcgugcugaacgacauccugagccggcucgacccgcccgaggccgagguccagaucgaccgccugaucaccggccggcugcagucccuccagaccuacgugacccagcagcugauccgcgcggccgagauccgggccagcgccaaccuggccgcgaucaagauguccgagugcgugcucggccagagcaagcgcgucgacuucugcgggaagggcuaccaccugauguccuucccccagagcgcgccccacggggugguguuccugcacgucaccuacgugcccgcccaggagaagaacuucacgaccgcccccgccaucugccacgacggcaaggcccacuucccgcgggagggggucuucguguccaacggcacccacugguucgugacccagcgcaacuucuacgagccccagaucaucacgaccgacaacaccuucgucagcggcaacugcgacguggugaucgggaucgucaacaacaccguguacgacccccuccagcccgagcuggacuccuucaaggaggagcuggacaaguacuucaagaaccacacgagcccggacguggaccucggcgacaucuccgggaucaacgccagcgucgugaacauccagaaggagaucgaccggcugaacgagguggccaagaaccugaacgagucccucaucgaccugcaggagcugggcaaguacgagcaguacaucaaguggcccugguacaucuggcucggcuucaucgccgggcugaucgcgaucgucauggugaccaucaugcugugcugcaugaccagcugcugcuccugccucaagggcugcugcagcugcggguccugcugcaaguucgacgaggacgacagcgagcccgugcugaagggcgucaagcugcacuacaccugaggacuaguuauaagacugacuagcccgaugggccucccaacgggcccuccuccccuccuugcaccgagauuaauagaucucaaaggcucuuuucagagccaccaaaaaaaaaaaaaaaaaaaaaaaaaaaaaaaaaaaaaaaaaaaaaaaaaaaaaaaaaaaaaaaaaaaaaaaaaaaaaaaaaaaaaaaaaaaaaaaaaaaaa

SEQ ID NO: 24432 - RNA, 4041 nt, Artificial Sequence
  SARS-CoV-2/Wuhan/WIV05/2019__EPI_ISL_402128 spike protein mRNA gc (1-1273)(K986P_V987P_K986P_V987P_S13I_W152C_L452R_D614G)
aggagaaagcuuaccauguucguguuccugguccuccugccccuggugagcauccagugcgugaaccucaccacccgcacgcagcugccgcccgccuacaccaacuccuucacccggggcgucuacuaccccgacaagguguuccgcagcuccgugcugcacagcacccaggaccucuuccugcccuucuucuccaacgucacgugguuccacgccauccacgugagcgggaccaacggcaccaagcgguucgacaacccggugcugcccuucaacgacggggucuacuucgcguccaccgagaaguccaacaucauccgcggcuggaucuucgggacgacccucgacagcaagacccagagccugcugaucgugaacaacgccaccaacguggucaucaaggugugcgaguuccaguucugcaacgaccccuuccucggcguguacuaccacaagaacaacaaguccugcauggagagcgaguuccgggucuacuccagcgccaacaacugcacguucgaguacgugucccagcccuuccugauggaccuggagggcaagcaggggaacuucaagaaccuccgcgaguucguguucaagaacaucgacggcuacuucaagaucuacagcaagcacaccccgaucaaccugguccgggaccugccccagggguucuccgcccucgagccccugguggaccugcccaucggcaucaacaucacccgcuuccagacccuccuggcccugcaccggagcuaccucacgccgggggacuccagcagcggcuggaccgcgggcgccgccgccuacuacgugggguaccugcagccccgcaccuuccugcucaaguacaacgagaacggcaccaucacggacgcggucgacugcgcccuggacccccuguccgagaccaagugcacccucaagagcuucaccguggagaaggggaucuaccagacguccaacuuccgggugcagcccaccgagagcaucguccgcuucccgaacaucaccaaccugugccccuucggcgagguguucaacgccacccgguucgccuccgucuacgccuggaaccgcaagcggaucagcaacugcguggcggacuacuccgugcuguacaacagcgccuccuucagcacguucaagugcuacggcgucucccccaccaagcucaacgaccugugcuucaccaacguguacgccgacagcuucgugauccgcggggacgagguccggcagaucgcccccggccagaccgggaagaucgccgacuacaacuacaagcugccggacgacuucacgggcugcgugaucgcguggaacuccaacaaccucgacagcaaggucgggggcaacuacaacuaccgcuaccggcuguuccgcaaguccaaccugaagcccuucgagcgggacaucagcaccgagaucuaccaggccggcuccacccccugcaacgggguggagggcuucaacugcuacuucccccuccagagcuacggguuccagccgaccaacggcgugggguaccagcccuaccgcguggucgugcuguccuucgagcugcuccacgcccccgccacggugugcggccccaagaaguccaccaaccuggucaagaacaagugcgugaacuucaacuucaacggccugaccgggaccggcgugcucaccgagagcaacaagaaguuccugccguuccagcaguucgggcgcgacaucgccgacacgaccgacgcgguccgggacccccagacccuggagauccuggacaucacccccugcagcuucggcggggugagcgugaucacgccgggcaccaacaccuccaaccaggucgccgugcucuaccagggcgugaacugcaccgagguccccguggccauccacgccgaccagcugacgcccaccuggcgcguguacagcaccggguccaacgucuuccagacccgggccggcugccugaucggggcggagcacgugaacaacagcuacgagugcgacauccccaucggcgccggcaucugcgccuccuaccagacgcagaccaacagcccgcgccgggcccgcuccguggcgagccaguccaucaucgccuacaccaugagccucggggccgagaacuccgucgccuacagcaacaacuccaucgccauccccaccaacuucacgaucagcgugaccaccgagauccugcccguguccaugaccaagacgagcgucgacugcaccauguacaucugcggcgacagcaccgagugcuccaaccugcuccugcaguacgggagcuucugcacccagcugaaccgggcgcucacgggcaucgccguggagcaggacaagaacacccaggagguguucgcccaggucaagcagaucuacaagacgcccccgaucaaggacuucgggggcuucaacuucucccagauccugcccgaccccagcaagcccuccaagcgcagcuucaucgaggaccuccuguucaacaaggugacccuggccgacgccggcuucaucaagcaguacggggacugccugggcgacaucgcggcccgggaccucaucugcgcccagaaguucaacgggcugaccgugcugccgccccuccugaccgacgagaugaucgcccaguacaccuccgcccugcucgcgggcaccaucacgagcggguggaccuucggcgccggcgccgcccugcagauccccuucgcgaugcagauggccuaccgcuucaacgggaucggcgucacccagaacgugcuguacgagaaccagaagcucaucgccaaccaguucaacuccgccaucgggaagauccaggacagccuguccagcaccgccuccgcgcugggcaagcuccaggacguggucaaccagaacgcccaggcccugaacacgcuggugaagcagcucagcuccaacuucggggccaucagcuccgugcugaacgacauccugagccggcucgacccgcccgaggccgagguccagaucgaccgccugaucaccggccggcugcagucccuccagaccuacgugacccagcagcugauccgcgcggccgagauccgggccagcgccaaccuggccgcgaccaagaugagcgagugcgugcucggccaguccaagcgcgucgacuucugcgggaagggcuaccaccugaugagcuucccccaguccgcgccccacggggugguguuccugcacgucacguacgugcccgcccaggagaagaacuucaccaccgccccggccaucugccacgacggcaaggcccacuucccccgggagggggucuucgugagcaacggcacccacugguucgugacgcagcgcaacuucuacgagccccagaucaucaccaccgacaacaccuucgucuccggcaacugcgacguggugaucgggaucgucaacaacacgguguacgacccccuccagccggagcuggacagcuucaaggaggagcuggacaaguacuucaagaaccacaccucccccgacguggaccucggcgacaucagcgggaucaacgccuccgucgugaacauccagaaggagaucgaccggcugaacgagguggccaagaaccugaacgagagccucaucgaccugcaggagcugggcaaguacgagcaguacaucaaguggcccugguacaucuggcucggcuucaucgccgggcugaucgcgaucgucauggugaccaucaugcugugcugcaugaccuccugcugcagcugccucaagggcugcugcuccugcgggagcugcugcaaguucgacgaggacgacuccgagccggugcugaagggcgucaagcugcacuacacgugaggacuaguuauaagacugacuagcccgaugggccucccaacgggcccuccuccccuccuugcaccgagauuaauagaucucaaaggcucuuuucagagccaccaaaaaaaaaaaaaaaaaaaaaaaaaaaaaaaaaaaaaaaaaaaaaaaaaaaaaaaaaaaaaaaaaaaaaaaaaaaaaaaaaaaaaaaaaaaaaaaaaaaaa

SEQ ID NO: 24433 - RNA, 4041 nt, Artificial Sequence
  SARS-CoV-2/Wuhan/WIV05/2019__EPI_ISL_402128 spike protein mRNA gc (1-1273)(K986P_V987P)
aggagaaagcuuaccauguucguguuccuggugcugcugccccuggugagcagccagugcgugaaccugaccacccggacccagcugccaccagccuacaccaacagcuucacccggggcgucuacuaccccgacaagguguuccggagcagcguccugcacagcacccaggaccuguuccugcccuucuucagcaacgugaccugguuccacgccauccacgugagcggcaccaacggcaccaagcgguucgacaaccccgugcugcccuucaacgacggcguguacuucgccagcaccgagaagagcaacaucauccggggcuggaucuucggcaccacccuggacagcaagacccagagccugcugaucgugaauaacgccaccaacguggugaucaaggugugcgaguuccaguucugcaacgaccccuuccugggcguguacuaccacaagaacaacaagagcuggauggagagcgaguuccggguguacagcagcgccaacaacugcaccuucgaguacgugagccagcccuuccugauggaccuggagggcaagcagggcaacuucaagaaccugcgggaguucguguucaagaacaucgacggcuacuucaagaucuacagcaagcacaccccaaucaaccuggugcgggaucugccccagggcuucucagcccuggagccccugguggaccugcccaucggcaucaacaucacccgguuccagacccugcuggcccugcaccggagcuaccugaccccaggcgacagcagcagcggguggacagcaggcgcggcugcuuacuacgugggcuaccugcagccccggaccuuccugcugaaguacaacgagaacggcaccaucaccgacgccguggacugcgcccuggacccucugagcgagaccaagugcacccugaagagcuucaccguggagaagggcaucuaccagaccagcaacuuccgggugcagcccaccgagagcaucgugcgguuccccaacaucaccaaccugugccccuucggcgagguguucaacgccacccgguucgccagcguguacgccuggaaccggaagcggaucagcaacugcguggccgacuacagcgugcuguacaacagcgccagcuucagcaccuucaagugcuacggcgugagccccaccaagcugaacgaccugugcuucaccaacguguacgccgacagcuucgugauccguggcgacgaggugcggcagaucgcacccggccagacaggcaagaucgccgacuacaacuacaagcugcccgacgacuucaccggcugcgugaucgccuggaacagcaacaaccucgacagcaaggugggcggcaacuacaacuaccuguaccggcuguuccggaagagcaaccugaagcccuucgagcgggacaucagcaccgagaucuaccaagccggcuccaccccuugcaacggcguggagggcuucaacugcuacuucccucugcagagcuacggcuuccagcccaccaacggcgugggcuaccagcccuaccgggugguggugcugagcuucgagcugcugcacgccccagccaccguguguggccccaagaagagcaccaaccuggugaagaacaagugcgugaacuucaacuucaacggccuuaccggcaccggcgugcugaccgagagcaacaagaaauuccugcccuuucagcaguucggccgggacaucgccgacaccaccgacgcugugcgggauccccagacccuggagauccuggacaucaccccuugcagcuucggcggcgugagcgugaucaccccaggcaccaacaccagcaaccagguggccgugcuguaccaggacgugaacugcaccgaggugcccguggccauccacgccgaccagcugacacccaccuggcgggucuacagcaccggcagcaacguguuccagacccgggccgguugccugaucggcgccgagcacgugaacaacagcuacgagugcgacauccccaucggcgccggcaucugugccagcuaccagacccagaccaauucaccccggagggcaaggagcguggccagccagagcaucaucgccuacaccaugagccugggcgccgagaacagcguggccuacagcaacaacagcaucgccauccccaccaacuucaccaucagcgugaccaccgagauucugcccgugagcaugaccaagaccagcguggacugcaccauguacaucugcggcgacagcaccgagugcagcaaccugcugcugcaguacggcagcuucugcacccagcugaaccgggcccugaccggcaucgccguggagcaggacaagaacacccaggagguguucgcccaggugaagcagaucuacaagaccccucccaucaaggacuucggcggcuucaacuucagccagauccugcccgaccccagcaagcccagcaagcggagcuucaucgaggaccugcuguucaacaaggugacccuagccgacgccggcuucaucaagcaguacggcgacugccucggcgacauagccgcccgggaccugaucugcgcccagaaguucaacggccugaccgugcugccuccccugcugaccgacgagaugaucgcccaguacaccagcgcccuguuagccggaaccaucaccagcggcuggacuuucggcgcuggagccgcucugcagauccccuucgccaugcagauggccuaccgguucaacggcaucggcgugacccagaacgugcuguacgagaaccagaagcugaucgccaaccaguucaacagcgccaucggcaagauccaggacagccugagcagcaccgcuagcgcccugggcaagcugcaggacguggugaaccagaacgcccaggcccugaacacccuggugaagcagcugagcagcaacuucggcgccaucagcagcgugcugaacgacauccugagccggcuggacccucccgaggccgaggugcagaucgaccggcugaucacuggccggcugcagagccugcagaccuacgugacccagcagcugauccgggccgccgagauucgggccagcgccaaccuggccgccaccaagaugagcgagugcgugcugggccagagcaagcggguggacuucugcggcaagggcuaccaccugaugagcuuuccccagagcgcaccccacggagugguguuccugcacgugaccuacgugcccgcccaggagaagaacuucaccaccgccccagccaucugccacgacggcaaggcccacuuuccccgggagggcguguucgugagcaacggcacccacugguucgugacccagcggaacuucuacgagccccagaucaucaccaccgacaacaccuucgugagcggcaacugcgacguggugaucggcaucgugaacaacaccguguacgauccccugcagcccgagcuggacagcuucaaggaggagcuggacaaguacuucaagaaucacaccagccccgacguggaccugggcgacaucagcggcaucaacgccagcguggugaacauccagaaggagaucgaucggcugaacgagguggccaagaaccugaacgagagccugaucgaccugcaggagcugggcaaguacgagcaguacaucaaguggcccugguacaucuggcugggcuucaucgccggccugaucgccaucgugauggugaccaucaugcugugcugcaugaccagcugcugcagcugccugaagggcuguugcagcugcggcagcugcugcaaguucgacgaggacgacagcgagcccgugcugaagggcgugaagcugcacuacaccugaggacuaguuauaagacugacuagcccgaugggccucccaacgggcccuccuccccuccuugcaccgagauuaauagaucucaaaggcucuuuucagagccaccaaaaaaaaaaaaaaaaaaaaaaaaaaaaaaaaaaaaaaaaaaaaaaaaaaaaaaaaaaaaaaaaaaaaaaaaaaaaaaaaaaaaaaaaaaaaaaaaaaaaa

SEQ ID NO: 24434 - RNA, 4041 nt, Artificial Sequence
  SARS-CoV-2/Wuhan/WIV05/2019__EPI_ISL_402128 spike protein mRNA gc (1-1273)(K986P_V987P_ D614G)
aggagaaagcuuaccauguucguguuccuggugcugcugccccuggugagcagccagugcgugaaccugaccacccggacccagcugccaccagccuacaccaacagcuucacccggggcgucuacuaccccgacaagguguuccggagcagcguccugcacagcacccaggaccuguuccugcccuucuucagcaacgugaccugguuccacgccauccacgugagcggcaccaacggcaccaagcgguucgacaaccccgugcugcccuucaacgacggcguguacuucgccagcaccgagaagagcaacaucauccggggcuggaucuucggcaccacccuggacagcaagacccagagccugcugaucgugaauaacgccaccaacguggugaucaaggugugcgaguuccaguucugcaacgaccccuuccugggcguguacuaccacaagaacaacaagagcuggauggagagcgaguuccggguguacagcagcgccaacaacugcaccuucgaguacgugagccagcccuuccugauggaccuggagggcaagcagggcaacuucaagaaccugcgggaguucguguucaagaacaucgacggcuacuucaagaucuacagcaagcacaccccaaucaaccuggugcgggaucugccccagggcuucucagcccuggagccccugguggaccugcccaucggcaucaacaucacccgguuccagacccugcuggcccugcaccggagcuaccugaccccaggcgacagcagcagcggguggacagcaggcgcggcugcuuacuacgugggcuaccugcagccccggaccuuccugcugaaguacaacgagaacggcaccaucaccgacgccguggacugcgcccuggacccucugagcgagaccaagugcacccugaagagcuucaccguggagaagggcaucuaccagaccagcaacuuccgggugcagcccaccgagagcaucgugcgguuccccaacaucaccaaccugugccccuucggcgagguguucaacgccacccgguucgccagcguguacgccuggaaccggaagcggaucagcaacugcguggccgacuacagcgugcuguacaacagcgccagcuucagcaccuucaagugcuacggcgugagccccaccaagcugaacgaccugugcuucaccaacguguacgccgacagcuucgugauccguggcgacgaggugcggcagaucgcacccggccagacaggcaagaucgccgacuacaacuacaagcugcccgacgacuucaccggcugcgugaucgccuggaacagcaacaaccucgacagcaaggugggcggcaacuacaacuaccuguaccggcuguuccggaagagcaaccugaagcccuucgagcgggacaucagcaccgagaucuaccaagccggcuccaccccuugcaacggcguggagggcuucaacugcuacuucccucugcagagcuacggcuuccagcccaccaacggcgugggcuaccagcccuaccgggugguggugcugagcuucgagcugcugcacgccccagccaccguguguggccccaagaagagcaccaaccuggugaagaacaagugcgugaacuucaacuucaacggccuuaccggcaccggcgugcugaccgagagcaacaagaaauuccugcccuuucagcaguucggccgggacaucgccgacaccaccgacgcugugcgggauccccagacccuggagauccuggacaucaccccuugcagcuucggcggcgugagcgugaucaccccaggcaccaacaccagcaaccagguggccgugcuguaccagggcgugaacugcaccgaggugcccguggccauccacgccgaccagcugacacccaccuggcgggucuacagcaccggcagcaacguguuccagacccgggccgguugccugaucggcgccgagcacgugaacaacagcuacgagugcgacauccccaucggcgccggcaucugugccagcuaccagacccagaccaauucaccccggagggcaaggagcguggccagccagagcaucaucgccuacaccaugagccugggcgccgagaacagcguggccuacagcaacaacagcaucgccauccccaccaacuucaccaucagcgugaccaccgagauucugcccgugagcaugaccaagaccagcguggacugcaccauguacaucugcggcgacagcaccgagugcagcaaccugcugcugcaguacggcagcuucugcacccagcugaaccgggcccugaccggcaucgccguggagcaggacaagaacacccaggagguguucgcccaggugaagcagaucuacaagaccccucccaucaaggacuucggcggcuucaacuucagccagauccugcccgaccccagcaagcccagcaagcggagcuucaucgaggaccugcuguucaacaaggugacccuagccgacgccggcuucaucaagcaguacggcgacugccucggcgacauagccgcccgggaccugaucugcgcccagaaguucaacggccugaccgugcugccuccccugcugaccgacgagaugaucgcccaguacaccagcgcccuguuagccggaaccaucaccagcggcuggacuuucggcgcuggagccgcucugcagauccccuucgccaugcagauggccuaccgguucaacggcaucggcgugacccagaacgugcuguacgagaaccagaagcugaucgccaaccaguucaacagcgccaucggcaagauccaggacagccugagcagcaccgcuagcgcccugggcaagcugcaggacguggugaaccagaacgcccaggcccugaacacccuggugaagcagcugagcagcaacuucggcgccaucagcagcgugcugaacgacauccugagccggcuggacccucccgaggccgaggugcagaucgaccggcugaucacuggccggcugcagagccugcagaccuacgugacccagcagcugauccgggccgccgagauucgggccagcgccaaccuggccgccaccaagaugagcgagugcgugcugggccagagcaagcggguggacuucugcggcaagggcuaccaccugaugagcuuuccccagagcgcaccccacggagugguguuccugcacgugaccuacgugcccgcccaggagaagaacuucaccaccgccccagccaucugccacgacggcaaggcccacuuuccccgggagggcguguucgugagcaacggcacccacugguucgugacccagcggaacuucuacgagccccagaucaucaccaccgacaacaccuucgugagcggcaacugcgacguggugaucggcaucgugaacaacaccguguacgauccccugcagcccgagcuggacagcuucaaggaggagcuggacaaguacuucaagaaucacaccagccccgacguggaccugggcgacaucagcggcaucaacgccagcguggugaacauccagaaggagaucgaucggcugaacgagguggccaagaaccugaacgagagccugaucgaccugcaggagcugggcaaguacgagcaguacaucaaguggcccugguacaucuggcugggcuucaucgccggccugaucgccaucgugauggugaccaucaugcugugcugcaugaccagcugcugcagcugccugaagggcuguugcagcugcggcagcugcugcaaguucgacgaggacgacagcgagcccgugcugaagggcgugaagcugcacuacaccugaggacuaguuauaagacugacuagcccgaugggccucccaacgggcccuccuccccuccuugcaccgagauuaauagaucucaaaggcucuuuucagagccaccaaaaaaaaaaaaaaaaaaaaaaaaaaaaaaaaaaaaaaaaaaaaaaaaaaaaaaaaaaaaaaaaaaaaaaaaaaaaaaaaaaaaaaaaaaaaaaaaaaaaa

SEQ ID NO: 24435 - RNA, 4041 nt, Artificial Sequence
  SARS-CoV-2/Wuhan/WIV05/2019__EPI_ISL_402128 spike protein mRNA gc (1-1273)(K986P_V987P_A222V_D614G)
aggagaaagcuuaccauguucguguuccuggugcugcugccccuggugagcagccagugcgugaaccugaccacccggacccagcugccaccagccuacaccaacagcuucacccggggcgucuacuaccccgacaagguguuccggagcagcguccugcacagcacccaggaccuguuccugcccuucuucagcaacgugaccugguuccacgccauccacgugagcggcaccaacggcaccaagcgguucgacaaccccgugcugcccuucaacgacggcguguacuucgccagcaccgagaagagcaacaucauccggggcuggaucuucggcaccacccuggacagcaagacccagagccugcugaucgugaauaacgccaccaacguggugaucaaggugugcgaguuccaguucugcaacgaccccuuccugggcguguacuaccacaagaacaacaagagcuggauggagagcgaguuccggguguacagcagcgccaacaacugcaccuucgaguacgugagccagcccuuccugauggaccuggagggcaagcagggcaacuucaagaaccugcgggaguucguguucaagaacaucgacggcuacuucaagaucuacagcaagcacaccccaaucaaccuggugcgggaucugccccagggcuucucagugcuggagccccugguggaccugcccaucggcaucaacaucacccgguuccagacccugcuggcccugcaccggagcuaccugaccccaggcgacagcagcagcggguggacagcaggcgcggcugcuuacuacgugggcuaccugcagccccggaccuuccugcugaaguacaacgagaacggcaccaucaccgacgccguggacugcgcccuggacccucugagcgagaccaagugcacccugaagagcuucaccguggagaagggcaucuaccagaccagcaacuuccgggugcagcccaccgagagcaucgugcgguuccccaacaucaccaaccugugccccuucggcgagguguucaacgccacccgguucgccagcguguacgccuggaaccggaagcggaucagcaacugcguggccgacuacagcgugcuguacaacagcgccagcuucagcaccuucaagugcuacggcgugagccccaccaagcugaacgaccugugcuucaccaacguguacgccgacagcuucgugauccguggcgacgaggugcggcagaucgcacccggccagacaggcaagaucgccgacuacaacuacaagcugcccgacgacuucaccggcugcgugaucgccuggaacagcaacaaccucgacagcaaggugggcggcaacuacaacuaccuguaccggcuguuccggaagagcaaccugaagcccuucgagcgggacaucagcaccgagaucuaccaagccggcuccaccccuugcaacggcguggagggcuucaacugcuacuucccucugcagagcuacggcuuccagcccaccaacggcgugggcuaccagcccuaccgggugguggugcugagcuucgagcugcugcacgccccagccaccguguguggccccaagaagagcaccaaccuggugaagaacaagugcgugaacuucaacuucaacggccuuaccggcaccggcgugcugaccgagagcaacaagaaauuccugcccuuucagcaguucggccgggacaucgccgacaccaccgacgcugugcgggauccccagacccuggagauccuggacaucaccccuugcagcuucggcggcgugagcgugaucaccccaggcaccaacaccagcaaccagguggccgugcuguaccagggcgugaacugcaccgaggugcccguggccauccacgccgaccagcugacacccaccuggcgggucuacagcaccggcagcaacguguuccagacccgggccgguugccugaucggcgccgagcacgugaacaacagcuacgagugcgacauccccaucggcgccggcaucugugccagcuaccagacccagaccaauucaccccggagggcaaggagcguggccagccagagcaucaucgccuacaccaugagccugggcgccgagaacagcguggccuacagcaacaacagcaucgccauccccaccaacuucaccaucagcgugaccaccgagauucugcccgugagcaugaccaagaccagcguggacugcaccauguacaucugcggcgacagcaccgagugcagcaaccugcugcugcaguacggcagcuucugcacccagcugaaccgggcccugaccggcaucgccguggagcaggacaagaacacccaggagguguucgcccaggugaagcagaucuacaagaccccucccaucaaggacuucggcggcuucaacuucagccagauccugcccgaccccagcaagcccagcaagcggagcuucaucgaggaccugcuguucaacaaggugacccuagccgacgccggcuucaucaagcaguacggcgacugccucggcgacauagccgcccgggaccugaucugcgcccagaaguucaacggccugaccgugcugccuccccugcugaccgacgagaugaucgcccaguacaccagcgcccuguuagccggaaccaucaccagcggcuggacuuucggcgcuggagccgcucugcagauccccuucgccaugcagauggccuaccgguucaacggcaucggcgugacccagaacgugcuguacgagaaccagaagcugaucgccaaccaguucaacagcgccaucggcaagauccaggacagccugagcagcaccgcuagcgcccugggcaagcugcaggacguggugaaccagaacgcccaggcccugaacacccuggugaagcagcugagcagcaacuucggcgccaucagcagcgugcugaacgacauccugagccggcuggacccucccgaggccgaggugcagaucgaccggcugaucacuggccggcugcagagccugcagaccuacgugacccagcagcugauccgggccgccgagauucgggccagcgccaaccuggccgccaccaagaugagcgagugcgugcugggccagagcaagcggguggacuucugcggcaagggcuaccaccugaugagcuuuccccagagcgcaccccacggagugguguuccugcacgugaccuacgugcccgcccaggagaagaacuucaccaccgccccagccaucugccacgacggcaaggcccacuuuccccgggagggcguguucgugagcaacggcacccacugguucgugacccagcggaacuucuacgagccccagaucaucaccaccgacaacaccuucgugagcggcaacugcgacguggugaucggcaucgugaacaacaccguguacgauccccugcagcccgagcuggacagcuucaaggaggagcuggacaaguacuucaagaaucacaccagccccgacguggaccugggcgacaucagcggcaucaacgccagcguggugaacauccagaaggagaucgaucggcugaacgagguggccaagaaccugaacgagagccugaucgaccugcaggagcugggcaaguacgagcaguacaucaaguggcccugguacaucuggcugggcuucaucgccggccugaucgccaucgugauggugaccaucaugcugugcugcaugaccagcugcugcagcugccugaagggcuguugcagcugcggcagcugcugcaaguucgacgaggacgacagcgagcccgugcugaagggcgugaagcugcacuacaccugaggacuaguuauaagacugacuagcccgaugggccucccaacgggcccuccuccccuccuugcaccgagauuaauagaucucaaaggcucuuuucagagccaccaaaaaaaaaaaaaaaaaaaaaaaaaaaaaaaaaaaaaaaaaaaaaaaaaaaaaaaaaaaaaaaaaaaaaaaaaaaaaaaaaaaaaaaaaaaaaaaaaaaaa

SEQ ID NO: 24436 - RNA, 4041 nt, Artificial Sequence
  SARS-CoV-2/Wuhan/WIV05/2019__EPI_ISL_402128 spike protein mRNA gc (1-1273)(K986P_V987P_N439K_D614G)
aggagaaagcuuaccauguucguguuccuggugcugcugccccuggugagcagccagugcgugaaccugaccacccggacccagcugccaccagccuacaccaacagcuucacccggggcgucuacuaccccgacaagguguuccggagcagcguccugcacagcacccaggaccuguuccugcccuucuucagcaacgugaccugguuccacgccauccacgugagcggcaccaacggcaccaagcgguucgacaaccccgugcugcccuucaacgacggcguguacuucgccagcaccgagaagagcaacaucauccggggcuggaucuucggcaccacccuggacagcaagacccagagccugcugaucgugaauaacgccaccaacguggugaucaaggugugcgaguuccaguucugcaacgaccccuuccugggcguguacuaccacaagaacaacaagagcuggauggagagcgaguuccggguguacagcagcgccaacaacugcaccuucgaguacgugagccagcccuuccugauggaccuggagggcaagcagggcaacuucaagaaccugcgggaguucguguucaagaacaucgacggcuacuucaagaucuacagcaagcacaccccaaucaaccuggugcgggaucugccccagggcuucucagcccuggagccccugguggaccugcccaucggcaucaacaucacccgguuccagacccugcuggcccugcaccggagcuaccugaccccaggcgacagcagcagcggguggacagcaggcgcggcugcuuacuacgugggcuaccugcagccccggaccuuccugcugaaguacaacgagaacggcaccaucaccgacgccguggacugcgcccuggacccucugagcgagaccaagugcacccugaagagcuucaccguggagaagggcaucuaccagaccagcaacuuccgggugcagcccaccgagagcaucgugcgguuccccaacaucaccaaccugugccccuucggcgagguguucaacgccacccgguucgccagcguguacgccuggaaccggaagcggaucagcaacugcguggccgacuacagcgugcuguacaacagcgccagcuucagcaccuucaagugcuacggcgugagccccaccaagcugaacgaccugugcuucaccaacguguacgccgacagcuucgugauccguggcgacgaggugcggcagaucgcacccggccagacaggcaagaucgccgacuacaacuacaagcugcccgacgacuucaccggcugcgugaucgccuggaacagcaagaaccucgacagcaaggugggcggcaacuacaacuaccuguaccggcuguuccggaagagcaaccugaagcccuucgagcgggacaucagcaccgagaucuaccaagccggcuccaccccuugcaacggcguggagggcuucaacugcuacuucccucugcagagcuacggcuuccagcccaccaacggcgugggcuaccagcccuaccgggugguggugcugagcuucgagcugcugcacgccccagccaccguguguggccccaagaagagcaccaaccuggugaagaacaagugcgugaacuucaacuucaacggccuuaccggcaccggcgugcugaccgagagcaacaagaaauuccugcccuuucagcaguucggccgggacaucgccgacaccaccgacgcugugcgggauccccagacccuggagauccuggacaucaccccuugcagcuucggcggcgugagcgugaucaccccaggcaccaacaccagcaaccagguggccgugcuguaccagggcgugaacugcaccgaggugcccguggccauccacgccgaccagcugacacccaccuggcgggucuacagcaccggcagcaacguguuccagacccgggccgguugccugaucggcgccgagcacgugaacaacagcuacgagugcgacauccccaucggcgccggcaucugugccagcuaccagacccagaccaauucaccccggagggcaaggagcguggccagccagagcaucaucgccuacaccaugagccugggcgccgagaacagcguggccuacagcaacaacagcaucgccauccccaccaacuucaccaucagcgugaccaccgagauucugcccgugagcaugaccaagaccagcguggacugcaccauguacaucugcggcgacagcaccgagugcagcaaccugcugcugcaguacggcagcuucugcacccagcugaaccgggcccugaccggcaucgccguggagcaggacaagaacacccaggagguguucgcccaggugaagcagaucuacaagaccccucccaucaaggacuucggcggcuucaacuucagccagauccugcccgaccccagcaagcccagcaagcggagcuucaucgaggaccugcuguucaacaaggugacccuagccgacgccggcuucaucaagcaguacggcgacugccucggcgacauagccgcccgggaccugaucugcgcccagaaguucaacggccugaccgugcugccuccccugcugaccgacgagaugaucgcccaguacaccagcgcccuguuagccggaaccaucaccagcggcuggacuuucggcgcuggagccgcucugcagauccccuucgccaugcagauggccuaccgguucaacggcaucggcgugacccagaacgugcuguacgagaaccagaagcugaucgccaaccaguucaacagcgccaucggcaagauccaggacagccugagcagcaccgcuagcgcccugggcaagcugcaggacguggugaaccagaacgcccaggcccugaacacccuggugaagcagcugagcagcaacuucggcgccaucagcagcgugcugaacgacauccugagccggcuggacccucccgaggccgaggugcagaucgaccggcugaucacuggccggcugcagagccugcagaccuacgugacccagcagcugauccgggccgccgagauucgggccagcgccaaccuggccgccaccaagaugagcgagugcgugcugggccagagcaagcggguggacuucugcggcaagggcuaccaccugaugagcuuuccccagagcgcaccccacggagugguguuccugcacgugaccuacgugcccgcccaggagaagaacuucaccaccgccccagccaucugccacgacggcaaggcccacuuuccccgggagggcguguucgugagcaacggcacccacugguucgugacccagcggaacuucuacgagccccagaucaucaccaccgacaacaccuucgugagcggcaacugcgacguggugaucggcaucgugaacaacaccguguacgauccccugcagcccgagcuggacagcuucaaggaggagcuggacaaguacuucaagaaucacaccagccccgacguggaccugggcgacaucagcggcaucaacgccagcguggugaacauccagaaggagaucgaucggcugaacgagguggccaagaaccugaacgagagccugaucgaccugcaggagcugggcaaguacgagcaguacaucaaguggcccugguacaucuggcugggcuucaucgccggccugaucgccaucgugauggugaccaucaugcugugcugcaugaccagcugcugcagcugccugaagggcuguugcagcugcggcagcugcugcaaguucgacgaggacgacagcgagcccgugcugaagggcgugaagcugcacuacaccugaggacuaguuauaagacugacuagcccgaugggccucccaacgggcccuccuccccuccuugcaccgagauuaauagaucucaaaggcucuuuucagagccaccaaaaaaaaaaaaaaaaaaaaaaaaaaaaaaaaaaaaaaaaaaaaaaaaaaaaaaaaaaaaaaaaaaaaaaaaaaaaaaaaaaaaaaaaaaaaaaaaaaaaa

SEQ ID NO: 24437 - RNA, 4041 nt, Artificial Sequence
  SARS-CoV-2/Wuhan/WIV05/2019__EPI_ISL_402128 spike protein mRNA gc (1-1273)(K986P_V987P_S477N_D614G)
aggagaaagcuuaccauguucguguuccuggugcugcugccccuggugagcagccagugcgugaaccugaccacccggacccagcugccaccagccuacaccaacagcuucacccggggcgucuacuaccccgacaagguguuccggagcagcguccugcacagcacccaggaccuguuccugcccuucuucagcaacgugaccugguuccacgccauccacgugagcggcaccaacggcaccaagcgguucgacaaccccgugcugcccuucaacgacggcguguacuucgccagcaccgagaagagcaacaucauccggggcuggaucuucggcaccacccuggacagcaagacccagagccugcugaucgugaauaacgccaccaacguggugaucaaggugugcgaguuccaguucugcaacgaccccuuccugggcguguacuaccacaagaacaacaagagcuggauggagagcgaguuccggguguacagcagcgccaacaacugcaccuucgaguacgugagccagcccuuccugauggaccuggagggcaagcagggcaacuucaagaaccugcgggaguucguguucaagaacaucgacggcuacuucaagaucuacagcaagcacaccccaaucaaccuggugcgggaucugccccagggcuucucagcccuggagccccugguggaccugcccaucggcaucaacaucacccgguuccagacccugcuggcccugcaccggagcuaccugaccccaggcgacagcagcagcggguggacagcaggcgcggcugcuuacuacgugggcuaccugcagccccggaccuuccugcugaaguacaacgagaacggcaccaucaccgacgccguggacugcgcccuggacccucugagcgagaccaagugcacccugaagagcuucaccguggagaagggcaucuaccagaccagcaacuuccgggugcagcccaccgagagcaucgugcgguuccccaacaucaccaaccugugccccuucggcgagguguucaacgccacccgguucgccagcguguacgccuggaaccggaagcggaucagcaacugcguggccgacuacagcgugcuguacaacagcgccagcuucagcaccuucaagugcuacggcgugagccccaccaagcugaacgaccugugcuucaccaacguguacgccgacagcuucgugauccguggcgacgaggugcggcagaucgcacccggccagacaggcaagaucgccgacuacaacuacaagcugcccgacgacuucaccggcugcgugaucgccuggaacagcaacaaccucgacagcaaggugggcggcaacuacaacuaccuguaccggcuguuccggaagagcaaccugaagcccuucgagcgggacaucagcaccgagaucuaccaagccggcaacaccccuugcaacggcguggagggcuucaacugcuacuucccucugcagagcuacggcuuccagcccaccaacggcgugggcuaccagcccuaccgggugguggugcugagcuucgagcugcugcacgccccagccaccguguguggccccaagaagagcaccaaccuggugaagaacaagugcgugaacuucaacuucaacggccuuaccggcaccggcgugcugaccgagagcaacaagaaauuccugcccuuucagcaguucggccgggacaucgccgacaccaccgacgcugugcgggauccccagacccuggagauccuggacaucaccccuugcagcuucggcggcgugagcgugaucaccccaggcaccaacaccagcaaccagguggccgugcuguaccagggcgugaacugcaccgaggugcccguggccauccacgccgaccagcugacacccaccuggcgggucuacagcaccggcagcaacguguuccagacccgggccgguugccugaucggcgccgagcacgugaacaacagcuacgagugcgacauccccaucggcgccggcaucugugccagcuaccagacccagaccaauucaccccggagggcaaggagcguggccagccagagcaucaucgccuacaccaugagccugggcgccgagaacagcguggccuacagcaacaacagcaucgccauccccaccaacuucaccaucagcgugaccaccgagauucugcccgugagcaugaccaagaccagcguggacugcaccauguacaucugcggcgacagcaccgagugcagcaaccugcugcugcaguacggcagcuucugcacccagcugaaccgggcccugaccggcaucgccguggagcaggacaagaacacccaggagguguucgcccaggugaagcagaucuacaagaccccucccaucaaggacuucggcggcuucaacuucagccagauccugcccgaccccagcaagcccagcaagcggagcuucaucgaggaccugcuguucaacaaggugacccuagccgacgccggcuucaucaagcaguacggcgacugccucggcgacauagccgcccgggaccugaucugcgcccagaaguucaacggccugaccgugcugccuccccugcugaccgacgagaugaucgcccaguacaccagcgcccuguuagccggaaccaucaccagcggcuggacuuucggcgcuggagccgcucugcagauccccuucgccaugcagauggccuaccgguucaacggcaucggcgugacccagaacgugcuguacgagaaccagaagcugaucgccaaccaguucaacagcgccaucggcaagauccaggacagccugagcagcaccgcuagcgcccugggcaagcugcaggacguggugaaccagaacgcccaggcccugaacacccuggugaagcagcugagcagcaacuucggcgccaucagcagcgugcugaacgacauccugagccggcuggacccucccgaggccgaggugcagaucgaccggcugaucacuggccggcugcagagccugcagaccuacgugacccagcagcugauccgggccgccgagauucgggccagcgccaaccuggccgccaccaagaugagcgagugcgugcugggccagagcaagcggguggacuucugcggcaagggcuaccaccugaugagcuuuccccagagcgcaccccacggagugguguuccugcacgugaccuacgugcccgcccaggagaagaacuucaccaccgccccagccaucugccacgacggcaaggcccacuuuccccgggagggcguguucgugagcaacggcacccacugguucgugacccagcggaacuucuacgagccccagaucaucaccaccgacaacaccuucgugagcggcaacugcgacguggugaucggcaucgugaacaacaccguguacgauccccugcagcccgagcuggacagcuucaaggaggagcuggacaaguacuucaagaaucacaccagccccgacguggaccugggcgacaucagcggcaucaacgccagcguggugaacauccagaaggagaucgaucggcugaacgagguggccaagaaccugaacgagagccugaucgaccugcaggagcugggcaaguacgagcaguacaucaaguggcccugguacaucuggcugggcuucaucgccggccugaucgccaucgugauggugaccaucaugcugugcugcaugaccagcugcugcagcugccugaagggcuguugcagcugcggcagcugcugcaaguucgacgaggacgacagcgagcccgugcugaagggcgugaagcugcacuacaccugaggacuaguuauaagacugacuagcccgaugggccucccaacgggcccuccuccccuccuugcaccgagauuaauagaucucaaaggcucuuuucagagccaccaaaaaaaaaaaaaaaaaaaaaaaaaaaaaaaaaaaaaaaaaaaaaaaaaaaaaaaaaaaaaaaaaaaaaaaaaaaaaaaaaaaaaaaaaaaaaaaaaaaaa

SEQ ID NO: 24438 - RNA, 4041 nt, Artificial Sequence
  SARS-CoV-2/Wuhan/WIV05/2019__EPI_ISL_402128 spike protein mRNA gc (1-1273)(K986P_V987P_N501Y_D614G)
aggagaaagcuuaccauguucguguuccuggugcugcugccccuggugagcagccagugcgugaaccugaccacccggacccagcugccaccagccuacaccaacagcuucacccggggcgucuacuaccccgacaagguguuccggagcagcguccugcacagcacccaggaccuguuccugcccuucuucagcaacgugaccugguuccacgccauccacgugagcggcaccaacggcaccaagcgguucgacaaccccgugcugcccuucaacgacggcguguacuucgccagcaccgagaagagcaacaucauccggggcuggaucuucggcaccacccuggacagcaagacccagagccugcugaucgugaauaacgccaccaacguggugaucaaggugugcgaguuccaguucugcaacgaccccuuccugggcguguacuaccacaagaacaacaagagcuggauggagagcgaguuccggguguacagcagcgccaacaacugcaccuucgaguacgugagccagcccuuccugauggaccuggagggcaagcagggcaacuucaagaaccugcgggaguucguguucaagaacaucgacggcuacuucaagaucuacagcaagcacaccccaaucaaccuggugcgggaucugccccagggcuucucagcccuggagccccugguggaccugcccaucggcaucaacaucacccgguuccagacccugcuggcccugcaccggagcuaccugaccccaggcgacagcagcagcggguggacagcaggcgcggcugcuuacuacgugggcuaccugcagccccggaccuuccugcugaaguacaacgagaacggcaccaucaccgacgccguggacugcgcccuggacccucugagcgagaccaagugcacccugaagagcuucaccguggagaagggcaucuaccagaccagcaacuuccgggugcagcccaccgagagcaucgugcgguuccccaacaucaccaaccugugccccuucggcgagguguucaacgccacccgguucgccagcguguacgccuggaaccggaagcggaucagcaacugcguggccgacuacagcgugcuguacaacagcgccagcuucagcaccuucaagugcuacggcgugagccccaccaagcugaacgaccugugcuucaccaacguguacgccgacagcuucgugauccguggcgacgaggugcggcagaucgcacccggccagacaggcaagaucgccgacuacaacuacaagcugcccgacgacuucaccggcugcgugaucgccuggaacagcaacaaccucgacagcaaggugggcggcaacuacaacuaccuguaccggcuguuccggaagagcaaccugaagcccuucgagcgggacaucagcaccgagaucuaccaagccggcuccaccccuugcaacggcguggagggcuucaacugcuacuucccucugcagagcuacggcuuccagcccaccuacggcgugggcuaccagcccuaccgggugguggugcugagcuucgagcugcugcacgccccagccaccguguguggccccaagaagagcaccaaccuggugaagaacaagugcgugaacuucaacuucaacggccuuaccggcaccggcgugcugaccgagagcaacaagaaauuccugcccuuucagcaguucggccgggacaucgccgacaccaccgacgcugugcgggauccccagacccuggagauccuggacaucaccccuugcagcuucggcggcgugagcgugaucaccccaggcaccaacaccagcaaccagguggccgugcuguaccagggcgugaacugcaccgaggugcccguggccauccacgccgaccagcugacacccaccuggcgggucuacagcaccggcagcaacguguuccagacccgggccgguugccugaucggcgccgagcacgugaacaacagcuacgagugcgacauccccaucggcgccggcaucugugccagcuaccagacccagaccaauucaccccggagggcaaggagcguggccagccagagcaucaucgccuacaccaugagccugggcgccgagaacagcguggccuacagcaacaacagcaucgccauccccaccaacuucaccaucagcgugaccaccgagauucugcccgugagcaugaccaagaccagcguggacugcaccauguacaucugcggcgacagcaccgagugcagcaaccugcugcugcaguacggcagcuucugcacccagcugaaccgggcccugaccggcaucgccguggagcaggacaagaacacccaggagguguucgcccaggugaagcagaucuacaagaccccucccaucaaggacuucggcggcuucaacuucagccagauccugcccgaccccagcaagcccagcaagcggagcuucaucgaggaccugcuguucaacaaggugacccuagccgacgccggcuucaucaagcaguacggcgacugccucggcgacauagccgcccgggaccugaucugcgcccagaaguucaacggccugaccgugcugccuccccugcugaccgacgagaugaucgcccaguacaccagcgcccuguuagccggaaccaucaccagcggcuggacuuucggcgcuggagccgcucugcagauccccuucgccaugcagauggccuaccgguucaacggcaucggcgugacccagaacgugcuguacgagaaccagaagcugaucgccaaccaguucaacagcgccaucggcaagauccaggacagccugagcagcaccgcuagcgcccugggcaagcugcaggacguggugaaccagaacgcccaggcccugaacacccuggugaagcagcugagcagcaacuucggcgccaucagcagcgugcugaacgacauccugagccggcuggacccucccgaggccgaggugcagaucgaccggcugaucacuggccggcugcagagccugcagaccuacgugacccagcagcugauccgggccgccgagauucgggccagcgccaaccuggccgccaccaagaugagcgagugcgugcugggccagagcaagcggguggacuucugcggcaagggcuaccaccugaugagcuuuccccagagcgcaccccacggagugguguuccugcacgugaccuacgugcccgcccaggagaagaacuucaccaccgccccagccaucugccacgacggcaaggcccacuuuccccgggagggcguguucgugagcaacggcacccacugguucgugacccagcggaacuucuacgagccccagaucaucaccaccgacaacaccuucgugagcggcaacugcgacguggugaucggcaucgugaacaacaccguguacgauccccugcagcccgagcuggacagcuucaaggaggagcuggacaaguacuucaagaaucacaccagccccgacguggaccugggcgacaucagcggcaucaacgccagcguggugaacauccagaaggagaucgaucggcugaacgagguggccaagaaccugaacgagagccugaucgaccugcaggagcugggcaaguacgagcaguacaucaaguggcccugguacaucuggcugggcuucaucgccggccugaucgccaucgugauggugaccaucaugcugugcugcaugaccagcugcugcagcugccugaagggcuguugcagcugcggcagcugcugcaaguucgacgaggacgacagcgagcccgugcugaagggcgugaagcugcacuacaccugaggacuaguuauaagacugacuagcccgaugggccucccaacgggcccuccuccccuccuugcaccgagauuaauagaucucaaaggcucuuuucagagccaccaaaaaaaaaaaaaaaaaaaaaaaaaaaaaaaaaaaaaaaaaaaaaaaaaaaaaaaaaaaaaaaaaaaaaaaaaaaaaaaaaaaaaaaaaaaaaaaaaaaaa

SEQ ID NO: 24439 - RNA, 4035 nt, Artificial Sequence
  SARS-CoV-2/Wuhan/WIV05/2019__EPI_ISL_402128 spike protein mRNA gc (1-1273)(K986P_V987P_H69del_V70del_D614G)
aggagaaagcuuaccauguucguguuccuggugcugcugccccuggugagcagccagugcgugaaccugaccacccggacccagcugccaccagccuacaccaacagcuucacccggggcgucuacuaccccgacaagguguuccggagcagcguccugcacagcacccaggaccuguuccugcccuucuucagcaacgugaccugguuccacgccaucagcggcaccaacggcaccaagcgguucgacaaccccgugcugcccuucaacgacggcguguacuucgccagcaccgagaagagcaacaucauccggggcuggaucuucggcaccacccuggacagcaagacccagagccugcugaucgugaauaacgccaccaacguggugaucaaggugugcgaguuccaguucugcaacgaccccuuccugggcguguacuaccacaagaacaacaagagcuggauggagagcgaguuccggguguacagcagcgccaacaacugcaccuucgaguacgugagccagcccuuccugauggaccuggagggcaagcagggcaacuucaagaaccugcgggaguucguguucaagaacaucgacggcuacuucaagaucuacagcaagcacaccccaaucaaccuggugcgggaucugccccagggcuucucagcccuggagccccugguggaccugcccaucggcaucaacaucacccgguuccagacccugcuggcccugcaccggagcuaccugaccccaggcgacagcagcagcggguggacagcaggcgcggcugcuuacuacgugggcuaccugcagccccggaccuuccugcugaaguacaacgagaacggcaccaucaccgacgccguggacugcgcccuggacccucugagcgagaccaagugcacccugaagagcuucaccguggagaagggcaucuaccagaccagcaacuuccgggugcagcccaccgagagcaucgugcgguuccccaacaucaccaaccugugccccuucggcgagguguucaacgccacccgguucgccagcguguacgccuggaaccggaagcggaucagcaacugcguggccgacuacagcgugcuguacaacagcgccagcuucagcaccuucaagugcuacggcgugagccccaccaagcugaacgaccugugcuucaccaacguguacgccgacagcuucgugauccguggcgacgaggugcggcagaucgcacccggccagacaggcaagaucgccgacuacaacuacaagcugcccgacgacuucaccggcugcgugaucgccuggaacagcaacaaccucgacagcaaggugggcggcaacuacaacuaccuguaccggcuguuccggaagagcaaccugaagcccuucgagcgggacaucagcaccgagaucuaccaagccggcuccaccccuugcaacggcguggagggcuucaacugcuacuucccucugcagagcuacggcuuccagcccaccaacggcgugggcuaccagcccuaccgggugguggugcugagcuucgagcugcugcacgccccagccaccguguguggccccaagaagagcaccaaccuggugaagaacaagugcgugaacuucaacuucaacggccuuaccggcaccggcgugcugaccgagagcaacaagaaauuccugcccuuucagcaguucggccgggacaucgccgacaccaccgacgcugugcgggauccccagacccuggagauccuggacaucaccccuugcagcuucggcggcgugagcgugaucaccccaggcaccaacaccagcaaccagguggccgugcuguaccagggcgugaacugcaccgaggugcccguggccauccacgccgaccagcugacacccaccuggcgggucuacagcaccggcagcaacguguuccagacccgggccgguugccugaucggcgccgagcacgugaacaacagcuacgagugcgacauccccaucggcgccggcaucugugccagcuaccagacccagaccaauucaccccggagggcaaggagcguggccagccagagcaucaucgccuacaccaugagccugggcgccgagaacagcguggccuacagcaacaacagcaucgccauccccaccaacuucaccaucagcgugaccaccgagauucugcccgugagcaugaccaagaccagcguggacugcaccauguacaucugcggcgacagcaccgagugcagcaaccugcugcugcaguacggcagcuucugcacccagcugaaccgggcccugaccggcaucgccguggagcaggacaagaacacccaggagguguucgcccaggugaagcagaucuacaagaccccucccaucaaggacuucggcggcuucaacuucagccagauccugcccgaccccagcaagcccagcaagcggagcuucaucgaggaccugcuguucaacaaggugacccuagccgacgccggcuucaucaagcaguacggcgacugccucggcgacauagccgcccgggaccugaucugcgcccagaaguucaacggccugaccgugcugccuccccugcugaccgacgagaugaucgcccaguacaccagcgcccuguuagccggaaccaucaccagcggcuggacuuucggcgcuggagccgcucugcagauccccuucgccaugcagauggccuaccgguucaacggcaucggcgugacccagaacgugcuguacgagaaccagaagcugaucgccaaccaguucaacagcgccaucggcaagauccaggacagccugagcagcaccgcuagcgcccugggcaagcugcaggacguggugaaccagaacgcccaggcccugaacacccuggugaagcagcugagcagcaacuucggcgccaucagcagcgugcugaacgacauccugagccggcuggacccucccgaggccgaggugcagaucgaccggcugaucacuggccggcugcagagccugcagaccuacgugacccagcagcugauccgggccgccgagauucgggccagcgccaaccuggccgccaccaagaugagcgagugcgugcugggccagagcaagcggguggacuucugcggcaagggcuaccaccugaugagcuuuccccagagcgcaccccacggagugguguuccugcacgugaccuacgugcccgcccaggagaagaacuucaccaccgccccagccaucugccacgacggcaaggcccacuuuccccgggagggcguguucgugagcaacggcacccacugguucgugacccagcggaacuucuacgagccccagaucaucaccaccgacaacaccuucgugagcggcaacugcgacguggugaucggcaucgugaacaacaccguguacgauccccugcagcccgagcuggacagcuucaaggaggagcuggacaaguacuucaagaaucacaccagccccgacguggaccugggcgacaucagcggcaucaacgccagcguggugaacauccagaaggagaucgaucggcugaacgagguggccaagaaccugaacgagagccugaucgaccugcaggagcugggcaaguacgagcaguacaucaaguggcccugguacaucuggcugggcuucaucgccggccugaucgccaucgugauggugaccaucaugcugugcugcaugaccagcugcugcagcugccugaagggcuguugcagcugcggcagcugcugcaaguucgacgaggacgacagcgagcccgugcugaagggcgugaagcugcacuacaccugaggacuaguuauaagacugacuagcccgaugggccucccaacgggcccuccuccccuccuugcaccgagauuaauagaucucaaaggcucuuuucagagccaccaaaaaaaaaaaaaaaaaaaaaaaaaaaaaaaaaaaaaaaaaaaaaaaaaaaaaaaaaaaaaaaaaaaaaaaaaaaaaaaaaaaaaaaaaaaaaaaaaaaaa

SEQ ID NO: 24440 - RNA, 4041 nt, Artificial Sequence
  SARS-CoV-2/Wuhan/WIV05/2019__EPI_ISL_402128 spike protein mRNA gc (1-1273)(K986P_V987P_Y453F_D614G)
aggagaaagcuuaccauguucguguuccuggugcugcugccccuggugagcagccagugcgugaaccugaccacccggacccagcugccaccagccuacaccaacagcuucacccggggcgucuacuaccccgacaagguguuccggagcagcguccugcacagcacccaggaccuguuccugcccuucuucagcaacgugaccugguuccacgccauccacgugagcggcaccaacggcaccaagcgguucgacaaccccgugcugcccuucaacgacggcguguacuucgccagcaccgagaagagcaacaucauccggggcuggaucuucggcaccacccuggacagcaagacccagagccugcugaucgugaauaacgccaccaacguggugaucaaggugugcgaguuccaguucugcaacgaccccuuccugggcguguacuaccacaagaacaacaagagcuggauggagagcgaguuccggguguacagcagcgccaacaacugcaccuucgaguacgugagccagcccuuccugauggaccuggagggcaagcagggcaacuucaagaaccugcgggaguucguguucaagaacaucgacggcuacuucaagaucuacagcaagcacaccccaaucaaccuggugcgggaucugccccagggcuucucagcccuggagccccugguggaccugcccaucggcaucaacaucacccgguuccagacccugcuggcccugcaccggagcuaccugaccccaggcgacagcagcagcggguggacagcaggcgcggcugcuuacuacgugggcuaccugcagccccggaccuuccugcugaaguacaacgagaacggcaccaucaccgacgccguggacugcgcccuggacccucugagcgagaccaagugcacccugaagagcuucaccguggagaagggcaucuaccagaccagcaacuuccgggugcagcccaccgagagcaucgugcgguuccccaacaucaccaaccugugccccuucggcgagguguucaacgccacccgguucgccagcguguacgccuggaaccggaagcggaucagcaacugcguggccgacuacagcgugcuguacaacagcgccagcuucagcaccuucaagugcuacggcgugagccccaccaagcugaacgaccugugcuucaccaacguguacgccgacagcuucgugauccguggcgacgaggugcggcagaucgcacccggccagacaggcaagaucgccgacuacaacuacaagcugcccgacgacuucaccggcugcgugaucgccuggaacagcaacaaccucgacagcaaggugggcggcaacuacaacuaccuguuccggcuguuccggaagagcaaccugaagcccuucgagcgggacaucagcaccgagaucuaccaagccggcuccaccccuugcaacggcguggagggcuucaacugcuacuucccucugcagagcuacggcuuccagcccaccaacggcgugggcuaccagcccuaccgggugguggugcugagcuucgagcugcugcacgccccagccaccguguguggccccaagaagagcaccaaccuggugaagaacaagugcgugaacuucaacuucaacggccuuaccggcaccggcgugcugaccgagagcaacaagaaauuccugcccuuucagcaguucggccgggacaucgccgacaccaccgacgcugugcgggauccccagacccuggagauccuggacaucaccccuugcagcuucggcggcgugagcgugaucaccccaggcaccaacaccagcaaccagguggccgugcuguaccagggcgugaacugcaccgaggugcccguggccauccacgccgaccagcugacacccaccuggcgggucuacagcaccggcagcaacguguuccagacccgggccgguugccugaucggcgccgagcacgugaacaacagcuacgagugcgacauccccaucggcgccggcaucugugccagcuaccagacccagaccaauucaccccggagggcaaggagcguggccagccagagcaucaucgccuacaccaugagccugggcgccgagaacagcguggccuacagcaacaacagcaucgccauccccaccaacuucaccaucagcgugaccaccgagauucugcccgugagcaugaccaagaccagcguggacugcaccauguacaucugcggcgacagcaccgagugcagcaaccugcugcugcaguacggcagcuucugcacccagcugaaccgggcccugaccggcaucgccguggagcaggacaagaacacccaggagguguucgcccaggugaagcagaucuacaagaccccucccaucaaggacuucggcggcuucaacuucagccagauccugcccgaccccagcaagcccagcaagcggagcuucaucgaggaccugcuguucaacaaggugacccuagccgacgccggcuucaucaagcaguacggcgacugccucggcgacauagccgcccgggaccugaucugcgcccagaaguucaacggccugaccgugcugccuccccugcugaccgacgagaugaucgcccaguacaccagcgcccuguuagccggaaccaucaccagcggcuggacuuucggcgcuggagccgcucugcagauccccuucgccaugcagauggccuaccgguucaacggcaucggcgugacccagaacgugcuguacgagaaccagaagcugaucgccaaccaguucaacagcgccaucggcaagauccaggacagccugagcagcaccgcuagcgcccugggcaagcugcaggacguggugaaccagaacgcccaggcccugaacacccuggugaagcagcugagcagcaacuucggcgccaucagcagcgugcugaacgacauccugagccggcuggacccucccgaggccgaggugcagaucgaccggcugaucacuggccggcugcagagccugcagaccuacgugacccagcagcugauccgggccgccgagauucgggccagcgccaaccuggccgccaccaagaugagcgagugcgugcugggccagagcaagcggguggacuucugcggcaagggcuaccaccugaugagcuuuccccagagcgcaccccacggagugguguuccugcacgugaccuacgugcccgcccaggagaagaacuucaccaccgccccagccaucugccacgacggcaaggcccacuuuccccgggagggcguguucgugagcaacggcacccacugguucgugacccagcggaacuucuacgagccccagaucaucaccaccgacaacaccuucgugagcggcaacugcgacguggugaucggcaucgugaacaacaccguguacgauccccugcagcccgagcuggacagcuucaaggaggagcuggacaaguacuucaagaaucacaccagccccgacguggaccugggcgacaucagcggcaucaacgccagcguggugaacauccagaaggagaucgaucggcugaacgagguggccaagaaccugaacgagagccugaucgaccugcaggagcugggcaaguacgagcaguacaucaaguggcccugguacaucuggcugggcuucaucgccggccugaucgccaucgugauggugaccaucaugcugugcugcaugaccagcugcugcagcugccugaagggcuguugcagcugcggcagcugcugcaaguucgacgaggacgacagcgagcccgugcugaagggcgugaagcugcacuacaccugaggacuaguuauaagacugacuagcccgaugggccucccaacgggcccuccuccccuccuugcaccgagauuaauagaucucaaaggcucuuuucagagccaccaaaaaaaaaaaaaaaaaaaaaaaaaaaaaaaaaaaaaaaaaaaaaaaaaaaaaaaaaaaaaaaaaaaaaaaaaaaaaaaaaaaaaaaaaaaaaaaaaaaaa

SEQ ID NO: 24441 - RNA, 4041 nt, Artificial Sequence
  SARS-CoV-2/Wuhan/WIV05/2019__EPI_ISL_402128 spike protein mRNA gc (1-1273)(K986P_V987P_D614G_I692V)
aggagaaagcuuaccauguucguguuccuggugcugcugccccuggugagcagccagugcgugaaccugaccacccggacccagcugccaccagccuacaccaacagcuucacccggggcgucuacuaccccgacaagguguuccggagcagcguccugcacagcacccaggaccuguuccugcccuucuucagcaacgugaccugguuccacgccauccacgugagcggcaccaacggcaccaagcgguucgacaaccccgugcugcccuucaacgacggcguguacuucgccagcaccgagaagagcaacaucauccggggcuggaucuucggcaccacccuggacagcaagacccagagccugcugaucgugaauaacgccaccaacguggugaucaaggugugcgaguuccaguucugcaacgaccccuuccugggcguguacuaccacaagaacaacaagagcuggauggagagcgaguuccggguguacagcagcgccaacaacugcaccuucgaguacgugagccagcccuuccugauggaccuggagggcaagcagggcaacuucaagaaccugcgggaguucguguucaagaacaucgacggcuacuucaagaucuacagcaagcacaccccaaucaaccuggugcgggaucugccccagggcuucucagcccuggagccccugguggaccugcccaucggcaucaacaucacccgguuccagacccugcuggcccugcaccggagcuaccugaccccaggcgacagcagcagcggguggacagcaggcgcggcugcuuacuacgugggcuaccugcagccccggaccuuccugcugaaguacaacgagaacggcaccaucaccgacgccguggacugcgcccuggacccucugagcgagaccaagugcacccugaagagcuucaccguggagaagggcaucuaccagaccagcaacuuccgggugcagcccaccgagagcaucgugcgguuccccaacaucaccaaccugugccccuucggcgagguguucaacgccacccgguucgccagcguguacgccuggaaccggaagcggaucagcaacugcguggccgacuacagcgugcuguacaacagcgccagcuucagcaccuucaagugcuacggcgugagccccaccaagcugaacgaccugugcuucaccaacguguacgccgacagcuucgugauccguggcgacgaggugcggcagaucgcacccggccagacaggcaagaucgccgacuacaacuacaagcugcccgacgacuucaccggcugcgugaucgccuggaacagcaacaaccucgacagcaaggugggcggcaacuacaacuaccuguaccggcuguuccggaagagcaaccugaagcccuucgagcgggacaucagcaccgagaucuaccaagccggcuccaccccuugcaacggcguggagggcuucaacugcuacuucccucugcagagcuacggcuuccagcccaccaacggcgugggcuaccagcccuaccgggugguggugcugagcuucgagcugcugcacgccccagccaccguguguggccccaagaagagcaccaaccuggugaagaacaagugcgugaacuucaacuucaacggccuuaccggcaccggcgugcugaccgagagcaacaagaaauuccugcccuuucagcaguucggccgggacaucgccgacaccaccgacgcugugcgggauccccagacccuggagauccuggacaucaccccuugcagcuucggcggcgugagcgugaucaccccaggcaccaacaccagcaaccagguggccgugcuguaccagggcgugaacugcaccgaggugcccguggccauccacgccgaccagcugacacccaccuggcgggucuacagcaccggcagcaacguguuccagacccgggccgguugccugaucggcgccgagcacgugaacaacagcuacgagugcgacauccccaucggcgccggcaucugugccagcuaccagacccagaccaauucaccccggagggcaaggagcguggccagccagagcgugaucgccuacaccaugagccugggcgccgagaacagcguggccuacagcaacaacagcaucgccauccccaccaacuucaccaucagcgugaccaccgagauucugcccgugagcaugaccaagaccagcguggacugcaccauguacaucugcggcgacagcaccgagugcagcaaccugcugcugcaguacggcagcuucugcacccagcugaaccgggcccugaccggcaucgccguggagcaggacaagaacacccaggagguguucgcccaggugaagcagaucuacaagaccccucccaucaaggacuucggcggcuucaacuucagccagauccugcccgaccccagcaagcccagcaagcggagcuucaucgaggaccugcuguucaacaaggugacccuagccgacgccggcuucaucaagcaguacggcgacugccucggcgacauagccgcccgggaccugaucugcgcccagaaguucaacggccugaccgugcugccuccccugcugaccgacgagaugaucgcccaguacaccagcgcccuguuagccggaaccaucaccagcggcuggacuuucggcgcuggagccgcucugcagauccccuucgccaugcagauggccuaccgguucaacggcaucggcgugacccagaacgugcuguacgagaaccagaagcugaucgccaaccaguucaacagcgccaucggcaagauccaggacagccugagcagcaccgcuagcgcccugggcaagcugcaggacguggugaaccagaacgcccaggcccugaacacccuggugaagcagcugagcagcaacuucggcgccaucagcagcgugcugaacgacauccugagccggcuggacccucccgaggccgaggugcagaucgaccggcugaucacuggccggcugcagagccugcagaccuacgugacccagcagcugauccgggccgccgagauucgggccagcgccaaccuggccgccaccaagaugagcgagugcgugcugggccagagcaagcggguggacuucugcggcaagggcuaccaccugaugagcuuuccccagagcgcaccccacggagugguguuccugcacgugaccuacgugcccgcccaggagaagaacuucaccaccgccccagccaucugccacgacggcaaggcccacuuuccccgggagggcguguucgugagcaacggcacccacugguucgugacccagcggaacuucuacgagccccagaucaucaccaccgacaacaccuucgugagcggcaacugcgacguggugaucggcaucgugaacaacaccguguacgauccccugcagcccgagcuggacagcuucaaggaggagcuggacaaguacuucaagaaucacaccagccccgacguggaccugggcgacaucagcggcaucaacgccagcguggugaacauccagaaggagaucgaucggcugaacgagguggccaagaaccugaacgagagccugaucgaccugcaggagcugggcaaguacgagcaguacaucaaguggcccugguacaucuggcugggcuucaucgccggccugaucgccaucgugauggugaccaucaugcugugcugcaugaccagcugcugcagcugccugaagggcuguugcagcugcggcagcugcugcaaguucgacgaggacgacagcgagcccgugcugaagggcgugaagcugcacuacaccugaggacuaguuauaagacugacuagcccgaugggccucccaacgggcccuccuccccuccuugcaccgagauuaauagaucucaaaggcucuuuucagagccaccaaaaaaaaaaaaaaaaaaaaaaaaaaaaaaaaaaaaaaaaaaaaaaaaaaaaaaaaaaaaaaaaaaaaaaaaaaaaaaaaaaaaaaaaaaaaaaaaaaaaa

SEQ ID NO: 24442 - RNA, 4041 nt, Artificial Sequence
  SARS-CoV-2/Wuhan/WIV05/2019__EPI_ISL_402128 spike protein mRNA gc (1-1273)(K986P_V987P_D614G_M1229I)
aggagaaagcuuaccauguucguguuccuggugcugcugccccuggugagcagccagugcgugaaccugaccacccggacccagcugccaccagccuacaccaacagcuucacccggggcgucuacuaccccgacaagguguuccggagcagcguccugcacagcacccaggaccuguuccugcccuucuucagcaacgugaccugguuccacgccauccacgugagcggcaccaacggcaccaagcgguucgacaaccccgugcugcccuucaacgacggcguguacuucgccagcaccgagaagagcaacaucauccggggcuggaucuucggcaccacccuggacagcaagacccagagccugcugaucgugaauaacgccaccaacguggugaucaaggugugcgaguuccaguucugcaacgaccccuuccugggcguguacuaccacaagaacaacaagagcuggauggagagcgaguuccggguguacagcagcgccaacaacugcaccuucgaguacgugagccagcccuuccugauggaccuggagggcaagcagggcaacuucaagaaccugcgggaguucguguucaagaacaucgacggcuacuucaagaucuacagcaagcacaccccaaucaaccuggugcgggaucugccccagggcuucucagcccuggagccccugguggaccugcccaucggcaucaacaucacccgguuccagacccugcuggcccugcaccggagcuaccugaccccaggcgacagcagcagcggguggacagcaggcgcggcugcuuacuacgugggcuaccugcagccccggaccuuccugcugaaguacaacgagaacggcaccaucaccgacgccguggacugcgcccuggacccucugagcgagaccaagugcacccugaagagcuucaccguggagaagggcaucuaccagaccagcaacuuccgggugcagcccaccgagagcaucgugcgguuccccaacaucaccaaccugugccccuucggcgagguguucaacgccacccgguucgccagcguguacgccuggaaccggaagcggaucagcaacugcguggccgacuacagcgugcuguacaacagcgccagcuucagcaccuucaagugcuacggcgugagccccaccaagcugaacgaccugugcuucaccaacguguacgccgacagcuucgugauccguggcgacgaggugcggcagaucgcacccggccagacaggcaagaucgccgacuacaacuacaagcugcccgacgacuucaccggcugcgugaucgccuggaacagcaacaaccucgacagcaaggugggcggcaacuacaacuaccuguaccggcuguuccggaagagcaaccugaagcccuucgagcgggacaucagcaccgagaucuaccaagccggcuccaccccuugcaacggcguggagggcuucaacugcuacuucccucugcagagcuacggcuuccagcccaccaacggcgugggcuaccagcccuaccgggugguggugcugagcuucgagcugcugcacgccccagccaccguguguggccccaagaagagcaccaaccuggugaagaacaagugcgugaacuucaacuucaacggccuuaccggcaccggcgugcugaccgagagcaacaagaaauuccugcccuuucagcaguucggccgggacaucgccgacaccaccgacgcugugcgggauccccagacccuggagauccuggacaucaccccuugcagcuucggcggcgugagcgugaucaccccaggcaccaacaccagcaaccagguggccgugcuguaccagggcgugaacugcaccgaggugcccguggccauccacgccgaccagcugacacccaccuggcgggucuacagcaccggcagcaacguguuccagacccgggccgguugccugaucggcgccgagcacgugaacaacagcuacgagugcgacauccccaucggcgccggcaucugugccagcuaccagacccagaccaauucaccccggagggcaaggagcguggccagccagagcaucaucgccuacaccaugagccugggcgccgagaacagcguggccuacagcaacaacagcaucgccauccccaccaacuucaccaucagcgugaccaccgagauucugcccgugagcaugaccaagaccagcguggacugcaccauguacaucugcggcgacagcaccgagugcagcaaccugcugcugcaguacggcagcuucugcacccagcugaaccgggcccugaccggcaucgccguggagcaggacaagaacacccaggagguguucgcccaggugaagcagaucuacaagaccccucccaucaaggacuucggcggcuucaacuucagccagauccugcccgaccccagcaagcccagcaagcggagcuucaucgaggaccugcuguucaacaaggugacccuagccgacgccggcuucaucaagcaguacggcgacugccucggcgacauagccgcccgggaccugaucugcgcccagaaguucaacggccugaccgugcugccuccccugcugaccgacgagaugaucgcccaguacaccagcgcccuguuagccggaaccaucaccagcggcuggacuuucggcgcuggagccgcucugcagauccccuucgccaugcagauggccuaccgguucaacggcaucggcgugacccagaacgugcuguacgagaaccagaagcugaucgccaaccaguucaacagcgccaucggcaagauccaggacagccugagcagcaccgcuagcgcccugggcaagcugcaggacguggugaaccagaacgcccaggcccugaacacccuggugaagcagcugagcagcaacuucggcgccaucagcagcgugcugaacgacauccugagccggcuggacccucccgaggccgaggugcagaucgaccggcugaucacuggccggcugcagagccugcagaccuacgugacccagcagcugauccgggccgccgagauucgggccagcgccaaccuggccgccaccaagaugagcgagugcgugcugggccagagcaagcggguggacuucugcggcaagggcuaccaccugaugagcuuuccccagagcgcaccccacggagugguguuccugcacgugaccuacgugcccgcccaggagaagaacuucaccaccgccccagccaucugccacgacggcaaggcccacuuuccccgggagggcguguucgugagcaacggcacccacugguucgugacccagcggaacuucuacgagccccagaucaucaccaccgacaacaccuucgugagcggcaacugcgacguggugaucggcaucgugaacaacaccguguacgauccccugcagcccgagcuggacagcuucaaggaggagcuggacaaguacuucaagaaucacaccagccccgacguggaccugggcgacaucagcggcaucaacgccagcguggugaacauccagaaggagaucgaucggcugaacgagguggccaagaaccugaacgagagccugaucgaccugcaggagcugggcaaguacgagcaguacaucaaguggcccugguacaucuggcugggcuucaucgccggccugaucgccaucgugaucgugaccaucaugcugugcugcaugaccagcugcugcagcugccugaagggcuguugcagcugcggcagcugcugcaaguucgacgaggacgacagcgagcccgugcugaagggcgugaagcugcacuacaccugaggacuaguuauaagacugacuagcccgaugggccucccaacgggcccuccuccccuccuugcaccgagauuaauagaucucaaaggcucuuuucagagccaccaaaaaaaaaaaaaaaaaaaaaaaaaaaaaaaaaaaaaaaaaaaaaaaaaaaaaaaaaaaaaaaaaaaaaaaaaaaaaaaaaaaaaaaaaaaaaaaaaaaaa

SEQ ID NO: 24443 - RNA, 4035 nt, Artificial Sequence
  SARS-CoV-2/Wuhan/WIV05/2019__EPI_ISL_402128 spike protein mRNA gc (1-1273)(K986P_V987P_H69del_V70del_A222V_Y453F_S477N_D614G_I692V)
aggagaaagcuuaccauguucguguuccuggugcugcugccccuggugagcagccagugcgugaaccugaccacccggacccagcugccaccagccuacaccaacagcuucacccggggcgucuacuaccccgacaagguguuccggagcagcguccugcacagcacccaggaccuguuccugcccuucuucagcaacgugaccugguuccacgccaucagcggcaccaacggcaccaagcgguucgacaaccccgugcugcccuucaacgacggcguguacuucgccagcaccgagaagagcaacaucauccggggcuggaucuucggcaccacccuggacagcaagacccagagccugcugaucgugaauaacgccaccaacguggugaucaaggugugcgaguuccaguucugcaacgaccccuuccugggcguguacuaccacaagaacaacaagagcuggauggagagcgaguuccggguguacagcagcgccaacaacugcaccuucgaguacgugagccagcccuuccugauggaccuggagggcaagcagggcaacuucaagaaccugcgggaguucguguucaagaacaucgacggcuacuucaagaucuacagcaagcacaccccaaucaaccuggugcgggaucugccccagggcuucucagugcuggagccccugguggaccugcccaucggcaucaacaucacccgguuccagacccugcuggcccugcaccggagcuaccugaccccaggcgacagcagcagcggguggacagcaggcgcggcugcuuacuacgugggcuaccugcagccccggaccuuccugcugaaguacaacgagaacggcaccaucaccgacgccguggacugcgcccuggacccucugagcgagaccaagugcacccugaagagcuucaccguggagaagggcaucuaccagaccagcaacuuccgggugcagcccaccgagagcaucgugcgguuccccaacaucaccaaccugugccccuucggcgagguguucaacgccacccgguucgccagcguguacgccuggaaccggaagcggaucagcaacugcguggccgacuacagcgugcuguacaacagcgccagcuucagcaccuucaagugcuacggcgugagccccaccaagcugaacgaccugugcuucaccaacguguacgccgacagcuucgugauccguggcgacgaggugcggcagaucgcacccggccagacaggcaagaucgccgacuacaacuacaagcugcccgacgacuucaccggcugcgugaucgccuggaacagcaacaaccucgacagcaaggugggcggcaacuacaacuaccuguuccggcuguuccggaagagcaaccugaagcccuucgagcgggacaucagcaccgagaucuaccaagccggcaacaccccuugcaacggcguggagggcuucaacugcuacuucccucugcagagcuacggcuuccagcccaccaacggcgugggcuaccagcccuaccgggugguggugcugagcuucgagcugcugcacgccccagccaccguguguggccccaagaagagcaccaaccuggugaagaacaagugcgugaacuucaacuucaacggccuuaccggcaccggcgugcugaccgagagcaacaagaaauuccugcccuuucagcaguucggccgggacaucgccgacaccaccgacgcugugcgggauccccagacccuggagauccuggacaucaccccuugcagcuucggcggcgugagcgugaucaccccaggcaccaacaccagcaaccagguggccgugcuguaccagggcgugaacugcaccgaggugcccguggccauccacgccgaccagcugacacccaccuggcgggucuacagcaccggcagcaacguguuccagacccgggccgguugccugaucggcgccgagcacgugaacaacagcuacgagugcgacauccccaucggcgccggcaucugugccagcuaccagacccagaccaauucaccccggagggcaaggagcguggccagccagagcgugaucgccuacaccaugagccugggcgccgagaacagcguggccuacagcaacaacagcaucgccauccccaccaacuucaccaucagcgugaccaccgagauucugcccgugagcaugaccaagaccagcguggacugcaccauguacaucugcggcgacagcaccgagugcagcaaccugcugcugcaguacggcagcuucugcacccagcugaaccgggcccugaccggcaucgccguggagcaggacaagaacacccaggagguguucgcccaggugaagcagaucuacaagaccccucccaucaaggacuucggcggcuucaacuucagccagauccugcccgaccccagcaagcccagcaagcggagcuucaucgaggaccugcuguucaacaaggugacccuagccgacgccggcuucaucaagcaguacggcgacugccucggcgacauagccgcccgggaccugaucugcgcccagaaguucaacggccugaccgugcugccuccccugcugaccgacgagaugaucgcccaguacaccagcgcccuguuagccggaaccaucaccagcggcuggacuuucggcgcuggagccgcucugcagauccccuucgccaugcagauggccuaccgguucaacggcaucggcgugacccagaacgugcuguacgagaaccagaagcugaucgccaaccaguucaacagcgccaucggcaagauccaggacagccugagcagcaccgcuagcgcccugggcaagcugcaggacguggugaaccagaacgcccaggcccugaacacccuggugaagcagcugagcagcaacuucggcgccaucagcagcgugcugaacgacauccugagccggcuggacccucccgaggccgaggugcagaucgaccggcugaucacuggccggcugcagagccugcagaccuacgugacccagcagcugauccgggccgccgagauucgggccagcgccaaccuggccgccaccaagaugagcgagugcgugcugggccagagcaagcggguggacuucugcggcaagggcuaccaccugaugagcuuuccccagagcgcaccccacggagugguguuccugcacgugaccuacgugcccgcccaggagaagaacuucaccaccgccccagccaucugccacgacggcaaggcccacuuuccccgggagggcguguucgugagcaacggcacccacugguucgugacccagcggaacuucuacgagccccagaucaucaccaccgacaacaccuucgugagcggcaacugcgacguggugaucggcaucgugaacaacaccguguacgauccccugcagcccgagcuggacagcuucaaggaggagcuggacaaguacuucaagaaucacaccagccccgacguggaccugggcgacaucagcggcaucaacgccagcguggugaacauccagaaggagaucgaucggcugaacgagguggccaagaaccugaacgagagccugaucgaccugcaggagcugggcaaguacgagcaguacaucaaguggcccugguacaucuggcugggcuucaucgccggccugaucgccaucgugauggugaccaucaugcugugcugcaugaccagcugcugcagcugccugaagggcuguugcagcugcggcagcugcugcaaguucgacgaggacgacagcgagcccgugcugaagggcgugaagcugcacuacaccugaggacuaguuauaagacugacuagcccgaugggccucccaacgggcccuccuccccuccuugcaccgagauuaauagaucucaaaggcucuuuucagagccaccaaaaaaaaaaaaaaaaaaaaaaaaaaaaaaaaaaaaaaaaaaaaaaaaaaaaaaaaaaaaaaaaaaaaaaaaaaaaaaaaaaaaaaaaaaaaaaaaaaaaa

SEQ ID NO: 24444 - RNA, 4035 nt, Artificial Sequence
  SARS-CoV-2/Wuhan/WIV05/2019__EPI_ISL_402128 spike protein mRNA gc (1-1273)(K986P_V987P_H69del_V70del_Y453F_D614G_I692V_M1229I)
aggagaaagcuuaccauguucguguuccuggugcugcugccccuggugagcagccagugcgugaaccugaccacccggacccagcugccaccagccuacaccaacagcuucacccggggcgucuacuaccccgacaagguguuccggagcagcguccugcacagcacccaggaccuguuccugcccuucuucagcaacgugaccugguuccacgccaucagcggcaccaacggcaccaagcgguucgacaaccccgugcugcccuucaacgacggcguguacuucgccagcaccgagaagagcaacaucauccggggcuggaucuucggcaccacccuggacagcaagacccagagccugcugaucgugaauaacgccaccaacguggugaucaaggugugcgaguuccaguucugcaacgaccccuuccugggcguguacuaccacaagaacaacaagagcuggauggagagcgaguuccggguguacagcagcgccaacaacugcaccuucgaguacgugagccagcccuuccugauggaccuggagggcaagcagggcaacuucaagaaccugcgggaguucguguucaagaacaucgacggcuacuucaagaucuacagcaagcacaccccaaucaaccuggugcgggaucugccccagggcuucucagcccuggagccccugguggaccugcccaucggcaucaacaucacccgguuccagacccugcuggcccugcaccggagcuaccugaccccaggcgacagcagcagcggguggacagcaggcgcggcugcuuacuacgugggcuaccugcagccccggaccuuccugcugaaguacaacgagaacggcaccaucaccgacgccguggacugcgcccuggacccucugagcgagaccaagugcacccugaagagcuucaccguggagaagggcaucuaccagaccagcaacuuccgggugcagcccaccgagagcaucgugcgguuccccaacaucaccaaccugugccccuucggcgagguguucaacgccacccgguucgccagcguguacgccuggaaccggaagcggaucagcaacugcguggccgacuacagcgugcuguacaacagcgccagcuucagcaccuucaagugcuacggcgugagccccaccaagcugaacgaccugugcuucaccaacguguacgccgacagcuucgugauccguggcgacgaggugcggcagaucgcacccggccagacaggcaagaucgccgacuacaacuacaagcugcccgacgacuucaccggcugcgugaucgccuggaacagcaacaaccucgacagcaaggugggcggcaacuacaacuaccuguuccggcuguuccggaagagcaaccugaagcccuucgagcgggacaucagcaccgagaucuaccaagccggcuccaccccuugcaacggcguggagggcuucaacugcuacuucccucugcagagcuacggcuuccagcccaccaacggcgugggcuaccagcccuaccgggugguggugcugagcuucgagcugcugcacgccccagccaccguguguggccccaagaagagcaccaaccuggugaagaacaagugcgugaacuucaacuucaacggccuuaccggcaccggcgugcugaccgagagcaacaagaaauuccugcccuuucagcaguucggccgggacaucgccgacaccaccgacgcugugcgggauccccagacccuggagauccuggacaucaccccuugcagcuucggcggcgugagcgugaucaccccaggcaccaacaccagcaaccagguggccgugcuguaccagggcgugaacugcaccgaggugcccguggccauccacgccgaccagcugacacccaccuggcgggucuacagcaccggcagcaacguguuccagacccgggccgguugccugaucggcgccgagcacgugaacaacagcuacgagugcgacauccccaucggcgccggcaucugugccagcuaccagacccagaccaauucaccccggagggcaaggagcguggccagccagagcgugaucgccuacaccaugagccugggcgccgagaacagcguggccuacagcaacaacagcaucgccauccccaccaacuucaccaucagcgugaccaccgagauucugcccgugagcaugaccaagaccagcguggacugcaccauguacaucugcggcgacagcaccgagugcagcaaccugcugcugcaguacggcagcuucugcacccagcugaaccgggcccugaccggcaucgccguggagcaggacaagaacacccaggagguguucgcccaggugaagcagaucuacaagaccccucccaucaaggacuucggcggcuucaacuucagccagauccugcccgaccccagcaagcccagcaagcggagcuucaucgaggaccugcuguucaacaaggugacccuagccgacgccggcuucaucaagcaguacggcgacugccucggcgacauagccgcccgggaccugaucugcgcccagaaguucaacggccugaccgugcugccuccccugcugaccgacgagaugaucgcccaguacaccagcgcccuguuagccggaaccaucaccagcggcuggacuuucggcgcuggagccgcucugcagauccccuucgccaugcagauggccuaccgguucaacggcaucggcgugacccagaacgugcuguacgagaaccagaagcugaucgccaaccaguucaacagcgccaucggcaagauccaggacagccugagcagcaccgcuagcgcccugggcaagcugcaggacguggugaaccagaacgcccaggcccugaacacccuggugaagcagcugagcagcaacuucggcgccaucagcagcgugcugaacgacauccugagccggcuggacccucccgaggccgaggugcagaucgaccggcugaucacuggccggcugcagagccugcagaccuacgugacccagcagcugauccgggccgccgagauucgggccagcgccaaccuggccgccaccaagaugagcgagugcgugcugggccagagcaagcggguggacuucugcggcaagggcuaccaccugaugagcuuuccccagagcgcaccccacggagugguguuccugcacgugaccuacgugcccgcccaggagaagaacuucaccaccgccccagccaucugccacgacggcaaggcccacuuuccccgggagggcguguucgugagcaacggcacccacugguucgugacccagcggaacuucuacgagccccagaucaucaccaccgacaacaccuucgugagcggcaacugcgacguggugaucggcaucgugaacaacaccguguacgauccccugcagcccgagcuggacagcuucaaggaggagcuggacaaguacuucaagaaucacaccagccccgacguggaccugggcgacaucagcggcaucaacgccagcguggugaacauccagaaggagaucgaucggcugaacgagguggccaagaaccugaacgagagccugaucgaccugcaggagcugggcaaguacgagcaguacaucaaguggcccugguacaucuggcugggcuucaucgccggccugaucgccaucgugaucgugaccaucaugcugugcugcaugaccagcugcugcagcugccugaagggcuguugcagcugcggcagcugcugcaaguucgacgaggacgacagcgagcccgugcugaagggcgugaagcugcacuacaccugaggacuaguuauaagacugacuagcccgaugggccucccaacgggcccuccuccccuccuugcaccgagauuaauagaucucaaaggcucuuuucagagccaccaaaaaaaaaaaaaaaaaaaaaaaaaaaaaaaaaaaaaaaaaaaaaaaaaaaaaaaaaaaaaaaaaaaaaaaaaaaaaaaaaaaaaaaaaaaaaaaaaaaaa

SEQ ID NO: 24445 - RNA, 4032 nt, Artificial Sequence
  SARS-CoV-2/Wuhan/WIV05/2019__EPI_ISL_402128 spike protein mRNA gc (1-1273)(K986P_V987P_K986P_V987P_H69del_V70del_Y144del_N501Y_A570 D_D614G_P681H_T716I_S982A_D1118H)
aggagaaagcuuaccauguucguguuccuggugcugcugccccuggugagcagccagugcgugaaccugaccacccggacccagcugccaccagccuacaccaacagcuucacccggggcgucuacuaccccgacaagguguuccggagcagcguccugcacagcacccaggaccuguuccugcccuucuucagcaacgugaccugguuccacgccaucagcggcaccaacggcaccaagcgguucgacaaccccgugcugcccuucaacgacggcguguacuucgccagcaccgagaagagcaacaucauccggggcuggaucuucggcaccacccuggacagcaagacccagagccugcugaucgugaauaacgccaccaacguggugaucaaggugugcgaguuccaguucugcaacgaccccuuccugggcguguaccacaagaacaacaagagcuggauggagagcgaguuccggguguacagcagcgccaacaacugcaccuucgaguacgugagccagcccuuccugauggaccuggagggcaagcagggcaacuucaagaaccugcgggaguucguguucaagaacaucgacggcuacuucaagaucuacagcaagcacaccccaaucaaccuggugcgggaucugccccagggcuucucagcccuggagccccugguggaccugcccaucggcaucaacaucacccgguuccagacccugcuggcccugcaccggagcuaccugaccccaggcgacagcagcagcggguggacagcaggcgcggcugcuuacuacgugggcuaccugcagccccggaccuuccugcugaaguacaacgagaacggcaccaucaccgacgccguggacugcgcccuggacccucugagcgagaccaagugcacccugaagagcuucaccguggagaagggcaucuaccagaccagcaacuuccgggugcagcccaccgagagcaucgugcgguuccccaacaucaccaaccugugccccuucggcgagguguucaacgccacccgguucgccagcguguacgccuggaaccggaagcggaucagcaacugcguggccgacuacagcgugcuguacaacagcgccagcuucagcaccuucaagugcuacggcgugagccccaccaagcugaacgaccugugcuucaccaacguguacgccgacagcuucgugauccguggcgacgaggugcggcagaucgcacccggccagacaggcaagaucgccgacuacaacuacaagcugcccgacgacuucaccggcugcgugaucgccuggaacagcaacaaccucgacagcaaggugggcggcaacuacaacuaccuguaccggcuguuccggaagagcaaccugaagcccuucgagcgggacaucagcaccgagaucuaccaagccggcuccaccccuugcaacggcguggagggcuucaacugcuacuucccucugcagagcuacggcuuccagcccaccuacggcgugggcuaccagcccuaccgggugguggugcugagcuucgagcugcugcacgccccagccaccguguguggccccaagaagagcaccaaccuggugaagaacaagugcgugaacuucaacuucaacggccuuaccggcaccggcgugcugaccgagagcaacaagaaauuccugcccuuucagcaguucggccgggacaucgacgacaccaccgacgcugugcgggauccccagacccuggagauccuggacaucaccccuugcagcuucggcggcgugagcgugaucaccccaggcaccaacaccagcaaccagguggccgugcuguaccagggcgugaacugcaccgaggugcccguggccauccacgccgaccagcugacacccaccuggcgggucuacagcaccggcagcaacguguuccagacccgggccgguugccugaucggcgccgagcacgugaacaacagcuacgagugcgacauccccaucggcgccggcaucugugccagcuaccagacccagaccaauucacaccggagggcaaggagcguggccagccagagcaucaucgccuacaccaugagccugggcgccgagaacagcguggccuacagcaacaacagcaucgccauccccaucaacuucaccaucagcgugaccaccgagauucugcccgugagcaugaccaagaccagcguggacugcaccauguacaucugcggcgacagcaccgagugcagcaaccugcugcugcaguacggcagcuucugcacccagcugaaccgggcccugaccggcaucgccguggagcaggacaagaacacccaggagguguucgcccaggugaagcagaucuacaagaccccucccaucaaggacuucggcggcuucaacuucagccagauccugcccgaccccagcaagcccagcaagcggagcuucaucgaggaccugcuguucaacaaggugacccuagccgacgccggcuucaucaagcaguacggcgacugccucggcgacauagccgcccgggaccugaucugcgcccagaaguucaacggccugaccgugcugccuccccugcugaccgacgagaugaucgcccaguacaccagcgcccuguuagccggaaccaucaccagcggcuggacuuucggcgcuggagccgcucugcagauccccuucgccaugcagauggccuaccgguucaacggcaucggcgugacccagaacgugcuguacgagaaccagaagcugaucgccaaccaguucaacagcgccaucggcaagauccaggacagccugagcagcaccgcuagcgcccugggcaagcugcaggacguggugaaccagaacgcccaggcccugaacacccuggugaagcagcugagcagcaacuucggcgccaucagcagcgugcugaacgacauccuggcccggcuggacccucccgaggccgaggugcagaucgaccggcugaucacuggccggcugcagagccugcagaccuacgugacccagcagcugauccgggccgccgagauucgggccagcgccaaccuggccgccaccaagaugagcgagugcgugcugggccagagcaagcggguggacuucugcggcaagggcuaccaccugaugagcuuuccccagagcgcaccccacggagugguguuccugcacgugaccuacgugcccgcccaggagaagaacuucaccaccgccccagccaucugccacgacggcaaggcccacuuuccccgggagggcguguucgugagcaacggcacccacugguucgugacccagcggaacuucuacgagccccagaucaucaccacccacaacaccuucgugagcggcaacugcgacguggugaucggcaucgugaacaacaccguguacgauccccugcagcccgagcuggacagcuucaaggaggagcuggacaaguacuucaagaaucacaccagccccgacguggaccugggcgacaucagcggcaucaacgccagcguggugaacauccagaaggagaucgaucggcugaacgagguggccaagaaccugaacgagagccugaucgaccugcaggagcugggcaaguacgagcaguacaucaaguggcccugguacaucuggcugggcuucaucgccggccugaucgccaucgugauggugaccaucaugcugugcugcaugaccagcugcugcagcugccugaagggcuguugcagcugcggcagcugcugcaaguucgacgaggacgacagcgagcccgugcugaagggcgugaagcugcacuacaccugaggacuaguuauaagacugacuagcccgaugggccucccaacgggcccuccuccccuccuugcaccgagauuaauagaucucaaaggcucuuuucagagccaccaaaaaaaaaaaaaaaaaaaaaaaaaaaaaaaaaaaaaaaaaaaaaaaaaaaaaaaaaaaaaaaaaaaaaaaaaaaaaaaaaaaaaaaaaaaaaaaaaaaaa

SEQ ID NO: 24446 - RNA, 4041 nt, Artificial Sequence
  SARS-CoV-2/Wuhan/WIV05/2019__EPI_ISL_402128 spike protein mRNA gc (1-1273)(K986P_V987P_K986P_V987P_K417N_E484K_N501Y_D614G)
aggagaaagcuuaccauguucguguuccuggugcugcugccccuggugagcagccagugcgugaaccugaccacccggacccagcugccaccagccuacaccaacagcuucacccggggcgucuacuaccccgacaagguguuccggagcagcguccugcacagcacccaggaccuguuccugcccuucuucagcaacgugaccugguuccacgccauccacgugagcggcaccaacggcaccaagcgguucgacaaccccgugcugcccuucaacgacggcguguacuucgccagcaccgagaagagcaacaucauccggggcuggaucuucggcaccacccuggacagcaagacccagagccugcugaucgugaauaacgccaccaacguggugaucaaggugugcgaguuccaguucugcaacgaccccuuccugggcguguacuaccacaagaacaacaagagcuggauggagagcgaguuccggguguacagcagcgccaacaacugcaccuucgaguacgugagccagcccuuccugauggaccuggagggcaagcagggcaacuucaagaaccugcgggaguucguguucaagaacaucgacggcuacuucaagaucuacagcaagcacaccccaaucaaccuggugcgggaucugccccagggcuucucagcccuggagccccugguggaccugcccaucggcaucaacaucacccgguuccagacccugcuggcccugcaccggagcuaccugaccccaggcgacagcagcagcggguggacagcaggcgcggcugcuuacuacgugggcuaccugcagccccggaccuuccugcugaaguacaacgagaacggcaccaucaccgacgccguggacugcgcccuggacccucugagcgagaccaagugcacccugaagagcuucaccguggagaagggcaucuaccagaccagcaacuuccgggugcagcccaccgagagcaucgugcgguuccccaacaucaccaaccugugccccuucggcgagguguucaacgccacccgguucgccagcguguacgccuggaaccggaagcggaucagcaacugcguggccgacuacagcgugcuguacaacagcgccagcuucagcaccuucaagugcuacggcgugagccccaccaagcugaacgaccugugcuucaccaacguguacgccgacagcuucgugauccguggcgacgaggugcggcagaucgcacccggccagacaggcaacaucgccgacuacaacuacaagcugcccgacgacuucaccggcugcgugaucgccuggaacagcaacaaccucgacagcaaggugggcggcaacuacaacuaccuguaccggcuguuccggaagagcaaccugaagcccuucgagcgggacaucagcaccgagaucuaccaagccggcuccaccccuugcaacggcgugaagggcuucaacugcuacuucccucugcagagcuacggcuuccagcccaccuacggcgugggcuaccagcccuaccgggugguggugcugagcuucgagcugcugcacgccccagccaccguguguggccccaagaagagcaccaaccuggugaagaacaagugcgugaacuucaacuucaacggccuuaccggcaccggcgugcugaccgagagcaacaagaaauuccugcccuuucagcaguucggccgggacaucgccgacaccaccgacgcugugcgggauccccagacccuggagauccuggacaucaccccuugcagcuucggcggcgugagcgugaucaccccaggcaccaacaccagcaaccagguggccgugcuguaccagggcgugaacugcaccgaggugcccguggccauccacgccgaccagcugacacccaccuggcgggucuacagcaccggcagcaacguguuccagacccgggccgguugccugaucggcgccgagcacgugaacaacagcuacgagugcgacauccccaucggcgccggcaucugugccagcuaccagacccagaccaauucaccccggagggcaaggagcguggccagccagagcaucaucgccuacaccaugagccugggcgccgagaacagcguggccuacagcaacaacagcaucgccauccccaccaacuucaccaucagcgugaccaccgagauucugcccgugagcaugaccaagaccagcguggacugcaccauguacaucugcggcgacagcaccgagugcagcaaccugcugcugcaguacggcagcuucugcacccagcugaaccgggcccugaccggcaucgccguggagcaggacaagaacacccaggagguguucgcccaggugaagcagaucuacaagaccccucccaucaaggacuucggcggcuucaacuucagccagauccugcccgaccccagcaagcccagcaagcggagcuucaucgaggaccugcuguucaacaaggugacccuagccgacgccggcuucaucaagcaguacggcgacugccucggcgacauagccgcccgggaccugaucugcgcccagaaguucaacggccugaccgugcugccuccccugcugaccgacgagaugaucgcccaguacaccagcgcccuguuagccggaaccaucaccagcggcuggacuuucggcgcuggagccgcucugcagauccccuucgccaugcagauggccuaccgguucaacggcaucggcgugacccagaacgugcuguacgagaaccagaagcugaucgccaaccaguucaacagcgccaucggcaagauccaggacagccugagcagcaccgcuagcgcccugggcaagcugcaggacguggugaaccagaacgcccaggcccugaacacccuggugaagcagcugagcagcaacuucggcgccaucagcagcgugcugaacgacauccugagccggcuggacccucccgaggccgaggugcagaucgaccggcugaucacuggccggcugcagagccugcagaccuacgugacccagcagcugauccgggccgccgagauucgggccagcgccaaccuggccgccaccaagaugagcgagugcgugcugggccagagcaagcggguggacuucugcggcaagggcuaccaccugaugagcuuuccccagagcgcaccccacggagugguguuccugcacgugaccuacgugcccgcccaggagaagaacuucaccaccgccccagccaucugccacgacggcaaggcccacuuuccccgggagggcguguucgugagcaacggcacccacugguucgugacccagcggaacuucuacgagccccagaucaucaccaccgacaacaccuucgugagcggcaacugcgacguggugaucggcaucgugaacaacaccguguacgauccccugcagcccgagcuggacagcuucaaggaggagcuggacaaguacuucaagaaucacaccagccccgacguggaccugggcgacaucagcggcaucaacgccagcguggugaacauccagaaggagaucgaucggcugaacgagguggccaagaaccugaacgagagccugaucgaccugcaggagcugggcaaguacgagcaguacaucaaguggcccugguacaucuggcugggcuucaucgccggccugaucgccaucgugauggugaccaucaugcugugcugcaugaccagcugcugcagcugccugaagggcuguugcagcugcggcagcugcugcaaguucgacgaggacgacagcgagcccgugcugaagggcgugaagcugcacuacaccugaggacuaguuauaagacugacuagcccgaugggccucccaacgggcccuccuccccuccuugcaccgagauuaauagaucucaaaggcucuuuucagagccaccaaaaaaaaaaaaaaaaaaaaaaaaaaaaaaaaaaaaaaaaaaaaaaaaaaaaaaaaaaaaaaaaaaaaaaaaaaaaaaaaaaaaaaaaaaaaaaaaaaaaa

SEQ ID NO: 24447 - RNA, 4032 nt, Artificial Sequence
  SARS-CoV-2/Wuhan/WIV05/2019__EPI_ISL_402128 spike protein mRNA gc (1-1273)(K986P_V987P_K986P_V987P_L18F_D80A_D215G_L242del_A243del_ L244del_R246I_K417N_E484K_N501Y_D614G_A701V)
aggagaaagcuuaccauguucguguuccuggugcugcugccccuggugagcagccagugcgugaacuucaccacccggacccagcugccaccagccuacaccaacagcuucacccggggcgucuacuaccccgacaagguguuccggagcagcguccugcacagcacccaggaccuguuccugcccuucuucagcaacgugaccugguuccacgccauccacgugagcggcaccaacggcaccaagcgguucgccaaccccgugcugcccuucaacgacggcguguacuucgccagcaccgagaagagcaacaucauccggggcuggaucuucggcaccacccuggacagcaagacccagagccugcugaucgugaauaacgccaccaacguggugaucaaggugugcgaguuccaguucugcaacgaccccuuccugggcguguacuaccacaagaacaacaagagcuggauggagagcgaguuccggguguacagcagcgccaacaacugcaccuucgaguacgugagccagcccuuccugauggaccuggagggcaagcagggcaacuucaagaaccugcgggaguucguguucaagaacaucgacggcuacuucaagaucuacagcaagcacaccccaaucaaccuggugcggggccugccccagggcuucucagcccuggagccccugguggaccugcccaucggcaucaacaucacccgguuccagacccugcacaucagcuaccugaccccaggcgacagcagcagcggguggacagcaggcgcggcugcuuacuacgugggcuaccugcagccccggaccuuccugcugaaguacaacgagaacggcaccaucaccgacgccguggacugcgcccuggacccucugagcgagaccaagugcacccugaagagcuucaccguggagaagggcaucuaccagaccagcaacuuccgggugcagcccaccgagagcaucgugcgguuccccaacaucaccaaccugugccccuucggcgagguguucaacgccacccgguucgccagcguguacgccuggaaccggaagcggaucagcaacugcguggccgacuacagcgugcuguacaacagcgccagcuucagcaccuucaagugcuacggcgugagccccaccaagcugaacgaccugugcuucaccaacguguacgccgacagcuucgugauccguggcgacgaggugcggcagaucgcacccggccagacaggcaacaucgccgacuacaacuacaagcugcccgacgacuucaccggcugcgugaucgccuggaacagcaacaaccucgacagcaaggugggcggcaacuacaacuaccuguaccggcuguuccggaagagcaaccugaagcccuucgagcgggacaucagcaccgagaucuaccaagccggcuccaccccuugcaacggcgugaagggcuucaacugcuacuucccucugcagagcuacggcuuccagcccaccuacggcgugggcuaccagcccuaccgggugguggugcugagcuucgagcugcugcacgccccagccaccguguguggccccaagaagagcaccaaccuggugaagaacaagugcgugaacuucaacuucaacggccuuaccggcaccggcgugcugaccgagagcaacaagaaauuccugcccuuucagcaguucggccgggacaucgccgacaccaccgacgcugugcgggauccccagacccuggagauccuggacaucaccccuugcagcuucggcggcgugagcgugaucaccccaggcaccaacaccagcaaccagguggccgugcuguaccagggcgugaacugcaccgaggugcccguggccauccacgccgaccagcugacacccaccuggcgggucuacagcaccggcagcaacguguuccagacccgggccgguugccugaucggcgccgagcacgugaacaacagcuacgagugcgacauccccaucggcgccggcaucugugccagcuaccagacccagaccaauucaccccggagggcaaggagcguggccagccagagcaucaucgccuacaccaugagccugggcguggagaacagcguggccuacagcaacaacagcaucgccauccccaccaacuucaccaucagcgugaccaccgagauucugcccgugagcaugaccaagaccagcguggacugcaccauguacaucugcggcgacagcaccgagugcagcaaccugcugcugcaguacggcagcuucugcacccagcugaaccgggcccugaccggcaucgccguggagcaggacaagaacacccaggagguguucgcccaggugaagcagaucuacaagaccccucccaucaaggacuucggcggcuucaacuucagccagauccugcccgaccccagcaagcccagcaagcggagcuucaucgaggaccugcuguucaacaaggugacccuagccgacgccggcuucaucaagcaguacggcgacugccucggcgacauagccgcccgggaccugaucugcgcccagaaguucaacggccugaccgugcugccuccccugcugaccgacgagaugaucgcccaguacaccagcgcccuguuagccggaaccaucaccagcggcuggacuuucggcgcuggagccgcucugcagauccccuucgccaugcagauggccuaccgguucaacggcaucggcgugacccagaacgugcuguacgagaaccagaagcugaucgccaaccaguucaacagcgccaucggcaagauccaggacagccugagcagcaccgcuagcgcccugggcaagcugcaggacguggugaaccagaacgcccaggcccugaacacccuggugaagcagcugagcagcaacuucggcgccaucagcagcgugcugaacgacauccugagccggcuggacccucccgaggccgaggugcagaucgaccggcugaucacuggccggcugcagagccugcagaccuacgugacccagcagcugauccgggccgccgagauucgggccagcgccaaccuggccgccaccaagaugagcgagugcgugcugggccagagcaagcggguggacuucugcggcaagggcuaccaccugaugagcuuuccccagagcgcaccccacggagugguguuccugcacgugaccuacgugcccgcccaggagaagaacuucaccaccgccccagccaucugccacgacggcaaggcccacuuuccccgggagggcguguucgugagcaacggcacccacugguucgugacccagcggaacuucuacgagccccagaucaucaccaccgacaacaccuucgugagcggcaacugcgacguggugaucggcaucgugaacaacaccguguacgauccccugcagcccgagcuggacagcuucaaggaggagcuggacaaguacuucaagaaucacaccagccccgacguggaccugggcgacaucagcggcaucaacgccagcguggugaacauccagaaggagaucgaucggcugaacgagguggccaagaaccugaacgagagccugaucgaccugcaggagcugggcaaguacgagcaguacaucaaguggcccugguacaucuggcugggcuucaucgccggccugaucgccaucgugauggugaccaucaugcugugcugcaugaccagcugcugcagcugccugaagggcuguugcagcugcggcagcugcugcaaguucgacgaggacgacagcgagcccgugcugaagggcgugaagcugcacuacaccugaggacuaguuauaagacugacuagcccgaugggccucccaacgggcccuccuccccuccuugcaccgagauuaauagaucucaaaggcucuuuucagagccaccaaaaaaaaaaaaaaaaaaaaaaaaaaaaaaaaaaaaaaaaaaaaaaaaaaaaaaaaaaaaaaaaaaaaaaaaaaaaaaaaaaaaaaaaaaaaaaaaaaaaa

SEQ ID NO: 24448 - RNA, 4041 nt, Artificial Sequence
  SARS-CoV-2/Wuhan/WIV05/2019__EPI_ISL_402128 spike protein mRNA gc (1-1273)(K986P_V987P_K986P_V987P_E484K_D614G)
aggagaaagcuuaccauguucguguuccuggugcugcugccccuggugagcagccagugcgugaaccugaccacccggacccagcugccaccagccuacaccaacagcuucacccggggcgucuacuaccccgacaagguguuccggagcagcguccugcacagcacccaggaccuguuccugcccuucuucagcaacgugaccugguuccacgccauccacgugagcggcaccaacggcaccaagcgguucgacaaccccgugcugcccuucaacgacggcguguacuucgccagcaccgagaagagcaacaucauccggggcuggaucuucggcaccacccuggacagcaagacccagagccugcugaucgugaauaacgccaccaacguggugaucaaggugugcgaguuccaguucugcaacgaccccuuccugggcguguacuaccacaagaacaacaagagcuggauggagagcgaguuccggguguacagcagcgccaacaacugcaccuucgaguacgugagccagcccuuccugauggaccuggagggcaagcagggcaacuucaagaaccugcgggaguucguguucaagaacaucgacggcuacuucaagaucuacagcaagcacaccccaaucaaccuggugcgggaucugccccagggcuucucagcccuggagccccugguggaccugcccaucggcaucaacaucacccgguuccagacccugcuggcccugcaccggagcuaccugaccccaggcgacagcagcagcggguggacagcaggcgcggcugcuuacuacgugggcuaccugcagccccggaccuuccugcugaaguacaacgagaacggcaccaucaccgacgccguggacugcgcccuggacccucugagcgagaccaagugcacccugaagagcuucaccguggagaagggcaucuaccagaccagcaacuuccgggugcagcccaccgagagcaucgugcgguuccccaacaucaccaaccugugccccuucggcgagguguucaacgccacccgguucgccagcguguacgccuggaaccggaagcggaucagcaacugcguggccgacuacagcgugcuguacaacagcgccagcuucagcaccuucaagugcuacggcgugagccccaccaagcugaacgaccugugcuucaccaacguguacgccgacagcuucgugauccguggcgacgaggugcggcagaucgcacccggccagacaggcaagaucgccgacuacaacuacaagcugcccgacgacuucaccggcugcgugaucgccuggaacagcaacaaccucgacagcaaggugggcggcaacuacaacuaccuguaccggcuguuccggaagagcaaccugaagcccuucgagcgggacaucagcaccgagaucuaccaagccggcuccaccccuugcaacggcgugaagggcuucaacugcuacuucccucugcagagcuacggcuuccagcccaccaacggcgugggcuaccagcccuaccgggugguggugcugagcuucgagcugcugcacgccccagccaccguguguggccccaagaagagcaccaaccuggugaagaacaagugcgugaacuucaacuucaacggccuuaccggcaccggcgugcugaccgagagcaacaagaaauuccugcccuuucagcaguucggccgggacaucgccgacaccaccgacgcugugcgggauccccagacccuggagauccuggacaucaccccuugcagcuucggcggcgugagcgugaucaccccaggcaccaacaccagcaaccagguggccgugcuguaccagggcgugaacugcaccgaggugcccguggccauccacgccgaccagcugacacccaccuggcgggucuacagcaccggcagcaacguguuccagacccgggccgguugccugaucggcgccgagcacgugaacaacagcuacgagugcgacauccccaucggcgccggcaucugugccagcuaccagacccagaccaauucaccccggagggcaaggagcguggccagccagagcaucaucgccuacaccaugagccugggcgccgagaacagcguggccuacagcaacaacagcaucgccauccccaccaacuucaccaucagcgugaccaccgagauucugcccgugagcaugaccaagaccagcguggacugcaccauguacaucugcggcgacagcaccgagugcagcaaccugcugcugcaguacggcagcuucugcacccagcugaaccgggcccugaccggcaucgccguggagcaggacaagaacacccaggagguguucgcccaggugaagcagaucuacaagaccccucccaucaaggacuucggcggcuucaacuucagccagauccugcccgaccccagcaagcccagcaagcggagcuucaucgaggaccugcuguucaacaaggugacccuagccgacgccggcuucaucaagcaguacggcgacugccucggcgacauagccgcccgggaccugaucugcgcccagaaguucaacggccugaccgugcugccuccccugcugaccgacgagaugaucgcccaguacaccagcgcccuguuagccggaaccaucaccagcggcuggacuuucggcgcuggagccgcucugcagauccccuucgccaugcagauggccuaccgguucaacggcaucggcgugacccagaacgugcuguacgagaaccagaagcugaucgccaaccaguucaacagcgccaucggcaagauccaggacagccugagcagcaccgcuagcgcccugggcaagcugcaggacguggugaaccagaacgcccaggcccugaacacccuggugaagcagcugagcagcaacuucggcgccaucagcagcgugcugaacgacauccugagccggcuggacccucccgaggccgaggugcagaucgaccggcugaucacuggccggcugcagagccugcagaccuacgugacccagcagcugauccgggccgccgagauucgggccagcgccaaccuggccgccaccaagaugagcgagugcgugcugggccagagcaagcggguggacuucugcggcaagggcuaccaccugaugagcuuuccccagagcgcaccccacggagugguguuccugcacgugaccuacgugcccgcccaggagaagaacuucaccaccgccccagccaucugccacgacggcaaggcccacuuuccccgggagggcguguucgugagcaacggcacccacugguucgugacccagcggaacuucuacgagccccagaucaucaccaccgacaacaccuucgugagcggcaacugcgacguggugaucggcaucgugaacaacaccguguacgauccccugcagcccgagcuggacagcuucaaggaggagcuggacaaguacuucaagaaucacaccagccccgacguggaccugggcgacaucagcggcaucaacgccagcguggugaacauccagaaggagaucgaucggcugaacgagguggccaagaaccugaacgagagccugaucgaccugcaggagcugggcaaguacgagcaguacaucaaguggcccugguacaucuggcugggcuucaucgccggccugaucgccaucgugauggugaccaucaugcugugcugcaugaccagcugcugcagcugccugaagggcuguugcagcugcggcagcugcugcaaguucgacgaggacgacagcgagcccgugcugaagggcgugaagcugcacuacaccugaggacuaguuauaagacugacuagcccgaugggccucccaacgggcccuccuccccuccuugcaccgagauuaauagaucucaaaggcucuuuucagagccaccaaaaaaaaaaaaaaaaaaaaaaaaaaaaaaaaaaaaaaaaaaaaaaaaaaaaaaaaaaaaaaaaaaaaaaaaaaaaaaaaaaaaaaaaaaaaaaaaaaaaa

SEQ ID NO: 24449 - RNA, 4041 nt, Artificial Sequence
  SARS-CoV-2/Wuhan/WIV05/2019__EPI_ISL_402128 spike protein mRNA gc (1-1273)(K986P_V987P_K986P_V987P_L18F_T20N_P26S_D138Y_R190S_K417T _E484K_N501Y_D614G_H655Y_T1027I)
aggagaaagcuuaccauguucguguuccuggugcugcugccccuggugagcagccagugcgugaacuucaccaaccggacccagcugccaagcgccuacaccaacagcuucacccggggcgucuacuaccccgacaagguguuccggagcagcguccugcacagcacccaggaccuguuccugcccuucuucagcaacgugaccugguuccacgccauccacgugagcggcaccaacggcaccaagcgguucgacaaccccgugcugcccuucaacgacggcguguacuucgccagcaccgagaagagcaacaucauccggggcuggaucuucggcaccacccuggacagcaagacccagagccugcugaucgugaauaacgccaccaacguggugaucaaggugugcgaguuccaguucugcaacuaccccuuccugggcguguacuaccacaagaacaacaagagcuggauggagagcgaguuccggguguacagcagcgccaacaacugcaccuucgaguacgugagccagcccuuccugauggaccuggagggcaagcagggcaacuucaagaaccugagcgaguucguguucaagaacaucgacggcuacuucaagaucuacagcaagcacaccccaaucaaccuggugcgggaucugccccagggcuucucagcccuggagccccugguggaccugcccaucggcaucaacaucacccgguuccagacccugcuggcccugcaccggagcuaccugaccccaggcgacagcagcagcggguggacagcaggcgcggcugcuuacuacgugggcuaccugcagccccggaccuuccugcugaaguacaacgagaacggcaccaucaccgacgccguggacugcgcccuggacccucugagcgagaccaagugcacccugaagagcuucaccguggagaagggcaucuaccagaccagcaacuuccgggugcagcccaccgagagcaucgugcgguuccccaacaucaccaaccugugccccuucggcgagguguucaacgccacccgguucgccagcguguacgccuggaaccggaagcggaucagcaacugcguggccgacuacagcgugcuguacaacagcgccagcuucagcaccuucaagugcuacggcgugagccccaccaagcugaacgaccugugcuucaccaacguguacgccgacagcuucgugauccguggcgacgaggugcggcagaucgcacccggccagacaggcaccaucgccgacuacaacuacaagcugcccgacgacuucaccggcugcgugaucgccuggaacagcaacaaccucgacagcaaggugggcggcaacuacaacuaccuguaccggcuguuccggaagagcaaccugaagcccuucgagcgggacaucagcaccgagaucuaccaagccggcuccaccccuugcaacggcgugaagggcuucaacugcuacuucccucugcagagcuacggcuuccagcccaccuacggcgugggcuaccagcccuaccgggugguggugcugagcuucgagcugcugcacgccccagccaccguguguggccccaagaagagcaccaaccuggugaagaacaagugcgugaacuucaacuucaacggccuuaccggcaccggcgugcugaccgagagcaacaagaaauuccugcccuuucagcaguucggccgggacaucgccgacaccaccgacgcugugcgggauccccagacccuggagauccuggacaucaccccuugcagcuucggcggcgugagcgugaucaccccaggcaccaacaccagcaaccagguggccgugcuguaccagggcgugaacugcaccgaggugcccguggccauccacgccgaccagcugacacccaccuggcgggucuacagcaccggcagcaacguguuccagacccgggccgguugccugaucggcgccgaguacgugaacaacagcuacgagugcgacauccccaucggcgccggcaucugugccagcuaccagacccagaccaauucaccccggagggcaaggagcguggccagccagagcaucaucgccuacaccaugagccugggcgccgagaacagcguggccuacagcaacaacagcaucgccauccccaccaacuucaccaucagcgugaccaccgagauucugcccgugagcaugaccaagaccagcguggacugcaccauguacaucugcggcgacagcaccgagugcagcaaccugcugcugcaguacggcagcuucugcacccagcugaaccgggcccugaccggcaucgccguggagcaggacaagaacacccaggagguguucgcccaggugaagcagaucuacaagaccccucccaucaaggacuucggcggcuucaacuucagccagauccugcccgaccccagcaagcccagcaagcggagcuucaucgaggaccugcuguucaacaaggugacccuagccgacgccggcuucaucaagcaguacggcgacugccucggcgacauagccgcccgggaccugaucugcgcccagaaguucaacggccugaccgugcugccuccccugcugaccgacgagaugaucgcccaguacaccagcgcccuguuagccggaaccaucaccagcggcuggacuuucggcgcuggagccgcucugcagauccccuucgccaugcagauggccuaccgguucaacggcaucggcgugacccagaacgugcuguacgagaaccagaagcugaucgccaaccaguucaacagcgccaucggcaagauccaggacagccugagcagcaccgcuagcgcccugggcaagcugcaggacguggugaaccagaacgcccaggcccugaacacccuggugaagcagcugagcagcaacuucggcgccaucagcagcgugcugaacgacauccugagccggcuggacccucccgaggccgaggugcagaucgaccggcugaucacuggccggcugcagagccugcagaccuacgugacccagcagcugauccgggccgccgagauucgggccagcgccaaccuggccgccaucaagaugagcgagugcgugcugggccagagcaagcggguggacuucugcggcaagggcuaccaccugaugagcuuuccccagagcgcaccccacggagugguguuccugcacgugaccuacgugcccgcccaggagaagaacuucaccaccgccccagccaucugccacgacggcaaggcccacuuuccccgggagggcguguucgugagcaacggcacccacugguucgugacccagcggaacuucuacgagccccagaucaucaccaccgacaacaccuucgugagcggcaacugcgacguggugaucggcaucgugaacaacaccguguacgauccccugcagcccgagcuggacagcuucaaggaggagcuggacaaguacuucaagaaucacaccagccccgacguggaccugggcgacaucagcggcaucaacgccagcguggugaacauccagaaggagaucgaucggcugaacgagguggccaagaaccugaacgagagccugaucgaccugcaggagcugggcaaguacgagcaguacaucaaguggcccugguacaucuggcugggcuucaucgccggccugaucgccaucgugauggugaccaucaugcugugcugcaugaccagcugcugcagcugccugaagggcuguugcagcugcggcagcugcugcaaguucgacgaggacgacagcgagcccgugcugaagggcgugaagcugcacuacaccugaggacuaguuauaagacugacuagcccgaugggccucccaacgggcccuccuccccuccuugcaccgagauuaauagaucucaaaggcucuuuucagagccaccaaaaaaaaaaaaaaaaaaaaaaaaaaaaaaaaaaaaaaaaaaaaaaaaaaaaaaaaaaaaaaaaaaaaaaaaaaaaaaaaaaaaaaaaaaaaaaaaaaaaa

SEQ ID NO: 24450 - RNA, 4041 nt, Artificial Sequence
  SARS-CoV-2/Wuhan/WIV05/2019__EPI_ISL_402128 spike protein mRNA gc (1-1273)(K986P_V987P_K986P_V987P_S13I_W152C_L452R_D614G)
aggagaaagcuuaccauguucguguuccuggugcugcugccccuggugagcauccagugcgugaaccugaccacccggacccagcugccaccagccuacaccaacagcuucacccggggcgucuacuaccccgacaagguguuccggagcagcguccugcacagcacccaggaccuguuccugcccuucuucagcaacgugaccugguuccacgccauccacgugagcggcaccaacggcaccaagcgguucgacaaccccgugcugcccuucaacgacggcguguacuucgccagcaccgagaagagcaacaucauccggggcuggaucuucggcaccacccuggacagcaagacccagagccugcugaucgugaauaacgccaccaacguggugaucaaggugugcgaguuccaguucugcaacgaccccuuccugggcguguacuaccacaagaacaacaagagcugcauggagagcgaguuccggguguacagcagcgccaacaacugcaccuucgaguacgugagccagcccuuccugauggaccuggagggcaagcagggcaacuucaagaaccugcgggaguucguguucaagaacaucgacggcuacuucaagaucuacagcaagcacaccccaaucaaccuggugcgggaucugccccagggcuucucagcccuggagccccugguggaccugcccaucggcaucaacaucacccgguuccagacccugcuggcccugcaccggagcuaccugaccccaggcgacagcagcagcggguggacagcaggcgcggcugcuuacuacgugggcuaccugcagccccggaccuuccugcugaaguacaacgagaacggcaccaucaccgacgccguggacugcgcccuggacccucugagcgagaccaagugcacccugaagagcuucaccguggagaagggcaucuaccagaccagcaacuuccgggugcagcccaccgagagcaucgugcgguuccccaacaucaccaaccugugccccuucggcgagguguucaacgccacccgguucgccagcguguacgccuggaaccggaagcggaucagcaacugcguggccgacuacagcgugcuguacaacagcgccagcuucagcaccuucaagugcuacggcgugagccccaccaagcugaacgaccugugcuucaccaacguguacgccgacagcuucgugauccguggcgacgaggugcggcagaucgcacccggccagacaggcaagaucgccgacuacaacuacaagcugcccgacgacuucaccggcugcgugaucgccuggaacagcaacaaccucgacagcaaggugggcggcaacuacaacuaccgcuaccggcuguuccggaagagcaaccugaagcccuucgagcgggacaucagcaccgagaucuaccaagccggcuccaccccuugcaacggcguggagggcuucaacugcuacuucccucugcagagcuacggcuuccagcccaccaacggcgugggcuaccagcccuaccgggugguggugcugagcuucgagcugcugcacgccccagccaccguguguggccccaagaagagcaccaaccuggugaagaacaagugcgugaacuucaacuucaacggccuuaccggcaccggcgugcugaccgagagcaacaagaaauuccugcccuuucagcaguucggccgggacaucgccgacaccaccgacgcugugcgggauccccagacccuggagauccuggacaucaccccuugcagcuucggcggcgugagcgugaucaccccaggcaccaacaccagcaaccagguggccgugcuguaccagggcgugaacugcaccgaggugcccguggccauccacgccgaccagcugacacccaccuggcgggucuacagcaccggcagcaacguguuccagacccgggccgguugccugaucggcgccgagcacgugaacaacagcuacgagugcgacauccccaucggcgccggcaucugugccagcuaccagacccagaccaauucaccccggagggcaaggagcguggccagccagagcaucaucgccuacaccaugagccugggcgccgagaacagcguggccuacagcaacaacagcaucgccauccccaccaacuucaccaucagcgugaccaccgagauucugcccgugagcaugaccaagaccagcguggacugcaccauguacaucugcggcgacagcaccgagugcagcaaccugcugcugcaguacggcagcuucugcacccagcugaaccgggcccugaccggcaucgccguggagcaggacaagaacacccaggagguguucgcccaggugaagcagaucuacaagaccccucccaucaaggacuucggcggcuucaacuucagccagauccugcccgaccccagcaagcccagcaagcggagcuucaucgaggaccugcuguucaacaaggugacccuagccgacgccggcuucaucaagcaguacggcgacugccucggcgacauagccgcccgggaccugaucugcgcccagaaguucaacggccugaccgugcugccuccccugcugaccgacgagaugaucgcccaguacaccagcgcccuguuagccggaaccaucaccagcggcuggacuuucggcgcuggagccgcucugcagauccccuucgccaugcagauggccuaccgguucaacggcaucggcgugacccagaacgugcuguacgagaaccagaagcugaucgccaaccaguucaacagcgccaucggcaagauccaggacagccugagcagcaccgcuagcgcccugggcaagcugcaggacguggugaaccagaacgcccaggcccugaacacccuggugaagcagcugagcagcaacuucggcgccaucagcagcgugcugaacgacauccugagccggcuggacccucccgaggccgaggugcagaucgaccggcugaucacuggccggcugcagagccugcagaccuacgugacccagcagcugauccgggccgccgagauucgggccagcgccaaccuggccgccaccaagaugagcgagugcgugcugggccagagcaagcggguggacuucugcggcaagggcuaccaccugaugagcuuuccccagagcgcaccccacggagugguguuccugcacgugaccuacgugcccgcccaggagaagaacuucaccaccgccccagccaucugccacgacggcaaggcccacuuuccccgggagggcguguucgugagcaacggcacccacugguucgugacccagcggaacuucuacgagccccagaucaucaccaccgacaacaccuucgugagcggcaacugcgacguggugaucggcaucgugaacaacaccguguacgauccccugcagcccgagcuggacagcuucaaggaggagcuggacaaguacuucaagaaucacaccagccccgacguggaccugggcgacaucagcggcaucaacgccagcguggugaacauccagaaggagaucgaucggcugaacgagguggccaagaaccugaacgagagccugaucgaccugcaggagcugggcaaguacgagcaguacaucaaguggcccugguacaucuggcugggcuucaucgccggccugaucgccaucgugauggugaccaucaugcugugcugcaugaccagcugcugcagcugccugaagggcuguugcagcugcggcagcugcugcaaguucgacgaggacgacagcgagcccgugcugaagggcgugaagcugcacuacaccugaggacuaguuauaagacugacuagcccgaugggccucccaacgggcccuccuccccuccuugcaccgagauuaauagaucucaaaggcucuuuucagagccaccaaaaaaaaaaaaaaaaaaaaaaaaaaaaaaaaaaaaaaaaaaaaaaaaaaaaaaaaaaaaaaaaaaaaaaaaaaaaaaaaaaaaaaaaaaaaaaaaaaaaa

SEQ ID NO: 24451 - RNA, 4041 nt, Artificial Sequence
  SARS-CoV-2/Wuhan/WIV05/2019__EPI_ISL_402128 spike protein mRNA gc (1-1273)(K986P_V987P)
aggagaaagcuuaccauguucguguuccuggugcugcugccccuggugagcagccagugcgugaaccugaccacccggacccagcugcccccugccuacaccaacagcuucacccggggcguguacuaccccgacaagguguuccggagcagcgugcugcacagcacccaggaccuguuccugcccuucuucagcaacgugaccugguuccacgccauccacgugagcggcaccaacggcaccaagcgguucgacaacccagugcugcccuucaacgacggcguguacuucgccagcaccgagaagucaaacaucauccggggcuggaucuucggcaccacccuggacagcaagacacagagccugcugaucgugaacaacgccaccaacguggugaucaaggugugcgaguuucaguucugcaacgaccccuuccugggcguguacuaccacaagaacaacaagagcuggauggagagcgaguuccgggucuacagcagcgcuaacaauugcaccuucgaguacgugagccagcccuuccugauggaccucgagggcaagcagggcaacuucaagaaccugcgggaguucguguucaagaacaucgauggcuacuucaagaucuacagcaagcacacccccaucaaccuggugcgggaccugccccagggauucagcgcccuggagccucugguggaccugcccaucggcaucaacaucaccagguuccagacccugcuggcccugcaccggagcuaccugacccccggcgacagcagcagcggcuggaccgccggcgccgccgcauacuacgugggcuaccugcagccacggaccuuccugcugaaguacaacgagaacggcaccaucaccgacgccguggacugcgcccuggacccccugagcgagaccaagugcacccuaaagagcuucaccguggagaagggcaucuaccagaccagcaacuuccgggugcagcccacugagagcaucgugcgguuccccaacauuaccaaccugugucccuucggcgagguguucaacgccacccgguucgccagcguguacgccuggaaccggaagcggaucagcaacugcguggccgacuacagcgugcuguacaacagcgccagcuucagcaccuucaagugcuacggcgugagcccuaccaagcugaacgaccugugcuucaccaacguguacgcugacagcuucgugauccggggcgacgaggugcggcagaucgcccccggccagaccggcaagaucgccgacuacaacuacaagcugcccgacgacuucaccggcugcgugaucgccuggaacagcaacaaccuggacagcaaggugggcggcaacuacaacuaccuguaccggcuguuccguaagagcaaccugaagccauucgagcgggacaucagcaccgagaucuaccaggccggcagcacccccugcaacgguguggagggcuuuaacugcuacuucccccugcagagcuacggcuuccagcccaccaacggcgugggcuaccagcccuaccgggugguggugcugagcuucgagcugcugcacgcccccgccaccgugugcggcccuaaaaagagcaccaaccuggugaagaacaagugcgugaacuucaauuucaacggccugaccggcaccggcgugcugaccgagagcaacaagaaguuccugcccuuccagcaguucggccgggauaucgccgacaccaccgacgcagugcgggacccccagacccuggagauccuggacaucaccccaugcagcuucggcggcgugagcgucaucacccccggcacaaacaccagcaaccagguggccgugcuguaccaggacgugaacugcaccgaggugcccguggccauccacgccgaccagcugacccccaccuggcggguguacagcaccggaagcaacguguuccagacccgggccggcugccugaucggcgccgagcacgugaacaacuccuacgagugcgacauccccaucggcgcuggcaucugcgccagcuaccagacccagaccaacagcccccggcgggcccggagcguggccagccagagcaucaucgccuacaccaugagcuuaggcgccgagaacagcguggccuacagcaacaacagcaucgcgaucccuaccaacuucaccaucagcgugaccaccgagauacugcccgugagcaugaccaagaccagcguggacuguaccauguacaucugcggcgacagcaccgagugcagcaaccugcugcugcaguacggcagcuucugcacccagcugaaccgggcccugaccggcaucgccguggagcaggacaagaacacccaagagguguucgcccaggugaagcagaucuacaagacucccccaaucaaggacuucggcggcuucaacuucagccagauccugcccgaccccagcaagcccagcaagcggagcuucaucgaggaccugcuguucaacaaggugacccuggccgacgccggcuucaucaagcaguacggcgauugccugggcgacaucgccgcucgggaccugaucugcgcccagaaguucaacgggcugaccgugcugcccccucugcugaccgacgagaugaucgcccaguacaccagcgcccugcuugccggcaccaucaccagcggcuggaccuucggcgccggcgcagcccugcagauccccuucgccaugcagauggccuaccgguucaacggcaucggcgugacccagaacgugcuguacgagaaccagaagcugaucgccaaccaguucaacagcgccaucggcaagauccaggacagccugagcagcaccgccagcgcccugggcaagcugcaggacguggugaaccagaacgcucaggcccugaacacccuggugaagcagcugagcagcaacuucggcgccaucagcucagugcugaaugacauccugagcaggcuggaucccccagaggccgaggugcagaucgaccggcugaucaccggccggcugcagagccugcagaccuacgugacccagcagcugauccgggccgccgagauccgggccagcgccaaccuggcagccaccaagaugagcgagugcgugcugggccagagcaagcggguggacuuuugcggcaagggcuaccaccugaugagcuucccccagagcgcuccccacggcgugguguuccuccacgugacauacguccccgcccaggagaagaacuucaccaccgcccccgccauuugccacgacggcaaggcccacuucccccgggagggcguguucgugagcaacggaacccacugguucgugacccagcggaacuucuacgagccucagaucaucaccaccgacaacaccuucgugagcggcaacugcgacguggugaucggcaucgugaacaacaccguguacgacccccugcagcccgagcuggacagcuucaaggaggagcuggacaaguacuucaagaaccacaccagcccagacguggaccugggcgacaucagcggcaucaacgccagcguggugaacauccagaaggagaucgaccggcugaacgagguggccaagaaccugaacgagagccugaucgaccugcaggagcugggcaaguacgagcaguacaucaaguggcccugguacaucuggcugggcuucaucgccggccugaucgccaucgugauggugaccaucaugcugugcugcaugaccagcugcuguagcugccugaagggcugcugcagcugcggcagcugcugcaaguucgacgaggacgacagcgagcccgugcugaagggcgugaagcugcacuacaccugaggacuaguuauaagacugacuagcccgaugggccucccaacgggcccuccuccccuccuugcaccgagauuaauagaucucaaaggcucuuuucagagccaccaaaaaaaaaaaaaaaaaaaaaaaaaaaaaaaaaaaaaaaaaaaaaaaaaaaaaaaaaaaaaaaaaaaaaaaaaaaaaaaaaaaaaaaaaaaaaaaaaaaaa

SEQ ID NO: 24452 - RNA, 4041 nt, Artificial Sequence
  SARS-CoV-2/Wuhan/WIV05/2019__EPI_ISL_402128 spike protein mRNA gc (1-1273)(K986P_V987P_ D614G)
aggagaaagcuuaccauguucguguuccuggugcugcugccccuggugagcagccagugcgugaaccugaccacccggacccagcugcccccugccuacaccaacagcuucacccggggcguguacuaccccgacaagguguuccggagcagcgugcugcacagcacccaggaccuguuccugcccuucuucagcaacgugaccugguuccacgccauccacgugagcggcaccaacggcaccaagcgguucgacaacccagugcugcccuucaacgacggcguguacuucgccagcaccgagaagucaaacaucauccggggcuggaucuucggcaccacccuggacagcaagacacagagccugcugaucgugaacaacgccaccaacguggugaucaaggugugcgaguuucaguucugcaacgaccccuuccugggcguguacuaccacaagaacaacaagagcuggauggagagcgaguuccgggucuacagcagcgcuaacaauugcaccuucgaguacgugagccagcccuuccugauggaccucgagggcaagcagggcaacuucaagaaccugcgggaguucguguucaagaacaucgauggcuacuucaagaucuacagcaagcacacccccaucaaccuggugcgggaccugccccagggauucagcgcccuggagccucugguggaccugcccaucggcaucaacaucaccagguuccagacccugcuggcccugcaccggagcuaccugacccccggcgacagcagcagcggcuggaccgccggcgccgccgcauacuacgugggcuaccugcagccacggaccuuccugcugaaguacaacgagaacggcaccaucaccgacgccguggacugcgcccuggacccccugagcgagaccaagugcacccuaaagagcuucaccguggagaagggcaucuaccagaccagcaacuuccgggugcagcccacugagagcaucgugcgguuccccaacauuaccaaccugugucccuucggcgagguguucaacgccacccgguucgccagcguguacgccuggaaccggaagcggaucagcaacugcguggccgacuacagcgugcuguacaacagcgccagcuucagcaccuucaagugcuacggcgugagcccuaccaagcugaacgaccugugcuucaccaacguguacgcugacagcuucgugauccggggcgacgaggugcggcagaucgcccccggccagaccggcaagaucgccgacuacaacuacaagcugcccgacgacuucaccggcugcgugaucgccuggaacagcaacaaccuggacagcaaggugggcggcaacuacaacuaccuguaccggcuguuccguaagagcaaccugaagccauucgagcgggacaucagcaccgagaucuaccaggccggcagcacccccugcaacgguguggagggcuuuaacugcuacuucccccugcagagcuacggcuuccagcccaccaacggcgugggcuaccagcccuaccgggugguggugcugagcuucgagcugcugcacgcccccgccaccgugugcggcccuaaaaagagcaccaaccuggugaagaacaagugcgugaacuucaauuucaacggccugaccggcaccggcgugcugaccgagagcaacaagaaguuccugcccuuccagcaguucggccgggauaucgccgacaccaccgacgcagugcgggacccccagacccuggagauccuggacaucaccccaugcagcuucggcggcgugagcgucaucacccccggcacaaacaccagcaaccagguggccgugcuguaccagggagugaacugcaccgaggugcccguggccauccacgccgaccagcugacccccaccuggcggguguacagcaccggcagcaacguguuccagacccgggccggcugccugaucggcgccgagcacgugaacaacuccuacgagugcgacauccccaucggcgcuggcaucugcgccagcuaccagacccagaccaacagcccccggcgggcccggagcguggccagccagagcaucaucgccuacaccaugagcuuaggcgccgagaacagcguggccuacagcaacaacagcaucgcgaucccuaccaacuucaccaucagcgugaccaccgagauacugcccgugagcaugaccaagaccagcguggacuguaccauguacaucugcggcgacagcaccgagugcagcaaccugcugcugcaguacggcagcuucugcacccagcugaaccgggcccugaccggcaucgccguggagcaggacaagaacacccaagagguguucgcccaggugaagcagaucuacaagacucccccaaucaaggacuucggcggcuucaacuucagccagauccugcccgaccccagcaagcccagcaagcggagcuucaucgaggaccugcuguucaacaaggugacccuggccgacgccggcuucaucaagcaguacggcgacugccugggggauaucgccgcucgggaccugaucugcgcccagaaguucaacggccugaccgugcugcccccucugcugaccgacgagaugaucgcccaguacaccagcgcccugcuugccggcaccaucaccagcggcuggaccuucggcgccggcgcagcccugcagauccccuucgccaugcagauggccuaccgguucaacggcaucggcgugacccagaacgugcuguacgagaaccagaagcugaucgccaaccaguucaacagcgccaucggcaagauccaggacagccugagcagcaccgccagcgcccugggcaagcugcaggacguggugaaccagaacgcucaggcccugaacacccuggugaagcagcugagcagcaacuucggcgccaucagcucagugcugaaugacauccugagcaggcuggaucccccagaggccgaggugcagaucgaccggcugaucaccggccggcugcagagccugcagaccuacgugacccagcagcugauccgggccgccgagauccgggccagcgccaaccuggcagccaccaagaugagcgagugcgugcugggccagagcaagcggguggacuuuugcggcaagggcuaccaccugaugagcuucccccagagcgcuccccacggcgugguguuccuccacgugacauacguccccgcccaggagaagaacuucaccaccgcccccgccauuugccacgacggcaaggcccacuucccccgggagggaguguucgugagcaacggcacccacugguucgugacccagcggaacuucuacgagccucagaucaucaccaccgacaacaccuucgugagcggcaacugcgacguggugaucggcaucgugaacaacaccguguacgacccccugcagcccgagcuggacagcuucaaggaggagcuggacaaguacuucaagaaccacaccagcccagacguggaccugggcgacaucagcggcaucaacgccagcguggugaacauccagaaggagaucgaccggcugaacgagguggccaagaaccugaacgagagccugaucgaccugcaggagcugggcaaguacgagcaguacaucaaguggcccugguacaucuggcugggcuucaucgccggccugaucgccaucgugauggugaccaucaugcugugcugcaugaccagcugcuguagcugccugaagggcugcugcagcugcggcagcugcugcaaguucgacgaggacgacagcgagcccgugcugaagggcgugaagcugcacuacaccugaggacuaguuauaagacugacuagcccgaugggccucccaacgggcccuccuccccuccuugcaccgagauuaauagaucucaaaggcucuuuucagagccaccaaaaaaaaaaaaaaaaaaaaaaaaaaaaaaaaaaaaaaaaaaaaaaaaaaaaaaaaaaaaaaaaaaaaaaaaaaaaaaaaaaaaaaaaaaaaaaaaaaaaa

SEQ ID NO: 24453 - RNA, 4041 nt, Artificial Sequence
  SARS-CoV-2/Wuhan/WIV05/2019__EPI_ISL_402128 spike protein mRNA gc (1-1273)(K986P_V987P_A222V_D614G)
aggagaaagcuuaccauguucguguuccuggugcugcugccccuggugagcagccagugcgugaaccugaccacccggacccagcugcccccugccuacaccaacagcuucacccggggcguguacuaccccgacaagguguuccggagcagcgugcugcacagcacccaggaccuguuccugcccuucuucagcaacgugaccugguuccacgccauccacgugagcggcaccaacggcaccaagcgguucgacaacccagugcugcccuucaacgacggcguguacuucgccagcaccgagaagucaaacaucauccggggcuggaucuucggcaccacccuggacagcaagacacagagccugcugaucgugaacaacgccaccaacguggugaucaaggugugcgaguuucaguucugcaacgaccccuuccugggcguguacuaccacaagaacaacaagagcuggauggagagcgaguuccgggucuacagcagcgcuaacaauugcaccuucgaguacgugagccagcccuuccugauggaccucgagggcaagcagggcaacuucaagaaccugcgggaguucguguucaagaacaucgauggcuacuucaagaucuacagcaagcacacccccaucaaccuggugcgggaccugccccagggauucagcgugcuggagccucugguggaccugcccaucggcaucaacaucaccagguuccagacccugcuggcccugcaccggagcuaccugacccccggcgacagcagcagcggcuggaccgccggcgccgccgccuacuacgugggcuaccugcagccacggaccuuccugcugaaguacaacgagaacggcaccaucaccgacgcaguggacugcgcccuggacccccugagcgagaccaagugcacccuaaagagcuucaccguggagaagggcaucuaccagaccagcaacuuccgggugcagcccacugagagcaucgugcgguuccccaacauuaccaaccugugucccuucggcgagguguucaacgccacccgguucgccagcguguacgccuggaaccggaagcggaucagcaacugcguggccgacuacagcgugcuguacaacagcgccagcuucagcaccuucaagugcuacggcgugagcccuaccaagcugaacgaccugugcuucaccaacguguacgccgacagcuucgugauccggggcgacgaggugcggcagaucgcucccggccagaccggcaagaucgccgacuacaacuacaagcugcccgacgacuucaccggcugcgugaucgccuggaacagcaacaaccuggacagcaaggugggcggcaacuacaacuaccuguaccggcuguuccguaagagcaaccugaagccauucgagcgggacaucagcaccgagaucuaccaggccggcagcacccccugcaacgguguggagggcuuuaacugcuacuucccccugcagagcuacggcuuccagcccaccaacggcgugggcuaccagcccuaccgggugguggugcugagcuucgagcugcugcacgcccccgccaccgugugcggcccuaaaaagagcaccaaccuggugaagaacaagugcgugaacuucaauuucaacggccugaccggcaccggcgugcugaccgagagcaacaagaaguuccugcccuuccagcaguucggccgggauaucgccgacaccaccgacgccgugcgggacccccagacccuggagauccuggacaucaccccaugcagcuucggcggcgucagcgugaucacccccggcacaaacaccagcaaccagguggcagugcuguaccagggagugaacugcaccgaggugcccguggccauccacgccgaccagcugacccccaccuggcggguguacagcaccggcagcaacguguuccagacccgggccggcugccugaucggcgccgagcacgugaacaacuccuacgagugcgacauccccaucggcgccggcaucugcgcuagcuaccagacccagaccaacagcccccggcgggcccggagcguggccagccagagcaucaucgccuacaccaugagcuuaggcgccgagaacagcguggccuacagcaacaacagcaucgccaucccuaccaacuucaccaucagcgugaccaccgagauacugcccgugagcaugaccaagaccagcguggacuguaccauguacaucugcggcgacagcaccgagugcagcaaccugcugcugcaguacggcagcuucugcacccagcugaaccgggcgcugaccggcaucgccguggagcaggacaagaacacccaagagguguucgcccaggugaagcagaucuacaagacucccccaaucaaggacuucggcggcuucaacuucagccagauccugcccgaccccagcaagcccagcaagcggagcuucaucgaggaccugcuguucaacaaggugacccuggccgacgccggcuucaucaagcaguacggcgacugccugggggauaucgccgcccgggaccugaucugcgcucagaaguucaacggccugaccgugcugcccccucugcugaccgacgagaugaucgcccaguacaccagcgcccugcuugccggcaccaucaccagcggcuggaccuucggcgccggcgccgcacugcagauccccuucgccaugcagauggccuaccgguucaacggcaucggcgugacccagaacgugcuguacgagaaccagaagcugaucgccaaccaguucaacagcgccaucggcaagauccaggacagccugagcagcaccgccagcgcccugggcaagcugcaggacguggugaaccagaacgcccaggcucugaacacccuggugaagcagcugagcagcaacuucggcgccaucagcucagugcugaaugacauccugagcaggcuggaucccccagaggccgaggugcagaucgaccggcugaucaccggccggcugcagagccugcagaccuacgugacccagcagcugauccgggccgccgagauccgggccagcgccaaccuggccgcaaccaagaugagcgagugcgugcugggccagagcaagcggguggacuuuugcggcaagggcuaccaccugaugagcuucccccagagcgcuccccacggcgugguguuccuccacgucacauacgugcccgcccaggagaagaacuucaccaccgcccccgccauuugccacgacggcaaggcccacuucccccgggagggaguguucgugagcaacggcacccacugguucgugacccagcggaacuucuacgagccucagaucaucaccaccgacaacaccuucgugagcggcaacugcgacguggugaucggcaucgugaacaacaccguguacgacccccugcagcccgagcuggacagcuucaaggaggagcuggacaaguacuucaagaaccacaccagcccagacguggaccugggcgacaucagcggcaucaacgccagcguggugaacauccagaaggagaucgaccggcugaacgagguggccaagaaccugaacgagagccugaucgaccugcaggagcugggcaaguacgagcaguacaucaaguggcccugguacaucuggcugggcuucaucgccggccugaucgccaucgugauggugaccaucaugcugugcugcaugaccagcugcuguagcugccugaagggcugcugcagcugcggcagcugcugcaaguucgacgaggacgacagcgagcccgugcugaagggcgugaagcugcacuacaccugaggacuaguuauaagacugacuagcccgaugggccucccaacgggcccuccuccccuccuugcaccgagauuaauagaucucaaaggcucuuuucagagccaccaaaaaaaaaaaaaaaaaaaaaaaaaaaaaaaaaaaaaaaaaaaaaaaaaaaaaaaaaaaaaaaaaaaaaaaaaaaaaaaaaaaaaaaaaaaaaaaaaaaaa

SEQ ID NO: 24454 - RNA, 4041 nt, Artificial Sequence
  SARS-CoV-2/Wuhan/WIV05/2019__EPI_ISL_402128 spike protein mRNA gc (1-1273)(K986P_V987P_N439K_D614G)
aggagaaagcuuaccauguucguguuccuggugcugcugccccuggugagcagccagugcgugaaccugaccacccggacccagcugcccccugccuacaccaacagcuucacccggggcguguacuaccccgacaagguguuccggagcagcgugcugcacagcacccaggaccuguuccugcccuucuucagcaacgugaccugguuccacgccauccacgugagcggcaccaacggcaccaagcgguucgacaacccagugcugcccuucaacgacggcguguacuucgccagcaccgagaagucaaacaucauccggggcuggaucuucggcaccacccuggacagcaagacacagagccugcugaucgugaacaacgccaccaacguggugaucaaggugugcgaguuucaguucugcaacgaccccuuccugggcguguacuaccacaagaacaacaagagcuggauggagagcgaguuccgggucuacagcagcgcuaacaauugcaccuucgaguacgugagccagcccuuccugauggaccucgagggcaagcagggcaacuucaagaaccugcgggaguucguguucaagaacaucgauggcuacuucaagaucuacagcaagcacacccccaucaaccuggugcgggaccugccccagggauucagcgcccuggagccucugguggaccugcccaucggcaucaacaucaccagguuccagacccugcuggcccugcaccggagcuaccugacccccggcgacagcagcagcggcuggaccgccggcgccgccgcauacuacgugggcuaccugcagccacggaccuuccugcugaaguacaacgagaacggcaccaucaccgacgccguggacugcgcccuggacccccugagcgagaccaagugcacccuaaagagcuucaccguggagaagggcaucuaccagaccagcaacuuccgggugcagcccacugagagcaucgugcgguuccccaacauuaccaaccugugucccuucggcgagguguucaacgccacccgguucgccagcguguacgccuggaaccggaagcggaucagcaacugcguggccgacuacagcgugcuguacaacagcgccagcuucagcaccuucaagugcuacggcgugagcccuaccaagcugaacgaccugugcuucaccaacguguacgcugacagcuucgugauccggggcgacgaggugcggcagaucgcccccggccagaccggcaagaucgccgacuacaacuacaagcugcccgacgacuucaccggcugcgugaucgccuggaacagcaagaaccuggacagcaaggugggcggcaacuacaacuaccuguaccggcuguuccguaagagcaaccugaagccauucgagcgggacaucagcaccgagaucuaccaggccggcagcacccccugcaacgguguggagggcuuuaacugcuacuucccccugcagagcuacggcuuccagcccaccaacggcgugggcuaccagcccuaccgggugguggugcugagcuucgagcugcugcacgcccccgccaccgugugcggcccuaaaaagagcaccaaccuggugaagaacaagugcgugaacuucaacuucaauggccugaccggcaccggcgugcugaccgagagcaacaagaaguuccugcccuuccagcaguucggccgggauaucgccgacaccaccgacgcagugcgggacccccagacccuggagauccuggacaucaccccaugcagcuucggcggcgugagcgucaucacccccggcacaaacaccagcaaccagguggccgugcuguaccagggagugaacugcaccgaggugcccguggccauccacgccgaccagcugacccccaccuggcggguguacagcaccggcagcaacguguuccagacccgggccggcugccugaucggcgccgagcacgugaacaacuccuacgagugcgacauccccaucggcgcuggcaucugcgccagcuaccagacccagaccaacagcccccggcgggcccggagcguggccagccagagcaucaucgccuacaccaugagcuuaggcgccgagaacagcguggccuacagcaacaacagcaucgcgaucccuaccaacuucaccaucagcgugaccaccgagauacugcccgugagcaugaccaagaccagcguggacuguaccauguacaucugcggcgacagcaccgagugcagcaaccugcugcugcaguacggcagcuucugcacccagcugaaccgggcccugaccggcaucgccguggagcaggacaagaacacccaagagguguucgcccaggugaagcagaucuacaagacucccccaaucaaggacuucggcggcuucaacuucagccagauccugcccgaccccagcaagcccagcaagcggagcuucaucgaggaccugcuguucaacaaggugacccuggccgacgccggcuucaucaagcaguacggcgacugccugggggauaucgccgcucgggaccugaucugcgcccagaaguucaacggccugaccgugcugcccccucugcugaccgacgagaugaucgcccaguacaccagcgcccugcuugccggcaccaucaccagcggcuggaccuucggcgccggcgcagcccugcagauccccuucgccaugcagauggccuaccgguucaacggcaucggcgugacccagaacgugcuguacgagaaccagaagcugaucgccaaccaguucaacagcgccaucggcaagauccaggacagccugagcagcaccgccagcgcccugggcaagcugcaggacguggugaaccagaacgcucaggcccugaacacccuggugaagcagcugagcagcaacuucggcgccaucagcucagugcugaacgacauccugagcaggcuggaucccccagaggccgaggugcagaucgaccggcugaucaccggccggcugcagagccugcagaccuacgugacccagcagcugauccgggccgccgagauccgggccagcgccaaucuggcagccaccaagaugagcgagugcgugcugggccagagcaagcggguggacuuuugcggcaagggcuaccaccugaugagcuucccccagagcgcuccccacggcgugguguuccuccacgugacauacguccccgcccaggagaagaacuucaccaccgcccccgccauuugccacgacggcaaggcccacuucccccgggagggaguguucgugagcaacggcacccacugguucgugacccagcggaacuucuacgagccucagaucaucaccaccgacaacaccuucgugagcggcaacugcgacguggugaucggcaucgugaacaacaccguguacgacccccugcagcccgagcuggacagcuucaaggaggagcuggacaaguacuucaagaaccacaccagcccagacguggaccugggcgacaucagcggcaucaacgccagcguggugaacauccagaaggagaucgaccggcugaacgagguggccaagaaccugaacgagagccugaucgaccugcaggagcugggcaaguacgagcaguacaucaaguggcccugguacaucuggcugggcuucaucgccggccugaucgccaucgugauggugaccaucaugcugugcugcaugaccagcugcuguagcugccugaagggcugcugcagcugcggcagcugcugcaaguucgacgaggacgacagcgagcccgugcugaagggcgugaagcugcacuacaccugaggacuaguuauaagacugacuagcccgaugggccucccaacgggcccuccuccccuccuugcaccgagauuaauagaucucaaaggcucuuuucagagccaccaaaaaaaaaaaaaaaaaaaaaaaaaaaaaaaaaaaaaaaaaaaaaaaaaaaaaaaaaaaaaaaaaaaaaaaaaaaaaaaaaaaaaaaaaaaaaaaaaaaaa

SEQ ID NO: 24455 - RNA, 4041 nt, Artificial Sequence
  SARS-CoV-2/Wuhan/WIV05/2019__EPI_ISL_402128 spike protein mRNA gc (1-1273)(K986P_V987P_S477N_D614G)
aggagaaagcuuaccauguucguguuccuggugcugcugccccuggugagcagccagugcgugaaccugaccacccggacccagcugcccccugccuacaccaacagcuucacccggggcguguacuaccccgacaagguguuccggagcagcgugcugcacagcacccaggaccuguuccugcccuucuucagcaacgugaccugguuccacgccauccacgugagcggcaccaacggcaccaagcgguucgacaacccagugcugcccuucaacgacggcguguacuucgccagcaccgagaagucaaacaucauccggggcuggaucuucggcaccacccuggacagcaagacacagagccugcugaucgugaacaacgccaccaacguggugaucaaggugugcgaguuucaguucugcaacgaccccuuccugggcguguacuaccacaagaacaacaagagcuggauggagagcgaguuccgggucuacagcagcgcuaacaauugcaccuucgaguacgugagccagcccuuccugauggaccucgagggcaagcagggcaacuucaagaaccugcgggaguucguguucaagaacaucgauggcuacuucaagaucuacagcaagcacacccccaucaaccuggugcgggaccugccccagggauucagcgcccuggagccucugguggaccugcccaucggcaucaacaucaccagguuccagacccugcuggcccugcaccggagcuaccugacccccggcgacagcagcagcggcuggaccgccggcgccgccgcauacuacgugggcuaccugcagccacggaccuuccugcugaaguacaacgagaacggcaccaucaccgacgccguggacugcgcccuggacccccugagcgagaccaagugcacccuaaagagcuucaccguggagaagggcaucuaccagaccagcaacuuccgggugcagcccacugagagcaucgugcgguuccccaacauuaccaaccugugucccuucggcgagguguucaacgccacccgguucgccagcguguacgccuggaaccggaagcggaucagcaacugcguggccgacuacagcgugcuguacaacagcgccagcuucagcaccuucaagugcuacggcgugagcccuaccaagcugaacgaccugugcuucaccaacguguacgcugacagcuucgugauccggggcgacgaggugcggcagaucgcccccggccagaccggcaagaucgccgacuacaacuacaagcugcccgacgacuucaccggcugcgugaucgccuggaacagcaacaaccuggacagcaaggugggcggcaacuacaacuaccuguaccggcuguuccguaagagcaaccugaagccauucgagcgggacaucagcaccgagaucuaccaggccggcaacacccccugcaacgguguggagggcuuuaacugcuacuucccccugcagagcuacggcuuccagcccaccaacggcgugggcuaccagcccuaccgggugguggugcugagcuucgagcugcugcacgcccccgccaccgugugcggcccuaaaaagagcaccaaccuggugaagaacaagugcgugaauuucaacuucaacggccugaccggcaccggcgugcugaccgagagcaacaagaaguuccugcccuuccagcaguucggccgggauaucgccgacaccaccgacgcagugcgggacccccagacccuggagauccuggacaucaccccaugcagcuucggcggcgugagcgucaucacccccggcacaaacaccagcaaccagguggccgugcuguaccagggagugaacugcaccgaggugcccguggccauccacgccgaccagcugacccccaccuggcggguguacagcaccggcagcaacguguuccagacccgggccggcugccugaucggcgccgagcacgugaacaacagcuacgagugcgacauccccaucggcgcuggcaucugcgccuccuaccagacccagaccaacagcccccggcgggcccggagcguggccagccagagcaucaucgccuacaccaugagcuuaggcgccgagaacagcguggccuacagcaacaacagcaucgcgaucccuaccaacuucaccaucagcgugaccaccgagauacugcccgugagcaugaccaagaccagcguggacuguaccauguacaucugcggcgacagcaccgagugcagcaaccugcugcugcaguacggcagcuucugcacccagcugaaccgggcccugaccggcaucgccguggagcaggacaagaacacccaagagguguucgcccaggugaagcagaucuacaagacucccccaaucaaggacuucggcggcuucaacuucagccagauccugcccgaccccagcaagcccagcaagcggagcuucaucgaggaccugcuguucaacaaggugacccuggccgacgccggcuucaucaagcaguacggcgacugccugggggauaucgccgcucgggaccugaucugcgcccagaaguucaacggccugaccgugcugcccccucugcugaccgacgagaugaucgcccaguacaccagcgcccugcuugccggcaccaucaccagcggcuggaccuucggcgccggcgcagcccugcagauccccuucgccaugcagauggccuaccgguucaacggcaucggcgugacccagaacgugcuguacgagaaccagaagcugaucgccaaccaguucaacagcgccaucggcaagauccaggacagccugagcagcaccgccagcgcccugggcaagcugcaggacguggugaaccagaacgcucaggcccugaacacccuggugaagcagcugagcagcaauuucggcgccaucagcagcgugcugaacgacauccugucaaggcuggaucccccagaggccgaggugcagaucgaccggcugaucaccggccggcugcagagccugcagaccuacgugacccagcagcugauccgggccgccgagauccgggccagcgccaaccuggcagccaccaagaugagcgagugcgugcugggccagagcaagcggguggacuuuugcggcaagggcuaccaccugaugagcuucccccagagcgcuccccacggcgugguguuccuccacgugacauacguccccgcccaggagaagaacuucaccaccgcccccgccauuugccacgacggcaaggcccacuucccccgggagggaguguucgugagcaacggcacccacugguucgugacccagcggaacuucuacgagccucagaucaucaccaccgacaacaccuucgugagcggcaacugcgacguggugaucggcaucgugaacaacaccguguacgacccccugcagcccgagcuggacagcuucaaggaggagcuggacaaguacuucaagaaccacaccagcccagacguggaccugggcgacaucagcggcaucaacgccagcguggugaacauccagaaggagaucgaccggcugaacgagguggccaagaaccugaacgagagccugaucgaccugcaggagcugggcaaguacgagcaguacaucaaguggcccugguacaucuggcugggcuucaucgccggccugaucgccaucgugauggugaccaucaugcugugcugcaugaccagcugcuguagcugccugaagggcugcugcagcugcggcagcugcugcaaguucgacgaggacgacagcgagcccgugcugaagggcgugaagcugcacuacaccugaggacuaguuauaagacugacuagcccgaugggccucccaacgggcccuccuccccuccuugcaccgagauuaauagaucucaaaggcucuuuucagagccaccaaaaaaaaaaaaaaaaaaaaaaaaaaaaaaaaaaaaaaaaaaaaaaaaaaaaaaaaaaaaaaaaaaaaaaaaaaaaaaaaaaaaaaaaaaaaaaaaaaaaa

SEQ ID NO: 24456 - RNA, 4041 nt, Artificial Sequence
  SARS-CoV-2/Wuhan/WIV05/2019__EPI_ISL_402128 spike protein mRNA gc (1-1273)(K986P_V987P_N501Y_D614G)
aggagaaagcuuaccauguucguguuccuggugcugcugccccuggugagcagccagugcgugaaccugaccacccggacccagcugcccccugccuacaccaacagcuucacccggggcguguacuaccccgacaagguguuccggagcagcgugcugcacagcacccaggaccuguuccugcccuucuucagcaacgugaccugguuccacgccauccacgugagcggcaccaacggcaccaagcgguucgacaacccagugcugcccuucaacgacggcguguacuucgccagcaccgagaagucaaacaucauccggggcuggaucuucggcaccacccuggacagcaagacacagagccugcugaucgugaacaacgccaccaacguggugaucaaggugugcgaguuucaguucugcaacgaccccuuccugggcguguacuaccacaagaacaacaagagcuggauggagagcgaguuccgggucuacagcagcgcuaacaauugcaccuucgaguacgugagccagcccuuccugauggaccucgagggcaagcagggcaacuucaagaaccugcgggaguucguguucaagaacaucgauggcuacuucaagaucuacagcaagcacacccccaucaaccuggugcgggaccugccccagggauucagcgcccuggagccucugguggaccugcccaucggcaucaacaucaccagguuccagacccugcuggcccugcaccggagcuaccugacccccggcgacagcagcagcggcuggaccgccggcgccgccgcauacuacgugggcuaccugcagccacggaccuuccugcugaaguacaacgagaacggcaccaucaccgacgccguggacugcgcccuggacccccugagcgagaccaagugcacccuaaagagcuucaccguggagaagggcaucuaccagaccagcaacuuccgggugcagcccacugagagcaucgugcgguuccccaacauuaccaaccugugucccuucggcgagguguucaacgccacccgguucgccagcguguacgccuggaaccggaagcggaucagcaacugcguggccgacuacagcgugcuguacaacagcgccagcuucagcaccuucaagugcuacggcgugagcccuaccaagcugaacgaccugugcuucaccaacguguacgcugacagcuucgugauccggggcgacgaggugcggcagaucgcccccggccagaccggcaagaucgccgacuacaacuacaagcugcccgacgacuucaccggcugcgugaucgccuggaacagcaacaaccuggacagcaaggugggcggcaacuacaacuaccuguaccggcuguuccguaagagcaaccugaagccauucgagcgggacaucagcaccgagaucuaccaggccggcagcacccccugcaacgguguggagggcuuuaacugcuacuucccccugcagagcuacggcuuccagcccaccuacggcgugggcuaccagcccuaccgggugguggugcugagcuucgagcugcugcacgcccccgccaccgugugcggcccuaaaaagagcaccaaccuggugaagaacaagugcgugaacuucaacuucaauggccugaccggcaccggcgugcugaccgagagcaacaagaaguuccugcccuuccagcaguucggccgggauaucgccgacaccaccgacgcagugcgggacccccagacccuggagauccuggacaucaccccaugcagcuucggcggcgugagcgucaucacccccggcacaaacaccagcaaccagguggccgugcuguaccagggagugaacugcaccgaggugcccguggccauccacgccgaccagcugacccccaccuggcggguguacagcaccggcagcaacguguuccagacccgggccggcugccugaucggcgccgagcacgugaacaacuccuacgagugcgacauccccaucggcgcuggcaucugcgccagcuaccagacccagaccaacagcccccggcgggcccggagcguggccagccagagcaucaucgccuacaccaugagcuuaggcgccgagaacagcguggccuacagcaacaacagcaucgcgaucccuaccaacuucaccaucagcgugaccaccgagauacugcccgugagcaugaccaagaccagcguggacuguaccauguacaucugcggcgacagcaccgagugcagcaaccugcugcugcaguacggcagcuucugcacccagcugaaccgggcccugaccggcaucgccguggagcaggacaagaacacccaagagguguucgcccaggugaagcagaucuacaagacucccccaaucaaggacuucggcggcuucaacuucagccagauccugcccgaccccagcaagcccagcaagcggagcuucaucgaggaccugcuguucaacaaggugacccuggccgacgccggcuucaucaagcaguacggcgacugccugggggauaucgccgcucgggaccugaucugcgcccagaaguucaacggccugaccgugcugcccccucugcugaccgacgagaugaucgcccaguacaccagcgcccugcuugccggcaccaucaccagcggcuggaccuucggcgccggcgcagcccugcagauccccuucgccaugcagauggccuaccgguucaacggcaucggcgugacccagaacgugcuguacgagaaccagaagcugaucgccaaccaguucaacagcgccaucggcaagauccaggacagccugagcagcaccgccagcgcccugggcaagcugcaggacguggugaaccagaacgcucaggcccugaacacccuggugaagcagcugagcagcaacuucggcgccaucagcucagugcugaacgacauccugagcaggcuggaucccccagaggccgaggugcagaucgaccggcugaucaccggccggcugcagagccugcagaccuacgugacccagcagcugauccgggccgccgagauccgggccagcgccaaucuggcagccaccaagaugagcgagugcgugcugggccagagcaagcggguggacuuuugcggcaagggcuaccaccugaugagcuucccccagagcgcuccccacggcgugguguuccuccacgugacauacguccccgcccaggagaagaacuucaccaccgcccccgccauuugccacgacggcaaggcccacuucccccgggagggaguguucgugagcaacggcacccacugguucgugacccagcggaacuucuacgagccucagaucaucaccaccgacaacaccuucgugagcggcaacugcgacguggugaucggcaucgugaacaacaccguguacgacccccugcagcccgagcuggacagcuucaaggaggagcuggacaaguacuucaagaaccacaccagcccagacguggaccugggcgacaucagcggcaucaacgccagcguggugaacauccagaaggagaucgaccggcugaacgagguggccaagaaccugaacgagagccugaucgaccugcaggagcugggcaaguacgagcaguacaucaaguggcccugguacaucuggcugggcuucaucgccggccugaucgccaucgugauggugaccaucaugcugugcugcaugaccagcugcuguagcugccugaagggcugcugcagcugcggcagcugcugcaaguucgacgaggacgacagcgagcccgugcugaagggcgugaagcugcacuacaccugaggacuaguuauaagacugacuagcccgaugggccucccaacgggcccuccuccccuccuugcaccgagauuaauagaucucaaaggcucuuuucagagccaccaaaaaaaaaaaaaaaaaaaaaaaaaaaaaaaaaaaaaaaaaaaaaaaaaaaaaaaaaaaaaaaaaaaaaaaaaaaaaaaaaaaaaaaaaaaaaaaaaaaaa

SEQ ID NO: 24457 - RNA, 4035 nt, Artificial Sequence
  SARS-CoV-2/Wuhan/WIV05/2019__EPI_ISL_402128 spike protein mRNA gc (1-1273)(K986P_V987P_H69del_V70del_D614G)
aggagaaagcuuaccauguucguguuccuggugcugcugccccuggugagcagccagugcgugaaccugaccacccggacccagcugcccccugccuacaccaacagcuucacccggggcguguacuaccccgacaagguguuccggagcagcgugcugcacagcacccaggaccuguuccugcccuucuucagcaacgugaccugguuccacgccaucagcggcaccaacggcaccaagcgguucgacaacccagugcugcccuucaacgacggcguguacuucgccagcaccgagaagucaaacaucauccggggcuggaucuucggcaccacccuggacagcaagacacagagccugcugaucgugaacaacgccaccaacguggugaucaaggugugcgaguuucaguucugcaacgaccccuuccugggcguguacuaccacaagaacaacaagagcuggauggagagcgaguuccggguguacagcagcgcuaacaauugcaccuucgaguacgucagccagcccuuccugauggaccucgagggcaagcagggcaacuucaagaaccugcgggaguucguguucaagaacaucgauggcuacuucaagaucuacagcaagcacacccccaucaaccuggugcgggaccugccccagggauucagcgcccuggagccucugguggaccugcccaucggcaucaacaucaccagguuccagacccugcuggcccugcaccggagcuaccugacccccggcgacagcagcagcggcuggaccgccggcgccgccgcauacuacgugggcuaccugcagccacggaccuuccugcugaaguacaacgagaacggcaccaucaccgacgccguggacugcgcccuggacccccugagcgagaccaagugcacccuaaagagcuucaccguggagaagggcaucuaccagaccagcaacuuccgggugcagcccacugagagcaucgugcgguuccccaacauuaccaaccugugucccuucggcgagguguucaacgccacccgguucgccagcguguacgccuggaaccggaagcggaucagcaacugcguggccgacuacagcgugcuguacaacagcgccagcuucagcaccuucaagugcuacggcgugagcccuaccaagcugaacgaccugugcuucaccaacguguacgcugacagcuucgugauccggggcgacgaggugcggcagaucgcccccggccagaccggcaagaucgccgacuacaacuacaagcugcccgacgacuucaccggcugcgugaucgccuggaacagcaacaaccuggacagcaaggugggcggcaacuacaacuaccuguaccggcuguuccguaagagcaaccugaagccauucgagcgggacaucagcaccgagaucuaccaggccggcagcacccccugcaacgguguggagggcuuuaacugcuacuucccccugcagagcuacggcuuccagcccaccaacggcgugggcuaccagcccuaccgggugguggugcugagcuucgagcugcugcacgcccccgccaccgugugcggcccuaaaaagagcaccaaccuggugaagaacaagugcgugaacuucaauuucaacggccugaccggcaccggcgugcugaccgagagcaacaagaaguuccugcccuuccagcaguucggccgggauaucgccgacaccaccgacgcagugcgggacccccagacccuggagauccuggacaucaccccaugcagcuucggcggcgugagcgugaucacccccggcacaaacaccagcaaccaggucgccgugcuguaccagggagugaacugcaccgaggugcccguggccauccacgccgaccagcugacccccaccuggcggguguacagcaccggcagcaacguguuccagacccgggccggcugccugaucggcgccgagcacgugaacaacuccuacgagugcgacauccccaucggcgcuggcaucugcgccagcuaccagacccagaccaacagcccccggcgggcccggagcguggccagccagagcaucaucgccuacaccaugagcuuaggcgccgagaacagcguggccuacagcaacaacagcaucgcgaucccuaccaacuucaccaucagcgugaccaccgagauacugcccgugagcaugaccaagaccagcguggacuguaccauguacaucugcggcgacagcaccgagugcagcaaccugcugcugcaguacggcagcuucugcacccagcugaaccgggcccugaccggcaucgccguggagcaggacaagaacacccaagagguguucgcccaggugaagcagaucuacaagacucccccaaucaaggacuucggcggcuucaacuucagccagauccugcccgaccccagcaagcccagcaagcggagcuucaucgaggaccugcuguucaacaaggugacccuggccgacgccggcuucaucaagcaguacggcgacugccugggggauaucgccgcucgggaccugaucugcgcccagaaguucaacggccugaccgugcugcccccucugcugaccgacgagaugaucgcccaguacaccagcgcccugcuugccggcaccaucaccagcggcuggaccuucggcgccggcgcagcccugcagauccccuucgccaugcagauggccuaccgguucaacggcaucggcgugacccagaacgugcuguacgagaaccagaagcugaucgccaaccaguucaacagcgccaucggcaagauccaggacagccugagcagcaccgccagcgcccugggcaagcugcaggacguggugaaccagaacgcucaggcccugaacacccuggugaagcagcugagcagcaacuucggcgccaucagcucagugcugaaugacauccugagcaggcuggaucccccagaggccgaggugcagaucgaccggcugaucaccggccggcugcagagccugcagaccuacgugacccagcagcugauccgggccgccgagauccgggccagcgccaaccuggcagccaccaagaugagcgagugcgugcugggccagagcaagcggguggacuuuugcggcaagggcuaccaccugaugagcuucccccagagcgcuccccacggcgugguguuccuccacgugacauacgugcccgcccaggagaagaacuucaccaccgcccccgccauuugccacgacggcaaggcccacuucccccgggagggagucuucgugagcaacggcacccacugguucgugacccagcggaacuucuacgagccucagaucaucaccaccgacaacaccuucgugagcggcaacugcgacguggugaucggcaucgugaacaacaccguguacgacccccugcagcccgagcuggacagcuucaaggaggagcuggacaaguacuucaagaaccacaccagcccagacguggaccugggcgacaucagcggcaucaacgccagcguggugaacauccagaaggagaucgaccggcugaacgagguggccaagaaccugaacgagagccugaucgaccugcaggagcugggcaaguacgagcaguacaucaaguggcccugguacaucuggcugggcuucaucgccggccugaucgccaucgugauggugaccaucaugcugugcugcaugaccagcugcuguagcugccugaagggcugcugcagcugcggcagcugcugcaaguucgacgaggacgacagcgagcccgugcugaagggcgugaagcugcacuacaccugaggacuaguuauaagacugacuagcccgaugggccucccaacgggcccuccuccccuccuugcaccgagauuaauagaucucaaaggcucuuuucagagccaccaaaaaaaaaaaaaaaaaaaaaaaaaaaaaaaaaaaaaaaaaaaaaaaaaaaaaaaaaaaaaaaaaaaaaaaaaaaaaaaaaaaaaaaaaaaaaaaaaaaaa

SEQ ID NO: 24458 - RNA, 4041 nt, Artificial Sequence
  SARS-CoV-2/Wuhan/WIV05/2019__EPI_ISL_402128 spike protein mRNA gc (1-1273)(K986P_V987P_Y453F_D614G)
aggagaaagcuuaccauguucguguuccuggugcugcugccccuggugagcagccagugcgugaaccugaccacccggacccagcugcccccugccuacaccaacagcuucacccggggcguguacuaccccgacaagguguuccggagcagcgugcugcacagcacccaggaccuguuccugcccuucuucagcaacgugaccugguuccacgccauccacgugagcggcaccaacggcaccaagcgguucgacaacccagugcugcccuucaacgacggcguguacuucgccagcaccgagaagucaaacaucauccggggcuggaucuucggcaccacccuggacagcaagacacagagccugcugaucgugaacaacgccaccaacguggugaucaaggugugcgaguuucaguucugcaacgaccccuuccugggcguguacuaccacaagaacaacaagagcuggauggagagcgaguuccgggucuacagcagcgcuaacaauugcaccuucgaguacgugagccagcccuuccugauggaccucgagggcaagcagggcaacuucaagaaccugcgggaguucguguucaagaacaucgauggcuacuucaagaucuacagcaagcacacccccaucaaccuggugcgggaccugccccagggauucagcgcccuggagccucugguggaccugcccaucggcaucaacaucaccagguuccagacccugcuggcccugcaccggagcuaccugacccccggcgacagcagcagcggcuggaccgccggcgccgccgcauacuacgugggcuaccugcagccacggaccuuccugcugaaguacaacgagaacggcaccaucaccgacgccguggacugcgcccuggacccccugagcgagaccaagugcacccuaaagagcuucaccguggagaagggcaucuaccagaccagcaacuuccgggugcagcccacugagagcaucgugcgguuccccaacauuaccaaccugugucccuucggcgagguguucaacgccacccgguucgccagcguguacgccuggaaccggaagcggaucagcaacugcguggccgacuacagcgugcuguacaacagcgccagcuucagcaccuucaagugcuacggcgugagcccuaccaagcugaacgaccugugcuucaccaacguguacgcugacagcuucgugauccggggcgacgaggugcggcagaucgcccccggccagaccggcaagaucgccgacuacaacuacaagcugcccgacgacuucaccggcugcgugaucgccuggaacagcaacaaccuggacagcaaggugggcggcaacuacaacuaccuguuccggcuguuccguaagagcaaccugaagccauuugagcgggacaucagcaccgagaucuaccaggccggcagcacccccugcaacgguguggagggcuucaacugcuacuucccccugcagagcuacggcuuccagcccaccaacggcgugggcuaccagcccuaccgggugguggugcugagcuucgagcugcugcacgcccccgccaccgugugcggcccuaaaaagagcaccaaccuggugaagaacaagugcgugaacuucaauuucaacggccugaccggcaccggcgugcugaccgagagcaacaagaaguuccugcccuuccagcaguucggccgggauaucgccgacaccaccgacgcagugcgggacccccagacccuggagauccuggacaucaccccaugcagcuucggcggcgugagcgucaucacccccggcacaaacaccagcaaccagguggccgugcuguaccagggagugaacugcaccgaggugcccguggccauccacgccgaccagcugacccccaccuggcggguguacagcaccggcagcaacguguuccagacccgggccggcugccugaucggcgccgagcacgugaacaacuccuacgagugcgacauccccaucggcgcuggcaucugcgccagcuaccagacccagaccaacagcccccggcgggcccggagcguggccagccagagcaucaucgccuacaccaugagcuuaggcgccgagaacagcguggccuacagcaacaacagcaucgcgaucccuaccaacuucaccaucagcgugaccaccgagauacugcccgugagcaugaccaagaccagcguggacuguaccauguacaucugcggcgacagcaccgagugcagcaaccugcugcugcaguacggcagcuucugcacccagcugaaccgggcccugaccggcaucgccguggagcaggacaagaacacccaagagguguucgcccaggugaagcagaucuacaagacucccccaaucaaggacuucggcggcuucaacuucagccagauccugcccgaccccagcaagcccagcaagcggagcuucaucgaggaccugcuguucaacaaggugacccuggccgacgccggcuucaucaagcaguacggcgacugccugggggauaucgccgcucgggaccugaucugcgcccagaaguucaacggccugaccgugcugcccccucugcugaccgacgagaugaucgcccaguacaccagcgcccugcuugccggcaccaucaccagcggcuggaccuucggcgccggcgcagcccugcagauccccuucgccaugcagauggccuaccgguucaacggcaucggcgugacccagaacgugcuguacgagaaccagaagcugaucgccaaccaguucaacagcgccaucggcaagauccaggacagccugagcagcaccgccagcgcccugggcaagcugcaggacguggugaaccagaacgcucaggcccugaacacccuggugaagcagcugagcagcaacuuuggcgccaucagcucagugcugaaugacauccugagcaggcuggaucccccagaggccgaggugcagaucgaccggcugaucaccggccggcugcagagccugcagaccuacgugacccagcagcugauccgggccgccgagauccgggccagcgccaaccuggcagccaccaagaugagcgagugcgugcugggccagagcaagcggguggacuucugcggcaagggcuaccaccugaugagcuucccccagagcgcuccccacggcgugguguuccuccacgugacauacguccccgcccaggagaagaacuucaccaccgcccccgccauuugccacgacggcaaggcccacuucccccgggagggaguguucgugagcaacggcacccacugguucgugacccagcggaacuucuacgagccucagaucaucaccaccgacaacaccuucgugagcggcaacugcgacguggugaucggcaucgugaacaacaccguguacgacccccugcagcccgagcuggacagcuucaaggaggagcuggacaaguacuucaagaaccacaccagcccagacguggaccugggcgacaucagcggcaucaacgccagcguggugaacauccagaaggagaucgaccggcugaacgagguggccaagaaccugaacgagagccugaucgaccugcaggagcugggcaaguacgagcaguacaucaaguggcccugguacaucuggcugggcuucaucgccggccugaucgccaucgugauggugaccaucaugcugugcugcaugaccagcugcuguagcugccugaagggcugcugcagcugcggcagcugcugcaaguucgacgaggacgacagcgagcccgugcugaagggcgugaagcugcacuacaccugaggacuaguuauaagacugacuagcccgaugggccucccaacgggcccuccuccccuccuugcaccgagauuaauagaucucaaaggcucuuuucagagccaccaaaaaaaaaaaaaaaaaaaaaaaaaaaaaaaaaaaaaaaaaaaaaaaaaaaaaaaaaaaaaaaaaaaaaaaaaaaaaaaaaaaaaaaaaaaaaaaaaaaaa

SEQ ID NO: 24459 - RNA, 4041 nt, Artificial Sequence
  SARS-CoV-2/Wuhan/WIV05/2019__EPI_ISL_402128 spike protein mRNA gc (1-1273)(K986P_V987P_D614G_I692V)
aggagaaagcuuaccauguucguguuccuggugcugcugccccuggugagcagccagugcgugaaccugaccacccggacccagcugcccccugccuacaccaacagcuucacccggggcguguacuaccccgacaagguguuccggagcagcgugcugcacagcacccaggaccuguuccugcccuucuucagcaacgugaccugguuccacgccauccacgugagcggcaccaacggcaccaagcgguucgacaacccagugcugcccuucaacgacggcguguacuucgccagcaccgagaagucaaacaucauccggggcuggaucuucggcaccacccuggacagcaagacacagagccugcugaucgugaacaacgccaccaacguggugaucaaggugugcgaguuucaguucugcaacgaccccuuccugggcguguacuaccacaagaacaacaagagcuggauggagagcgaguuccgggucuacagcagcgcuaacaauugcaccuucgaguacgugagccagcccuuccugauggaccucgagggcaagcagggcaacuucaagaaccugcgggaguucguguucaagaacaucgauggcuacuucaagaucuacagcaagcacacccccaucaaccuggugcgggaccugccccagggauucagcgcccuggagccucugguggaccugcccaucggcaucaacaucaccagguuccagacccugcuggcccugcaccggagcuaccugacccccggcgacagcagcagcggcuggaccgccggcgccgccgcauacuacgugggcuaccugcagccacggaccuuccugcugaaguacaacgagaacggcaccaucaccgacgccguggacugcgcccuggacccccugagcgagaccaagugcacccuaaagagcuucaccguggagaagggcaucuaccagaccagcaacuuccgggugcagcccacugagagcaucgugcgguuccccaacauuaccaaccugugucccuucggcgagguguucaacgccacccgguucgccagcguguacgccuggaaccggaagcggaucagcaacugcguggccgacuacagcgugcuguacaacagcgccagcuucagcaccuucaagugcuacggcgugagcccuaccaagcugaacgaccugugcuucaccaacguguacgcugacagcuucgugauccggggcgacgaggugcggcagaucgcccccggccagaccggcaagaucgccgacuacaacuacaagcugcccgacgacuucaccggcugcgugaucgccuggaacagcaacaaccuggacagcaaggugggcggcaacuacaacuaccuguaccggcuguuccguaagagcaaccugaagccauucgagcgggacaucagcaccgagaucuaccaggccggcagcacccccugcaacgguguggagggcuuuaacugcuacuucccccugcagagcuacggcuuccagcccaccaacggcgugggcuaccagcccuaccgggugguggugcugagcuucgagcugcugcacgcccccgccaccgugugcggcccuaaaaagagcaccaaccuggugaagaacaagugcgugaacuucaauuucaacggccugaccggcaccggcgugcugaccgagagcaacaagaaguuccugcccuuccagcaguucggccgggauaucgccgacaccaccgacgcagugcgggacccccagacccuggagauccuggacaucaccccaugcagcuucggcggcgugagcgucaucacccccggcacaaacaccagcaaccagguggccgugcuguaccagggagugaacugcaccgaggugcccguggccauccacgccgaccagcugacccccaccuggcggguguacagcaccggcagcaacguguuccagacccgggccggcugccugaucggcgccgagcacgugaacaacuccuacgagugcgacauccccaucggcgcuggcaucugcgccagcuaccagacccagaccaacagcccccggcgggcccggagcguggccagccagagcgugaucgccuacaccaugagcuuaggcgccgagaacagcguggccuacagcaacaacagcaucgcgaucccuaccaacuucaccaucagcgugaccaccgagauccugcccgugagcaugaccaagaccagcguggacuguaccauguacauaugcggcgacagcaccgagugcagcaaccugcugcugcaguacggcagcuucugcacccagcugaaccgggcccugaccggcaucgccguggagcaggacaagaacacccaagagguguucgcccaggugaagcagaucuacaagacucccccaaucaaggacuucggcggcuucaacuucagccagauccugcccgaccccagcaagcccagcaagcggagcuucaucgaggaccugcuguucaacaaggugacccuggccgacgccggcuucaucaagcaguacggcgacugccugggggauaucgccgcucgggaccugaucugcgcccagaaguucaacggccugaccgugcugcccccucugcugaccgacgagaugaucgcccaguacaccagcgcccugcuugccggcaccaucaccagcggcuggaccuucggcgccggcgcagcccugcagauccccuucgccaugcagauggccuaccgguucaacggcaucggcgugacccagaacgugcuguacgagaaccagaagcugaucgccaaccaguucaacagcgccaucggcaagauccaggacagccugagcagcaccgccagcgcccugggcaagcugcaggacguggugaaccagaacgcucaggcccugaacacccuggugaagcagcugagcagcaacuucggcgccaucagcucagugcugaaugacauccugagcaggcuggaucccccagaggccgaggugcagaucgaccggcugaucaccggccggcugcagagccugcagaccuacgugacccagcagcugauccgggccgccgagauccgggccagcgccaaccuggcagccaccaagaugagcgagugcgugcugggccagagcaagcggguggacuuuugcggcaagggcuaccaccugaugagcuucccccagagcgcuccccacggcgugguguuccuccacgucacauacgugcccgcccaggagaagaacuucaccaccgcccccgccaucugccacgacggcaaggcccacuucccccgggagggaguguucgugagcaacggcacccacugguucgugacccagcggaacuucuacgagccucagauuaucaccaccgacaacaccuucgugagcggcaacugcgacguggugaucggcaucgugaacaacaccguguacgacccccugcagcccgagcuggacagcuucaaggaggagcuggacaaguacuucaagaaccacaccagcccagacguggaccugggcgacaucagcggcaucaacgccagcguggugaacauccagaaggagaucgaccggcugaacgagguggccaagaaccugaacgagagccugaucgaccugcaggagcugggcaaguacgagcaguacaucaaguggcccugguacaucuggcugggcuucaucgccggccugaucgccaucgugauggugaccaucaugcugugcugcaugaccagcugcuguagcugccugaagggcugcugcagcugcggcagcugcugcaaguucgacgaggacgacagcgagcccgugcugaagggcgugaagcugcacuacaccugaggacuaguuauaagacugacuagcccgaugggccucccaacgggcccuccuccccuccuugcaccgagauuaauagaucucaaaggcucuuuucagagccaccaaaaaaaaaaaaaaaaaaaaaaaaaaaaaaaaaaaaaaaaaaaaaaaaaaaaaaaaaaaaaaaaaaaaaaaaaaaaaaaaaaaaaaaaaaaaaaaaaaaaa

SEQ ID NO: 24460 - RNA, 4041 nt, Artificial Sequence
  SARS-CoV-2/Wuhan/WIV05/2019__EPI_ISL_402128 spike protein mRNA gc (1-1273)(K986P_V987P_D614G_M1229I)
aggagaaagcuuaccauguucguguuccuggugcugcugccccuggugagcagccagugcgugaaccugaccacccggacccagcugcccccugccuacaccaacagcuucacccggggcguguacuaccccgacaagguguuccggagcagcgugcugcacagcacccaggaccuguuccugcccuucuucagcaacgugaccugguuccacgccauccacgugagcggcaccaacggcaccaagcgguucgacaacccagugcugcccuucaacgacggcguguacuucgccagcaccgagaagucaaacaucauccggggcuggaucuucggcaccacccuggacagcaagacacagagccugcugaucgugaacaacgccaccaacguggugaucaaggugugcgaguuucaguucugcaacgaccccuuccugggcguguacuaccacaagaacaacaagagcuggauggagagcgaguuccgggucuacagcagcgcuaacaauugcaccuucgaguacgugagccagcccuuccugauggaccucgagggcaagcagggcaacuucaagaaccugcgggaguucguguucaagaacaucgauggcuacuucaagaucuacagcaagcacacccccaucaaccuggugcgggaccugccccagggauucagcgcccuggagccucugguggaccugcccaucggcaucaacaucaccagguuccagacccugcuggcccugcaccggagcuaccugacccccggcgacagcagcagcggcuggaccgccggcgccgccgcauacuacgugggcuaccugcagccacggaccuuccugcugaaguacaacgagaacggcaccaucaccgacgccguggacugcgcccuggacccccugagcgagaccaagugcacccuaaagagcuucaccguggagaagggcaucuaccagaccagcaacuuccgggugcagcccacugagagcaucgugcgguuccccaacauuaccaaccugugucccuucggcgagguguucaacgccacccgguucgccagcguguacgccuggaaccggaagcggaucagcaacugcguggccgacuacagcgugcuguacaacagcgccagcuucagcaccuucaagugcuacggcgugagcccuaccaagcugaacgaccugugcuucaccaacguguacgcugacagcuucgugauccggggcgacgaggugcggcagaucgcccccggccagaccggcaagaucgccgacuacaacuacaagcugcccgacgacuucaccggcugcgugaucgccuggaacagcaacaaccuggacagcaaggugggcggcaacuacaacuaccuguaccggcuguuccguaagagcaaccugaagccauucgagcgggacaucagcaccgagaucuaccaggccggcagcacccccugcaacgguguggagggcuuuaacugcuacuucccccugcagagcuacggcuuccagcccaccaacggcgugggcuaccagcccuaccgggugguggugcugagcuucgagcugcugcacgcccccgccaccgugugcggcccuaaaaagagcaccaaccuggugaagaacaagugcgugaacuucaauuucaacggccugaccggcaccggcgugcugaccgagagcaacaagaaguuccugcccuuccagcaguucggccgggauaucgccgacaccaccgacgcagugcgggacccccagacccuggagauccuggacaucaccccaugcagcuucggcggcgugagcgucaucacccccggcacaaacaccagcaaccagguggccgugcuguaccagggagugaacugcaccgaggugcccguggccauccacgccgaccagcugacccccaccuggcggguguacagcaccggcagcaacguguuccagacccgggccggcugccugaucggcgccgagcacgugaacaacuccuacgagugcgacauccccaucggcgcuggcaucugcgccagcuaccagacccagaccaacagcccccggcgggcccggagcguggccagccagagcaucaucgccuacaccaugagcuuaggcgccgagaacagcguggccuacagcaacaacagcaucgcgaucccuaccaacuucaccaucagcgugaccaccgagauacugcccgugagcaugaccaagaccagcguggacuguaccauguacaucugcggcgacagcaccgagugcagcaaccugcugcugcaguacggcagcuucugcacccagcugaaccgggcccugaccggcaucgccguggagcaggacaagaacacccaagagguguucgcccaggugaagcagaucuacaagacucccccaaucaaggacuucggcggcuucaacuucagccagauccugcccgaccccagcaagcccagcaagcggagcuucaucgaggaccugcuguucaacaaggugacccuggccgacgccggcuucaucaagcaguacggcgacugccugggggauaucgccgcucgggaccugaucugcgcccagaaguucaacggccugaccgugcugcccccucugcugaccgacgagaugaucgcccaguacaccagcgcccugcuugccggcaccaucaccagcggcuggaccuucggcgccggcgcagcccugcagauccccuucgccaugcagauggccuaccgguucaacggcaucggcgugacccagaacgugcuguacgagaaccagaagcugaucgccaaccaguucaacagcgccaucggcaagauccaggacagccugagcagcaccgccagcgcccugggcaagcugcaggacguggugaaccagaacgcucaggcccugaacacccuggugaagcagcugagcagcaacuucggcgccaucagcucagugcugaaugacauccugagcaggcuggaucccccagaggccgaggugcagaucgaccggcugaucaccggccggcugcagagccugcagaccuacgugacccagcagcugauccgggccgccgagauccgggccagcgccaaccuggcagccaccaagaugagcgagugcgugcugggccagagcaagcggguggacuuuugcggcaagggcuaccaccugaugagcuucccccagagcgcuccccacggcgugguguuccuccacgugacauacguccccgcccaggagaagaacuucaccaccgcccccgccauuugccacgacggcaaggcccacuucccccgggagggaguguucgugagcaacggcacccacugguucgugacccagcggaacuucuacgagccucagaucaucaccaccgacaacaccuucgugagcggcaacugcgacguggugaucggcaucgugaacaacaccguguacgacccccugcagcccgagcuggacagcuucaaggaggagcuggacaaguacuucaagaaccacaccagcccagacguggaccugggcgacaucagcggcaucaacgccagcguggugaacauccagaaggagaucgaccggcugaacgagguggccaagaaccugaacgagagccugaucgaccugcaggagcugggcaaguacgagcaguacaucaaguggcccugguacaucuggcugggcuucaucgccggccugaucgccaucgugaucgugaccaucaugcugugcugcaugaccagcugcuguagcugccugaagggcugcugcagcugcggcagcugcugcaaguucgacgaggacgacagcgagcccgugcugaagggcgugaagcugcacuacaccugaggacuaguuauaagacugacuagcccgaugggccucccaacgggcccuccuccccuccuugcaccgagauuaauagaucucaaaggcucuuuucagagccaccaaaaaaaaaaaaaaaaaaaaaaaaaaaaaaaaaaaaaaaaaaaaaaaaaaaaaaaaaaaaaaaaaaaaaaaaaaaaaaaaaaaaaaaaaaaaaaaaaaaaa

SEQ ID NO: 24461 - RNA, 4035 nt, Artificial Sequence
  SARS-CoV-2/Wuhan/WIV05/2019__EPI_ISL_402128 spike protein mRNA gc (1-1273)(K986P_V987P_H69del_V70del_A222V_Y453F_S477N_D614G_I692V)
aggagaaagcuuaccauguucguguuccuggugcugcugccccuggugagcagccagugcgugaaccugaccacccggacccagcugcccccugccuacaccaacagcuucacccggggcguguacuaccccgacaagguguuccggagcagcgugcugcacagcacccaggaccuguuccugcccuucuucagcaacgugaccugguuccacgccaucagcggcaccaacggcaccaagcgguucgacaacccagugcugcccuucaacgacggcguguacuucgccagcaccgagaagucaaacaucauccggggcuggaucuucggcaccacccuggacagcaagacacagagccugcugaucgugaacaacgccaccaacguggugaucaaggugugcgaguuucaguucugcaacgaccccuuccugggcguguacuaccacaagaacaacaagagcuggauggagagcgaguuccggguguacagcagcgcuaacaauugcaccuucgaguacgucagccagcccuuccugauggaccucgagggcaagcagggcaacuucaagaaccugcgggaguucguguucaagaacaucgauggcuacuucaagaucuacagcaagcacacccccaucaaccuggugcgggaccugccccagggauucagcgugcuggagccucugguggaccugcccaucggcaucaacaucaccagguuccagacccugcuggcccugcaccggagcuaccugacccccggcgacagcagcagcggcuggaccgccggcgccgccgccuacuacgugggcuaccugcagccacggaccuuccugcugaaguacaacgagaacggcaccaucaccgacgcaguggacugcgcccuggacccccugagcgagaccaagugcacccuaaagagcuucaccguggagaagggcaucuaccagaccagcaacuuccgggugcagcccacugagagcaucgugcgguuccccaacauuaccaaccugugucccuucggcgagguguucaacgccacccgguucgccagcguguacgccuggaaccggaagcggaucagcaacugcguggccgacuacagcgugcuguacaacagcgccagcuucagcaccuucaagugcuacggcgugagcccuaccaagcugaacgaccugugcuucaccaacguguacgccgacagcuucgugauccggggcgacgaggugcggcagaucgcucccggccagaccggcaagaucgccgacuacaacuacaagcugcccgacgacuucaccggcugcgugaucgccuggaacagcaacaaccuggacagcaaggugggcggcaacuacaacuaccuguuccggcuguuccguaagagcaaccugaagccauuugagcgggacaucagcaccgagaucuaccaggccggcaacacccccugcaacgguguggagggcuucaacugcuacuucccccugcagagcuacggcuuccagcccaccaacggcgugggcuaccagcccuaccgggugguggugcugagcuucgagcugcugcacgcccccgccaccgugugcggcccuaaaaagagcaccaaccuggugaagaacaagugcgugaauuucaacuucaacggccugaccggcaccggcgugcugaccgagagcaacaagaaguuccugcccuuccagcaguucggccgggauaucgccgacaccaccgacgccgugcgggacccccagacccuggagauccuggacaucaccccaugcagcuucggcggcgugagcgucaucacccccggcacaaacaccagcaaccagguggcagugcuguaccagggagugaacugcaccgaggugcccguggccauccacgccgaccagcugacccccaccuggcggguguacagcaccggcagcaacguguuccagacccgggccggcugccugaucggcgccgagcacgugaacaacagcuacgagugcgacauccccaucggcgccggcaucugcgcuuccuaccagacccagaccaacagcccccggcgggcccggagcguggccagccagagcgugaucgccuacaccaugagcuuaggcgccgagaacagcguggccuacagcaacaacagcaucgccaucccuaccaacuucaccaucagcgugaccaccgagauccugcccgugagcaugaccaagaccagcguggacuguaccauguacauaugcggcgacagcaccgagugcagcaaccugcugcugcaguacggcagcuucugcacccagcugaaccgggcgcugaccggcaucgccguggagcaggacaagaacacccaagagguguucgcccaggugaagcagaucuacaagacucccccaaucaaggacuucggcggcuucaacuucagccagauccugcccgaccccagcaagcccagcaagcggagcuucaucgaggaccugcuguucaacaaggugacccuggccgacgccggcuucaucaagcaguacggcgacugccugggggauaucgccgcccgggaccugaucugcgcucagaaguucaacggccugaccgugcugcccccucugcugaccgacgagaugaucgcccaguacaccagcgcccugcuugccggcaccaucaccagcggcuggaccuucggcgccggcgccgcacugcagauccccuucgccaugcagauggccuaccgguucaacggcaucggcgugacccagaacgugcuguacgagaaccagaagcugaucgccaaccaguucaacagcgccaucggcaagauccaggacagccugagcagcaccgccagcgcccugggcaagcugcaggacguggugaaccagaacgcccaggcucugaacacccuggugaagcagcugagcagcaauuuuggcgccaucagcagcgugcugaacgacauccugucaaggcuggaucccccagaggccgaggugcagaucgaccggcugaucaccggccggcugcagagccugcagaccuacgugacccagcagcugauccgggccgccgagauccgggccagcgccaaccuggccgcaaccaagaugagcgagugcgugcugggccagagcaagcggguggacuucugcggcaagggcuaccaccugaugagcuucccccagagcgcuccccacggcgugguguuccuccacgucacauacgugcccgcccaggagaagaacuucaccaccgcccccgccaucugccacgacggcaaggcccacuucccccgggagggaguguucgugagcaacggcacccacugguucgugacccagcggaacuucuacgagccucagauuaucaccaccgacaacaccuucgugagcggcaacugcgacguggugaucggcaucgugaacaacaccguguacgacccccugcagcccgagcuggacagcuucaaggaggagcuggacaaguacuucaagaaccacaccagcccagacguggaccugggcgacaucagcggcaucaacgccagcguggugaacauccagaaggagaucgaccggcugaacgagguggccaagaaccugaacgagagccugaucgaccugcaggagcugggcaaguacgagcaguacaucaaguggcccugguacaucuggcugggcuucaucgccggccugaucgccaucgugauggugaccaucaugcugugcugcaugaccagcugcuguagcugccugaagggcugcugcagcugcggcagcugcugcaaguucgacgaggacgacagcgagcccgugcugaagggcgugaagcugcacuacaccugaggacuaguuauaagacugacuagcccgaugggccucccaacgggcccuccuccccuccuugcaccgagauuaauagaucucaaaggcucuuuucagagccaccaaaaaaaaaaaaaaaaaaaaaaaaaaaaaaaaaaaaaaaaaaaaaaaaaaaaaaaaaaaaaaaaaaaaaaaaaaaaaaaaaaaaaaaaaaaaaaaaaaaaa

SEQ ID NO: 24462 - RNA, 4035 nt, Artificial Sequence
  SARS-CoV-2/Wuhan/WIV05/2019__EPI_ISL_402128 spike protein mRNA gc (1-1273)(K986P_V987P_H69del_V70del_Y453F_D614G_I692V_M1229I)
aggagaaagcuuaccauguucguguuccuggugcugcugccccuggugagcagccagugcgugaaccugaccacccggacccagcugcccccugccuacaccaacagcuucacccggggcguguacuaccccgacaagguguuccggagcagcgugcugcacagcacccaggaccuguuccugcccuucuucagcaacgugaccugguuccacgccaucagcggcaccaacggcaccaagcgguucgacaacccagugcugcccuucaacgacggcguguacuucgccagcaccgagaagucaaacaucauccggggcuggaucuucggcaccacccuggacagcaagacacagagccugcugaucgugaacaacgccaccaacguggugaucaaggugugcgaguuucaguucugcaacgaccccuuccugggcguguacuaccacaagaacaacaagagcuggauggagagcgaguuccggguguacagcagcgcuaacaauugcaccuucgaguacgucagccagcccuuccugauggaccucgagggcaagcagggcaacuucaagaaccugcgggaguucguguucaagaacaucgauggcuacuucaagaucuacagcaagcacacccccaucaaccuggugcgggaccugccccagggauucagcgcccuggagccucugguggaccugcccaucggcaucaacaucaccagguuccagacccugcuggcccugcaccggagcuaccugacccccggcgacagcagcagcggcuggaccgccggcgccgccgcauacuacgugggcuaccugcagccacggaccuuccugcugaaguacaacgagaacggcaccaucaccgacgccguggacugcgcccuggacccccugagcgagaccaagugcacccuaaagagcuucaccguggagaagggcaucuaccagaccagcaacuuccgggugcagcccacugagagcaucgugcgguuccccaacauuaccaaccugugucccuucggcgagguguucaacgccacccgguucgccagcguguacgccuggaaccggaagcggaucagcaacugcguggccgacuacagcgugcuguacaacagcgccagcuucagcaccuucaagugcuacggcgugagcccuaccaagcugaacgaccugugcuucaccaacguguacgcugacagcuucgugauccggggcgacgaggugcggcagaucgcccccggccagaccggcaagaucgccgacuacaacuacaagcugcccgacgacuucaccggcugcgugaucgccuggaacagcaacaaccuggacagcaaggugggcggcaacuacaacuaccuguuccggcuguuccguaagagcaaccugaagccauuugagcgggacaucagcaccgagaucuaccaggccggcagcacccccugcaacgguguggagggcuucaacugcuacuucccccugcagagcuacggcuuccagcccaccaacggcgugggcuaccagcccuaccgggugguggugcugagcuucgagcugcugcacgcccccgccaccgugugcggcccuaaaaagagcaccaaccuggugaagaacaagugcgugaacuucaauuucaacggccugaccggcaccggcgugcugaccgagagcaacaagaaguuccugcccuuccagcaguucggccgggauaucgccgacaccaccgacgcagugcgggacccccagacccuggagauccuggacaucaccccaugcagcuucggcggcgugagcgugaucacccccggcacaaacaccagcaaccaggucgccgugcuguaccagggagugaacugcaccgaggugcccguggccauccacgccgaccagcugacccccaccuggcggguguacagcaccggcagcaacguguuccagacccgggccggcugccugaucggcgccgagcacgugaacaacuccuacgagugcgacauccccaucggcgcuggcaucugcgccagcuaccagacccagaccaacagcccccggcgggcccggagcguggccagccagagcgugaucgccuacaccaugagcuuaggcgccgagaacagcguggccuacagcaacaacagcaucgcgaucccuaccaacuucaccaucagcgugaccaccgagauccugcccgugagcaugaccaagaccagcguggacuguaccauguacauaugcggcgacagcaccgagugcagcaaccugcugcugcaguacggcagcuucugcacccagcugaaccgggcccugaccggcaucgccguggagcaggacaagaacacccaagagguguucgcccaggugaagcagaucuacaagacucccccaaucaaggacuucggcggcuucaacuucagccagauccugcccgaccccagcaagcccagcaagcggagcuucaucgaggaccugcuguucaacaaggugacccuggccgacgccggcuucaucaagcaguacggcgacugccugggggauaucgccgcucgggaccugaucugcgcccagaaguucaacggccugaccgugcugcccccucugcugaccgacgagaugaucgcccaguacaccagcgcccugcuugccggcaccaucaccagcggcuggaccuucggcgccggcgcagcccugcagauccccuucgccaugcagauggccuaccgguucaacggcaucggcgugacccagaacgugcuguacgagaaccagaagcugaucgccaaccaguucaacagcgccaucggcaagauccaggacagccugagcagcaccgccagcgcccugggcaagcugcaggacguggugaaccagaacgcucaggcccugaacacccuggugaagcagcugagcagcaacuuuggcgccaucagcucagugcugaaugacauccugagcaggcuggaucccccagaggccgaggugcagaucgaccggcugaucaccggccggcugcagagccugcagaccuacgugacccagcagcugauccgggccgccgagauccgggccagcgccaaccuggcagccaccaagaugagcgagugcgugcugggccagagcaagcggguggacuucugcggcaagggcuaccaccugaugagcuucccccagagcgcuccccacggcgugguguuccuccacgugacauacguccccgcccaggagaagaacuucaccaccgcccccgccaucugccacgacggcaaggcccacuucccccgggagggaguguucgugagcaacggcacccacugguucgugacccagcggaacuucuacgagccucagauuaucaccaccgacaacaccuucgugagcggcaacugcgacguggugaucggcaucgugaacaacaccguguacgacccccugcagcccgagcuggacagcuucaaggaggagcuggacaaguacuucaagaaccacaccagcccagacguggaccugggcgacaucagcggcaucaacgccagcguggugaacauccagaaggagaucgaccggcugaacgagguggccaagaaccugaacgagagccugaucgaccugcaggagcugggcaaguacgagcaguacaucaaguggcccugguacaucuggcugggcuucaucgccggccugaucgccaucgugaucgugaccaucaugcugugcugcaugaccagcugcuguagcugccugaagggcugcugcagcugcggcagcugcugcaaguucgacgaggacgacagcgagcccgugcugaagggcgugaagcugcacuacaccugaggacuaguuauaagacugacuagcccgaugggccucccaacgggcccuccuccccuccuugcaccgagauuaauagaucucaaaggcucuuuucagagccaccaaaaaaaaaaaaaaaaaaaaaaaaaaaaaaaaaaaaaaaaaaaaaaaaaaaaaaaaaaaaaaaaaaaaaaaaaaaaaaaaaaaaaaaaaaaaaaaaaaaaa

SEQ ID NO: 24463 - RNA, 4032 nt, Artificial Sequence
  SARS-CoV-2/Wuhan/WIV05/2019__EPI_ISL_402128 spike protein mRNA gc (1-1273)(K986P_V987P_K986P_V987P_H69del_V70del_Y144del_N501Y_A570 D_D614G_P681H_T716I_S982A_D1118H)
aggagaaagcuuaccauguucguguuccuggugcugcugccccuggugagcagccagugcgugaaccugaccacccggacccagcugcccccugccuacaccaacagcuucacccggggcguguacuaccccgacaagguguuccggagcagcgugcugcacagcacccaggaccuguuccugcccuucuucagcaacgugaccugguuccacgccaucagcggcaccaacggcaccaagcgguucgacaacccagugcugcccuucaacgacggcguguacuucgccagcaccgagaagucaaacaucauccggggcuggaucuucggcaccacccuggacagcaagacacagagccugcugaucgugaacaacgccaccaacguggugaucaaggugugcgaguuucaguucugcaacgaccccuuccugggcguguaccacaagaacaacaagagcuggauggagagcgaguuccggguguacagcagcgcuaacaauugcaccuucgaguacgucagccagcccuuccugauggaccucgagggcaagcagggcaacuucaagaaccugcgggaguucguguucaagaacaucgauggcuacuucaagaucuacagcaagcacacccccaucaaccuggugcgggaccugccccagggauucagcgcccuggagccucugguggaccugcccaucggcaucaacaucaccagguuccagacccugcuggcccugcaccggagcuaccugacccccggcgacagcagcagcggcuggaccgccggcgccgccgcauacuacgugggcuaccugcagccacggaccuuccugcugaaguacaacgagaacggcaccaucaccgacgccguggacugcgcccuggacccccugagcgagaccaagugcacccuaaagagcuucaccguggagaagggcaucuaccagaccagcaacuuccgggugcagcccacugagagcaucgugcgguuccccaacauuaccaaccugugucccuucggcgagguguucaacgccacccgguucgccagcguguacgccuggaaccggaagcggaucagcaacugcguggccgacuacagcgugcuguacaacagcgccagcuucagcaccuucaagugcuacggcgugagcccuaccaagcugaacgaccugugcuucaccaacguguacgcugacagcuucgugauccggggcgacgaggugcggcagaucgcccccggccagaccggcaagaucgccgacuacaacuacaagcugcccgacgacuucaccggcugcgugaucgccuggaacagcaacaaccuggacagcaaggugggcggcaacuacaacuaccuguaccggcuguuccguaagagcaaccugaagccauucgagcgggacaucagcaccgagaucuaccaggccggcagcacccccugcaacgguguggagggcuuuaacugcuacuucccccugcagagcuacggcuuccagcccaccuacggcgugggcuaccagcccuaccgggugguggugcugagcuucgagcugcugcacgcccccgccaccgugugcggcccuaaaaagagcaccaaccuggugaagaacaagugcgugaacuucaacuucaauggccugaccggcaccggcgugcugaccgagagcaacaagaaguuccugcccuuccagcaguucggccgggauaucgacgacaccaccgacgccgugcgggacccccagacccuggagauccuggacaucaccccaugcagcuucggcggcgugagcgugaucacccccggcacaaacaccagcaaccaggucgcagugcuguaccagggagugaacugcaccgaggugcccguggccauccacgccgaccagcugacccccaccuggcggguguacagcaccggcagcaacguguuccagacccgggccggcugccugaucggcgccgagcacgugaacaacuccuacgagugcgacauccccaucggcgccggcaucugcgcuagcuaccagacccagaccaacagccaccggcgggcccggagcguggccagccagagcaucaucgccuacaccaugagcuuaggcgccgagaacagcguggccuacagcaacaacagcaucgccauccccaucaacuucaccauaagcgugaccaccgagauccugccugugagcaugaccaagaccagcguggacuguaccauguacaucugcggcgacagcaccgagugcagcaaccugcugcugcaguacggcagcuucugcacccagcugaaccgggcgcugaccggcaucgccguggagcaggacaagaacacccaagagguguucgcccaggugaagcagaucuacaagaccccacccaucaaggacuucggcggcuucaacuucagccagauccugcccgaccccagcaagcccagcaagcggagcuucaucgaggaccugcuguucaacaaggugacucuggccgacgccggcuucaucaagcaguacggcgauugccugggggacaucgccgcccgggaccugaucugcgcucagaaguucaacggccugaccgugcugccuccccugcugaccgacgagaugaucgcccaguacaccagcgcccugcuugccggcaccaucaccagcggcuggaccuucggcgccggcgccgcacugcagauccccuucgccaugcagauggccuaccgguucaacggcaucggcgugacccagaacgugcuguacgagaaccagaagcugaucgccaaccaguucaacagcgccaucggcaagauccaggacagccugagcagcaccgccagcgcccugggcaagcugcaggacguggugaaccagaacgcccaggcucugaacacccuggugaagcagcugagcagcaacuucggcgccaucagcucagugcugaacgacauccuggccaggcuggacccacccgaggccgaggugcagaucgaccggcugaucaccggccggcugcagagccugcagaccuacgugacccagcagcugauccgggccgccgagauucgggccagcgccaaucuggcagccaccaagaugagcgagugcgugcugggccagagcaagcggguggacuuuugcggcaagggcuaccaccugaugagcuucccccagagcgcuccccacggcgugguguuccuccacgugaccuacgugcccgcccaggagaagaacuucacaaccgcccccgccaucugccacgacggcaaggcccacuucccccgggagggagucuucgugagcaacggcacccacugguucgugacccagcggaacuucuacgagccccagaucaucaccacccacaacaccuucgugagcggcaacugcgacguggugaucggcaucgugaacaacaccguguacgacccucugcagcccgagcuggacagcuucaaggaggagcuggacaaguacuucaagaaccacaccagccccgacguggaucugggcgacaucagcggcaucaacgccagcguggugaacauccagaaggagaucgaccggcugaacgagguggccaagaaccugaacgagagccugaucgaccugcaggagcugggcaaguacgagcaguacaucaaguggccaugguacaucuggcugggcuucaucgccggccugaucgccaucgugauggugaccaucaugcugugcugcaugaccagcugcuguagcugccugaagggcugcugcagcugcggcagcugcugcaaguucgacgaggacgacagcgagcccgugcugaagggcgugaagcugcacuacaccugaggacuaguuauaagacugacuagcccgaugggccucccaacgggcccuccuccccuccuugcaccgagauuaauagaucucaaaggcucuuuucagagccaccaaaaaaaaaaaaaaaaaaaaaaaaaaaaaaaaaaaaaaaaaaaaaaaaaaaaaaaaaaaaaaaaaaaaaaaaaaaaaaaaaaaaaaaaaaaaaaaaaaaaa

SEQ ID NO: 24464 - RNA, 4041 nt, Artificial Sequence
  SARS-CoV-2/Wuhan/WIV05/2019__EPI_ISL_402128 spike protein mRNA gc (1-1273)(K986P_V987P_K986P_V987P_K417N_E484K_N501Y_D614G)
aggagaaagcuuaccauguucguguuccuggugcugcugccccuggugagcagccagugcgugaaccugaccacccggacccagcugcccccugccuacaccaacagcuucacccggggcguguacuaccccgacaagguguuccggagcagcgugcugcacagcacccaggaccuguuccugcccuucuucagcaacgugaccugguuccacgccauccacgugagcggcaccaacggcaccaagcgguucgacaacccagugcugcccuucaacgacggcguguacuucgccagcaccgagaagucaaacaucauccggggcuggaucuucggcaccacccuggacagcaagacacagagccugcugaucgugaacaacgccaccaacguggugaucaaggugugcgaguuucaguucugcaacgaccccuuccugggcguguacuaccacaagaacaacaagagcuggauggagagcgaguuccgggucuacagcagcgcuaacaauugcaccuucgaguacgugagccagcccuuccugauggaccucgagggcaagcagggcaacuucaagaaccugcgggaguucguguucaagaacaucgauggcuacuucaagaucuacagcaagcacacccccaucaaccuggugcgggaccugccccagggauucagcgcccuggagccucugguggaccugcccaucggcaucaacaucaccagguuccagacccugcuggcccugcaccggagcuaccugacccccggcgacagcagcagcggcuggaccgccggcgccgccgcauacuacgugggcuaccugcagccacggaccuuccugcugaaguacaacgagaacggcaccaucaccgacgccguggacugcgcccuggacccccugagcgagaccaagugcacccuaaagagcuucaccguggagaagggcaucuaccagaccagcaacuuccgggugcagcccacugagagcaucgugcgguuccccaacauuaccaaccugugucccuucggcgagguguucaacgccacccgguucgccagcguguacgccuggaaccggaagcggaucagcaacugcguggccgacuacagcgugcuguacaacagcgccagcuucagcaccuucaagugcuacggcgugagcccuaccaagcugaacgaccugugcuucaccaacguguacgcugacagcuucgugauccggggcgacgaggugcggcagaucgcccccggccagaccggcaacaucgccgacuacaacuacaagcugcccgacgacuucaccggcugcgugaucgccuggaacagcaacaaccuggacagcaaggugggcggcaacuacaacuaccuguaccggcuguuccguaagagcaaccugaagccauucgagcgggacaucagcaccgagaucuaccaggccggcagcacccccugcaacggugugaagggcuuuaacugcuacuucccccugcagagcuacggcuuccagcccaccuacggcgugggcuaccagcccuaccgggugguggugcugagcuucgagcugcugcacgcccccgccaccgugugcggcccuaaaaagagcaccaaccuggugaagaacaagugcgugaacuucaauuucaacggccugaccggcaccggcgugcugaccgagagcaacaagaaguuccugcccuuccagcaguucggccgggauaucgccgacaccaccgacgcagugcgggacccccagacccuggagauccuggacaucaccccaugcagcuucggcggcgugagcgucaucacccccggcacaaacaccagcaaccagguggccgugcuguaccagggagugaacugcaccgaggugcccguggccauccacgccgaccagcugacccccaccuggcggguguacagcaccggcagcaacguguuccagacccgggccggcugccugaucggcgccgagcacgugaacaacuccuacgagugcgacauccccaucggcgcuggcaucugcgccagcuaccagacccagaccaacagcccccggcgggcccggagcguggccagccagagcaucaucgccuacaccaugagcuuaggcgccgagaacagcguggccuacagcaacaacagcaucgcgaucccuaccaacuucaccaucagcgugaccaccgagauacugcccgugagcaugaccaagaccagcguggacuguaccauguacaucugcggcgacagcaccgagugcagcaaccugcugcugcaguacggcagcuucugcacccagcugaaccgggcccugaccggcaucgccguggagcaggacaagaacacccaagagguguucgcccaggugaagcagaucuacaagacucccccaaucaaggacuucggcggcuucaacuucagccagauccugcccgaccccagcaagcccagcaagcggagcuucaucgaggaccugcuguucaacaaggugacccuggccgacgccggcuucaucaagcaguacggcgacugccugggggauaucgccgcucgggaccugaucugcgcccagaaguucaacggccugaccgugcugcccccucugcugaccgacgagaugaucgcccaguacaccagcgcccugcuugccggcaccaucaccagcggcuggaccuucggcgccggcgcagcccugcagauccccuucgccaugcagauggccuaccgguucaacggcaucggcgugacccagaacgugcuguacgagaaccagaagcugaucgccaaccaguucaacagcgccaucggcaagauccaggacagccugagcagcaccgccagcgcccugggcaagcugcaggacguggugaaccagaacgcucaggcccugaacacccuggugaagcagcugagcagcaacuucggcgccaucagcucagugcugaaugacauccugagcaggcuggaucccccagaggccgaggugcagaucgaccggcugaucaccggccggcugcagagccugcagaccuacgugacccagcagcugauccgggccgccgagauccgggccagcgccaaccuggcagccaccaagaugagcgagugcgugcugggccagagcaagcggguggacuuuugcggcaagggcuaccaccugaugagcuucccccagagcgcuccccacggcgugguguuccuccacgugacauacguccccgcccaggagaagaacuucaccaccgcccccgccauuugccacgacggcaaggcccacuucccccgggagggaguguucgugagcaacggcacccacugguucgugacccagcggaacuucuacgagccucagaucaucaccaccgacaacaccuucgugagcggcaacugcgacguggugaucggcaucgugaacaacaccguguacgacccccugcagcccgagcuggacagcuucaaggaggagcuggacaaguacuucaagaaccacaccagcccagacguggaccugggcgacaucagcggcaucaacgccagcguggugaacauccagaaggagaucgaccggcugaacgagguggccaagaaccugaacgagagccugaucgaccugcaggagcugggcaaguacgagcaguacaucaaguggcccugguacaucuggcugggcuucaucgccggccugaucgccaucgugauggugaccaucaugcugugcugcaugaccagcugcuguagcugccugaagggcugcugcagcugcggcagcugcugcaaguucgacgaggacgacagcgagcccgugcugaagggcgugaagcugcacuacaccugaggacuaguuauaagacugacuagcccgaugggccucccaacgggcccuccuccccuccuugcaccgagauuaauagaucucaaaggcucuuuucagagccaccaaaaaaaaaaaaaaaaaaaaaaaaaaaaaaaaaaaaaaaaaaaaaaaaaaaaaaaaaaaaaaaaaaaaaaaaaaaaaaaaaaaaaaaaaaaaaaaaaaaaa

SEQ ID NO: 24465 - RNA, 4032 nt, Artificial Sequence
  SARS-CoV-2/Wuhan/WIV05/2019__EPI_ISL_402128 spike protein mRNA gc (1-1273)(K986P_V987P_K986P_V987P_L18F_D80A_D215G_L242del_A243del_ L244del_R246I_K417N_E484K_N501Y_D614G_A701V)
aggagaaagcuuaccauguucguguuccuggugcugcugccccuggugagcagccagugcgugaacuucaccacccggacccagcugcccccugccuacaccaacagcuucacccggggcguguacuaccccgacaagguguuccggagcagcgugcugcacagcacccaggaccuguuccugcccuucuucagcaacgugaccugguuccacgccauccacgugagcggcaccaacggcaccaagcgguucgccaacccagugcugcccuucaacgacggcguguacuucgccagcaccgagaagucaaacaucauccggggcuggaucuuuggcaccacccuggacagcaagacacagagccugcugaucgugaacaacgcuaccaacguggugaucaaggugugcgaguuccaguucugcaacgaccccuuccugggcguguacuaccacaagaacaacaagagcuggauggagagcgaguuccgggucuacagcagcgccaacaauugcaccuucgaguacgugagccagcccuuccugauggaccuggagggcaagcagggcaacuucaagaaccuccgggaguucguguucaagaacaucgacggcuacuucaagaucuacagcaagcacacccccaucaaccuggugcggggacugccccagggcuucagcgcccuggagccucugguggaucugcccaucggcaucaacaucaccagguuccagacccugcacaucagcuaccugacccccggcgacagcagcagcggcuggaccgccggcgccgccgcauacuacgugggcuaccugcagccacggaccuuccugcugaaguacaacgagaacggcaccaucaccgacgccguggacugcgcccuggacccccugagcgagaccaagugcacccuuaagagcuucaccguggagaagggcaucuaccagaccagcaacuuccgggugcagcccacugagagcauugugcgguuccccaacaucaccaaccugugucccuucggcgagguguucaacgccacccgguucgccagcguguacgccuggaaccggaagcggaucagcaacugcguggccgacuacagcgugcuguacaacagcgccagcuucagcaccuucaagugcuacggcgugagcccuaccaagcugaacgaccugugcuucaccaacguguacgcugacagcuucgugauccggggcgacgaggugcggcagaucgcccccggccagaccggcaacaucgccgacuacaacuacaagcugcccgacgacuucaccggcugcgugaucgccuggaacagcaacaaccuggacagcaaggugggcggcaacuacaacuaccuguaccggcuauuccguaagagcaaccugaagccauuugagcgggacaucagcaccgagaucuaccaggccgguagcacccccugcaacggcgugaagggcuucaacugcuacuucccccugcagagcuacggcuuccagcccaccuacggcgugggcuaccagcccuaccgggugguggugcugagcuucgagcugcugcacgcccccgccaccgugugcggcccuaaaaagagcaccaaccuggugaagaacaagugcgugaacuucaauuucaacggccugaccggcaccggcgugcugaccgagagcaacaagaaguuccugcccuuccagcaguucggccgggacaucgccgacaccaccgaugcagugcgggacccccagacccuggagauccuggacaucaccccaugcagcuucggcggcgugagcgucaucacccccggaacaaacaccagcaaccagguggccgugcuguaccagggcgugaacugcaccgaggugcccguggccauccacgccgaccagcugacccccaccuggcggguguacagcaccggcagcaacguguuccagacccgggccggcugccugaucggcgccgagcacgugaacaacuccuacgagugcgacauccccaucggcgcuggcaucugcgccagcuaccagacccagaccaacagcccccggcgggcccggagcguggccagccagagcaucaucgccuacaccaugagccugggcguggagaacagcguggccuacagcaacaacagcaucgccaucccuaccaacuucaccauaagcgugaccaccgagauccugcccgugagcaugaccaagaccagcguggacuguaccauguacaucugcggcgacagcaccgagugcagcaaccuguuacugcaguacggcagcuucugcacccagcugaaccgggcgcugaccggcaucgccguggagcaggacaagaacacccaagagguguucgcccaggugaagcagaucuacaagacucccccaaucaaggacuucggcggcuucaacuucagccagauccugcccgaccccagcaagcccagcaagcggagcuucaucgaggaccugcuguucaacaaggugacccuggccgacgccggcuucaucaagcaguacggggacugccugggcgacaucgccgcccgggaccugaucugcgcucagaaguucaacggccugaccgugcugcccccucugcugaccgaugagaugaucgcccaguacaccagcgcccugcuggccggcaccaucaccagcggcuggaccuucggcgccggcgccgcacugcagauccccuucgccaugcagauggccuaccgguucaacggcaucggcgugacccagaacgugcuguacgagaaccagaagcugaucgccaaccaguucaacagcgccaucggcaagauccaggacagccugagcagcaccgccagcgcccugggcaagcugcaggacguggugaaccagaacgcccaggcucugaacacccuggugaagcagcugagcagcaacuuuggcgccaucagcucagugcugaaugacauccugagccggcuggaucccccagaggccgaggugcagaucgacaggcugaucaccggccggcugcagagccugcagaccuacgugacccagcagcugauccgggccgccgagauucgggccagcgccaaccuggccgcaaccaagaugagcgagugcgugcugggccagagcaagcggguggacuucugcggcaagggcuaccaccugaugagcuucccccagagcgcuccccacggcgugguguuccugcacgucacauacgugcccgcccaggagaagaacuucaccaccgcccccgccaucugccacgacggaaaggcccacuucccccgggagggcguguucgugagcaacggcacccacugguucgugacccagcggaacuucuacgagccucagaucaucaccaccgacaacaccuucgugagcggcaacugcgacguggugaucggcaucgugaacaacaccguguacgacccccugcagcccgagcuggacagcuucaaggaggagcucgacaaguacuucaagaaccacaccagcccagacguggaccugggcgacaucagcggcaucaacgccagcguggugaacauccagaaggagaucgaccggcugaacgagguggccaagaaccugaacgagagccugaucgaccugcaggagcugggcaaguacgagcaguacaucaaguggcccugguacaucuggcugggcuucaucgccggccugaucgccaucgugauggugaccaucaugcugugcugcaugaccagcugcuguagcugccugaagggcugcugcagcugcggcagcugcugcaaguucgacgaggacgacagcgagcccgugcugaagggcgugaagcugcacuacaccugaggacuaguuauaagacugacuagcccgaugggccucccaacgggcccuccuccccuccuugcaccgagauuaauagaucucaaaggcucuuuucagagccaccaaaaaaaaaaaaaaaaaaaaaaaaaaaaaaaaaaaaaaaaaaaaaaaaaaaaaaaaaaaaaaaaaaaaaaaaaaaaaaaaaaaaaaaaaaaaaaaaaaaaa

SEQ ID NO: 24466 - RNA, 4041 nt, Artificial Sequence
  SARS-CoV-2/Wuhan/WIV05/2019__EPI_ISL_402128 spike protein mRNA gc (1-1273)(K986P_V987P_K986P_V987P_E484K_D614G)
aggagaaagcuuaccauguucguguuccuggugcugcugccccuggugagcagccagugcgugaaccugaccacccggacccagcugcccccugccuacaccaacagcuucacccggggcguguacuaccccgacaagguguuccggagcagcgugcugcacagcacccaggaccuguuccugcccuucuucagcaacgugaccugguuccacgccauccacgugagcggcaccaacggcaccaagcgguucgacaacccagugcugcccuucaacgacggcguguacuucgccagcaccgagaagucaaacaucauccggggcuggaucuucggcaccacccuggacagcaagacacagagccugcugaucgugaacaacgccaccaacguggugaucaaggugugcgaguuucaguucugcaacgaccccuuccugggcguguacuaccacaagaacaacaagagcuggauggagagcgaguuccgggucuacagcagcgcuaacaauugcaccuucgaguacgugagccagcccuuccugauggaccucgagggcaagcagggcaacuucaagaaccugcgggaguucguguucaagaacaucgauggcuacuucaagaucuacagcaagcacacccccaucaaccuggugcgggaccugccccagggauucagcgcccuggagccucugguggaccugcccaucggcaucaacaucaccagguuccagacccugcuggcccugcaccggagcuaccugacccccggcgacagcagcagcggcuggaccgccggcgccgccgcauacuacgugggcuaccugcagccacggaccuuccugcugaaguacaacgagaacggcaccaucaccgacgccguggacugcgcccuggacccccugagcgagaccaagugcacccuaaagagcuucaccguggagaagggcaucuaccagaccagcaacuuccgggugcagcccacugagagcaucgugcgguuccccaacauuaccaaccugugucccuucggcgagguguucaacgccacccgguucgccagcguguacgccuggaaccggaagcggaucagcaacugcguggccgacuacagcgugcuguacaacagcgccagcuucagcaccuucaagugcuacggcgugagcccuaccaagcugaacgaccugugcuucaccaacguguacgcugacagcuucgugauccggggcgacgaggugcggcagaucgcccccggccagaccggcaagaucgccgacuacaacuacaagcugcccgacgacuucaccggcugcgugaucgccuggaacagcaacaaccuggacagcaaggugggcggcaacuacaacuaccuguaccggcuguuccguaagagcaaccugaagccauucgagcgggacaucagcaccgagaucuaccaggccggcagcacccccugcaacggugugaagggcuuuaacugcuacuucccccugcagagcuacggcuuccagcccaccaacggcgugggcuaccagcccuaccgggugguggugcugagcuucgagcugcugcacgcccccgccaccgugugcggcccuaaaaagagcaccaaccuggugaagaacaagugcgugaacuucaauuucaacggccugaccggcaccggcgugcugaccgagagcaacaagaaguuccugcccuuccagcaguucggccgggauaucgccgacaccaccgacgcagugcgggacccccagacccuggagauccuggacaucaccccaugcagcuucggcggcgugagcgucaucacccccggcacaaacaccagcaaccagguggccgugcuguaccagggagugaacugcaccgaggugcccguggccauccacgccgaccagcugacccccaccuggcggguguacagcaccggcagcaacguguuccagacccgggccggcugccugaucggcgccgagcacgugaacaacuccuacgagugcgacauccccaucggcgcuggcaucugcgccagcuaccagacccagaccaacagcccccggcgggcccggagcguggccagccagagcaucaucgccuacaccaugagcuuaggcgccgagaacagcguggccuacagcaacaacagcaucgcgaucccuaccaacuucaccaucagcgugaccaccgagauacugcccgugagcaugaccaagaccagcguggacuguaccauguacaucugcggcgacagcaccgagugcagcaaccugcugcugcaguacggcagcuucugcacccagcugaaccgggcccugaccggcaucgccguggagcaggacaagaacacccaagagguguucgcccaggugaagcagaucuacaagacucccccaaucaaggacuucggcggcuucaacuucagccagauccugcccgaccccagcaagcccagcaagcggagcuucaucgaggaccugcuguucaacaaggugacccuggccgacgccggcuucaucaagcaguacggcgacugccugggggauaucgccgcucgggaccugaucugcgcccagaaguucaacggccugaccgugcugcccccucugcugaccgacgagaugaucgcccaguacaccagcgcccugcuugccggcaccaucaccagcggcuggaccuucggcgccggcgcagcccugcagauccccuucgccaugcagauggccuaccgguucaacggcaucggcgugacccagaacgugcuguacgagaaccagaagcugaucgccaaccaguucaacagcgccaucggcaagauccaggacagccugagcagcaccgccagcgcccugggcaagcugcaggacguggugaaccagaacgcucaggcccugaacacccuggugaagcagcugagcagcaacuucggcgccaucagcucagugcugaaugacauccugagcaggcuggaucccccagaggccgaggugcagaucgaccggcugaucaccggccggcugcagagccugcagaccuacgugacccagcagcugauccgggccgccgagauccgggccagcgccaaccuggcagccaccaagaugagcgagugcgugcugggccagagcaagcggguggacuuuugcggcaagggcuaccaccugaugagcuucccccagagcgcuccccacggcgugguguuccuccacgugacauacguccccgcccaggagaagaacuucaccaccgcccccgccauuugccacgacggcaaggcccacuucccccgggagggaguguucgugagcaacggcacccacugguucgugacccagcggaacuucuacgagccucagaucaucaccaccgacaacaccuucgugagcggcaacugcgacguggugaucggcaucgugaacaacaccguguacgacccccugcagcccgagcuggacagcuucaaggaggagcuggacaaguacuucaagaaccacaccagcccagacguggaccugggcgacaucagcggcaucaacgccagcguggugaacauccagaaggagaucgaccggcugaacgagguggccaagaaccugaacgagagccugaucgaccugcaggagcugggcaaguacgagcaguacaucaaguggcccugguacaucuggcugggcuucaucgccggccugaucgccaucgugauggugaccaucaugcugugcugcaugaccagcugcuguagcugccugaagggcugcugcagcugcggcagcugcugcaaguucgacgaggacgacagcgagcccgugcugaagggcgugaagcugcacuacaccugaggacuaguuauaagacugacuagcccgaugggccucccaacgggcccuccuccccuccuugcaccgagauuaauagaucucaaaggcucuuuucagagccaccaaaaaaaaaaaaaaaaaaaaaaaaaaaaaaaaaaaaaaaaaaaaaaaaaaaaaaaaaaaaaaaaaaaaaaaaaaaaaaaaaaaaaaaaaaaaaaaaaaaaa

SEQ ID NO: 24467 - RNA, 4041 nt, Artificial Sequence
  SARS-CoV-2/Wuhan/WIV05/2019__EPI_ISL_402128 spike protein mRNA gc (1-1273)(K986P_V987P_K986P_V987P_L18F_T20N_P26S_D138Y_R190S_K417T _E484K_N501Y_D614G_H655Y_T1027I)
aggagaaagcuuaccauguucguguuccuggugcugcugccccuggugagcagccagugcgugaacuucaccaaccggacccagcugcccagcgccuacaccaacagcuucacccggggcguguacuacccugacaagguguuccggagcagcgugcugcacagcacccaggaccuguuccugcccuucuucagcaacgugaccugguuccacgccauccacgugagcggcaccaacggcaccaagcgguucgacaaccccgugcugccauucaacgacggcguguacuucgccagcaccgagaagucaaacaucauccggggcuggaucuuuggcaccacccuggacagcaagacccagagccugcugaucgugaacaacgccacaaacguggugaucaaggugugcgaguuccaguucugcaacuaccccuuccugggcguguacuaccacaagaacaacaagagcuggauggagagcgaguuccgggucuacagcagcgcuaauaacugcaccuucgaguacgugagccagcccuuccugauggaccuggagggcaagcagggcaacuucaagaaccucagcgaguucguguucaagaacaucgacggcuacuucaagaucuacagcaagcacacccccaucaaccuggugcgggaucugccccagggauucagcgcccuggagccccugguggaccugccuaucggcaucaacaucacccgguuccagacccugcuggcccugcacaggagcuaccugacccccggcgacagcagcagcggcuggaccgccggcgccgccgcauacuacgugggcuaccugcagccccggaccuuccugcugaaguacaacgagaacggcaccaucaccgacgccguggacugcgcccuggacccacugagcgagaccaagugcacccuaaagagcuucaccguggagaagggcaucuaccagaccagcaacuuccgggugcagcccaccgagagcaucgugcgguuccccaacauuacuaaccugugucccuucggcgagguguucaacgccacccgguucgccagcguguacgccuggaaccggaagcggaucagcaacugcguggccgacuacagcgugcuguacaacagcgccagcuucagcaccuucaagugcuacggcgugagccccaccaagcugaacgaccugugcuucaccaacguguacgcugacagcuucgugauccggggcgacgaggugcggcagaucgccccuggccagaccggcaccaucgccgacuacaacuacaagcugcccgacgacuucaccggcugcgugaucgccuggaacagcaacaaccuggacagcaaggugggcggcaacuacaacuaccuguaccggcuguuccguaagagcaaccugaagcccuuugagcgggacaucagcaccgagaucuaccaggccggcagcaccccaugcaacggugugaagggcuucaacugcuacuucccccugcagagcuacggcuuccagcccaccuacggcgugggcuaccagcccuaccgggugguggugcugagcuucgagcugcugcacgcccccgccaccgugugcggccccaaaaagagcaccaaccuggugaagaacaagugcgugaacuucaauuucaacggccugaccggcaccggcgugcugaccgagagcaacaagaaguuccugccuuuccagcaguucggccgggacaucgccgauaccaccgacgcagugcgggacccccagacccuggagauccuggacaucacccccugcagcuucggcggcgugagcgucaucaccccaggcacaaacaccagcaaccagguggccgugcuguaccagggagugaacugcaccgaggugcccguggccauccacgccgaccagcugacccccaccuggcggguguacuccaccggcagcaacguguuccagacccgggccggcugccugaucggcgccgaguacgugaacaacagcuacgagugcgacauccccaucggcgcuggcaucugcgccagcuaccagacccagaccaacagcccccggcgggcccggagcguggccagccagagcaucaucgccuacaccaugagccugggcgccgagaacagcguggccuacagcaacaacagcaucgcgauccccaccaacuucaccaucagcgugaccaccgagauauuaccugugagcaugaccaagaccagcguggacuguaccauguacaucugcggcgacagcaccgagugcagcaaccugcugcugcaguacggcagcuucugcacccagcugaaccgggcccugaccggcaucgccguggagcaggacaagaacacccaagagguguucgcccaggugaagcagaucuacaagacuccacccaucaaggacuucggcggcuucaacuucagccagauccugcccgaccccagcaagcccagcaagcggagcuucaucgaggaccugcuguucaacaaggugacccuggccgacgccggcuucaucaagcaguacggcgacugccugggggacaucgccgcucgggaucugaucugcgcccagaaguucaacggccugaccgugcugccuccccugcugaccgacgagaugaucgcccaguacaccagcgcccugcuggccggcaccaucaccagcggcuggaccuucggcgccggcgcagcccuucagauccccuucgccaugcagauggccuaccgguucaacggcaucggcgugacccagaacgugcuguacgagaaccagaagcugaucgccaaccaguucaacagcgccaucggcaagauccaggacagccugagcagcaccgccagcgcccugggcaagcugcaggacguggugaaccagaacgcucaggcccugaacacccuggugaagcagcugagcucaaacuuuggcgccaucagcagcgugcugaaugacauccugagccggcuggacccacccgaggccgaggugcagaucgacaggcugaucaccggccggcugcagagccugcagaccuacgugacccagcagcugauccgggccgccgagauccgggccagcgccaaccuggcagccauuaagaugagcgagugcgugcugggccagagcaagcggguggacuucugcggcaagggcuaccaccugaugagcuucccccagagcgcuccccacggcgugguguuccugcacgugaccuacguccccgcccaggagaagaacuucacaaccgcccccgccaucugccacgacggcaaggcccacuucccccgggagggaguguucgugagcaacggcacccacugguucgugacccagcggaacuucuacgagccccagaucaucaccaccgacaacaccuucgugagcggcaacugcgacguggugaucggcaucgugaacaacaccguguacgacccucuccagcccgagcuggacagcuucaaggaggagcuggacaaguacuucaagaaccacaccagccccgacguggaccugggcgauaucagcggcaucaacgccagcguggugaacauccagaaggagaucgaccggcugaacgagguggccaagaaccugaacgagagccugaucgaccugcaggagcugggcaaguacgagcaguacaucaaguggccaugguacaucuggcugggcuucaucgccggccugaucgccaucgugauggugaccaucaugcugugcugcaugaccagcugcuguagcugccugaagggcugcugcagcugcggcagcugcugcaaguucgacgaggacgacagcgagcccgugcugaagggcgugaagcugcacuacaccugaggacuaguuauaagacugacuagcccgaugggccucccaacgggcccuccuccccuccuugcaccgagauuaauagaucucaaaggcucuuuucagagccaccaaaaaaaaaaaaaaaaaaaaaaaaaaaaaaaaaaaaaaaaaaaaaaaaaaaaaaaaaaaaaaaaaaaaaaaaaaaaaaaaaaaaaaaaaaaaaaaaaaaaa

SEQ ID NO: 24468 - RNA, 4041 nt, Artificial Sequence
  SARS-CoV-2/Wuhan/WIV05/2019__EPI_ISL_402128 spike protein mRNA gc (1-1273)(K986P_V987P_K986P_V987P_S13I_W152C_L452R_D614G)
aggagaaagcuuaccauguucguguuccuggugcugcugccccuggugagcauccagugcgugaaccugaccacccggacccagcugcccccugccuacaccaacagcuucacccggggcguguacuaccccgacaagguguuccggagcagcgugcugcacagcacccaggaccuguuccugcccuucuucagcaacgugaccugguuccacgccauccacgugagcggcaccaacggcaccaagcgguucgacaacccagugcugcccuucaacgacggcguguacuucgccagcaccgagaagucaaacaucauccggggcuggaucuucggcaccacccuggacagcaagacacagagccugcugaucgugaacaacgccaccaacguggugaucaaggugugcgaguuucaguucugcaacgaccccuuccugggcguguacuaccacaagaacaacaagagcugcauggagagcgaguuccgggucuacagcagcgcuaacaauugcaccuucgaguacgugagccagcccuuccugauggaccucgagggcaagcagggcaacuucaagaaccugcgggaguucguguucaagaacaucgauggcuacuucaagaucuacagcaagcacacccccaucaaccuggugcgggaccugccccagggauucagcgcccuggagccucugguggaccugcccaucggcaucaacaucaccagguuccagacccugcuggcccugcaccggagcuaccugacccccggcgacagcagcagcggcuggaccgccggcgccgccgcauacuacgugggcuaccugcagccacggaccuuccugcugaaguacaacgagaacggcaccaucaccgacgccguggacugcgcccuggacccccugagcgagaccaaguguacccuaaagagcuucaccguggagaagggcaucuaccagaccagcaacuuccgggugcagcccacugagagcauugugcgguuccccaacaucaccaaccugugccccuucggcgagguguucaacgccacccgguucgccagcguguacgccuggaaccggaagcggaucagcaacugcguggccgacuacagcgugcuguacaacagcgccagcuucagcaccuucaagugcuacggcgugagcccuaccaagcugaacgaccugugcuucaccaacguguacgcugacagcuucgugauccggggcgacgaggugcggcagaucgcccccggccagaccggcaagaucgccgacuacaacuacaagcugcccgacgacuucaccggcugcgugaucgccuggaacagcaacaaccuggacagcaaggugggcggcaacuacaacuaccgguaccggcuguuccguaagagcaaccugaagccauucgagcgggacaucagcaccgagaucuaccaggccggcagcacccccugcaacgguguggagggcuuuaacugcuacuucccccugcagagcuacggcuuccagcccaccaacggcgugggcuaccagcccuaccgggugguggugcugagcuucgagcugcugcacgcccccgccaccgugugcggcccuaaaaagagcaccaaccuggugaagaacaagugcgugaacuucaauuucaacggccugaccggcaccggcgugcugaccgagagcaacaagaaguuccugcccuuccagcaguucggccgggauaucgccgacaccaccgacgcagugcgggacccccagacccuggagauccuggacaucaccccaugcagcuucggcggcgugagcgucaucacccccggcacaaacaccagcaaccagguggccgugcuguaccagggagugaacugcaccgaggugcccguggccauccacgccgaccagcugacccccaccuggcggguguacagcaccggcagcaacguguuccagacccgggccggcugccugaucggcgccgagcacgugaacaacagcuacgagugcgacauccccaucggcgcuggcaucugugccuccuaccagacccagaccaacagcccccggcgggcccggagcguggccagccagagcaucaucgccuacaccaugagccugggcgccgagaacagcguggccuacagcaacaacagcaucgcgaucccuaccaacuucaccauaagcgugaccaccgagaucuuacccgugagcaugaccaagaccagcguggacugcaccauguacaucugcggcgacagcaccgagugcagcaaccugcugcugcaguacggcagcuucugcacccagcugaaccgggcccugaccggcaucgccguggagcaggacaagaacacccaagagguguucgcccaggugaagcagaucuacaagacucccccaaucaaggacuucggcggcuucaacuucagccagauccugcccgaccccagcaagcccagcaagcggagcuucaucgaggaccugcuguucaacaaggugacccuggccgacgccggcuucaucaagcaguacggcgacugccugggggauaucgccgcucgggaccugaucugcgcccagaaguucaacggccugaccgugcugcccccucugcugaccgacgagaugaucgcccaguacaccagcgcccugcuggccggcaccaucaccagcggcuggaccuucggcgccggcgcagcccuucagauccccuucgccaugcagauggccuacagguucaacggcaucggcgugacccagaacgugcuguacgagaaccagaagcugaucgccaaccaguucaacagcgccaucggcaagauccaggacagccugagcagcaccgccagcgcccugggcaagcugcaggacguggugaaccagaacgcucaggcccugaacacccuggugaagcagcugagcagcaacuucggcgccaucagcagcgugcugaaugacauccugucacggcuggaucccccagaggccgaggugcagaucgaccggcugaucaccggccggcugcagagccugcagaccuacgugacccagcagcugauccgggccgccgagauucgggccagcgccaaccuggcagccaccaagaugagcgagugcgugcugggccagagcaagcggguggacuuuugcggcaagggcuaccaccugaugagcuucccccagagcgcuccccacggcgugguguuccugcacgugacauacguccccgcccaggagaagaacuucaccaccgcccccgccaucugccacgacggcaaggcccacuucccccgggagggaguguucgugagcaacggcacccacugguucgugacccagcggaacuucuacgagccucagaucaucaccaccgacaacaccuucgugagcggcaacugcgacguggugaucggcaucgugaacaacaccguguacgacccccuccagcccgagcuggacagcuucaaggaggagcuggacaaguacuucaagaaccacaccagcccagacguggaccugggcgacaucagcggcaucaacgccagcguggugaacauccagaaggagaucgaccggcugaacgagguggccaagaaccugaacgagagccugaucgaccugcaggagcugggcaaguacgagcaguacaucaaguggcccugguacaucuggcugggcuucaucgccggccugaucgccaucgugauggugaccaucaugcugugcugcaugaccagcuguugcagcugccugaagggcugcugcagcugcggcagcugcugcaaguucgacgaggacgacagcgagcccgugcugaagggcgugaagcugcacuacaccugaggacuaguuauaagacugacuagcccgaugggccucccaacgggcccuccuccccuccuugcaccgagauuaauagaucucaaaggcucuuuucagagccaccaaaaaaaaaaaaaaaaaaaaaaaaaaaaaaaaaaaaaaaaaaaaaaaaaaaaaaaaaaaaaaaaaaaaaaaaaaaaaaaaaaaaaaaaaaaaaaaaaaaaa

SEQ ID NO: 24469 - RNA, 4041 nt, Artificial Sequence
  SARS-CoV-2/Wuhan/WIV05/2019__EPI_ISL_402128 spike protein mRNA gc mod (1-1273)(K986P_V987P)
aggagaaagcuuaccauguucguguuucuggugcugcugccccugguguccagccagugugugaaccugaccaccagaacacagcugccuccagccuacaccaacagcuucaccagaggcguguacuaccccgacaagguguucagauccagcgugcugcacucuacccaggaccuguuccugccuuucuucagcaacgugaccugguuccacgccauccacguguccggcaccaauggcaccaagagauucgacaaccccgugcugcccuucaacgacgggguguacuuugccagcaccgagaaguccaacaucaucagaggcuggaucuucggcaccacacuggacagcaagacccagagccugcugaucgugaacaacgccaccaacguggucaucaaagugugcgaguuccaguucugcaacgaccccuuccugggcgucuacuaccacaagaacaacaagagcuggauggaaagcgaguuccggguguacagcagcgccaacaacugcaccuucgaguacgugucccagccuuuccugauggaccuggaaggcaagcagggcaacuucaagaaccugcgcgaguucguguucaagaacaucgacggcuacuucaaaaucuacagcaagcacaccccuaucaaccucgugcgggaucugccucagggcuucucugcucuggaaccccugguggaucugcccaucggcaucaacaucacccgguuucagacacugcuggcccugcacagaagcuaccugacaccuggcgauagcagcagcggauggacagcuggugccgccgcuuacuaugugggcuaccugcagccuagaaccuuccugcugaaguacaacgagaacggcaccaucaccgacgccguggauugugcucuggauccucugagcgagacaaagugcacccugaaguccuucaccguggaaaagggcaucuaccagaccagcaacuuccgggugcagcccaccgaauccaucgugcgguuccccaauaucaccaaucugugccccuucggcgagguguucaaugccaccagauucgccucuguguacgccuggaaccggaagcggaucagcaauugcguggccgacuacuccgugcuguacaacuccgccagcuucagcaccuucaagugcuacggcguguccccuaccaagcugaacgaccugugcuucacaaacguguacgccgacagcuucgugauccggggagaugaagugcggcagauugccccuggacagacaggcaagaucgccgacuacaacuacaagcugcccgacgacuucaccggcugugugauugccuggaacagcaacaaccuggacuccaaagucggcggcaacuacaauuaccuguaccggcuguuccggaaguccaaucugaagcccuucgagcgggacaucagcaccgaaaucuaucaggccggcagcaccccuugcaacggcguggaaggcuucaacugcuacuucccacugcaguccuacggcuuucagcccacaaauggcgugggcuaucagcccuacagagugguggugcugagcuucgaacugcugcaugcuccugccacagugugcggcccuaagaaaagcaccaaucucgugaagaacaaaugcgugaacuucaacuucaacggccugaccggcaccggcgugcugacagagagcaacaagaaguuccugccauuccagcaguuuggccgggauaucgccgauaccacagacgccguuagagauccccagacacuggaaauccuggacaucaccccaugcagcuucggcggagugucugugaucaccccuggcaccaacaccagcaaucagguggcagugcuguaccaggacgugaacuguaccgaagugcccguggccauucacgccgaucagcugacaccuacauggcggguguacuccaccggcagcaauguguuucagaccagagccggcugucugaucggagccgagcacgugaacaauagcuacgagugcgacauccccaucggcgcuggcaucugugccagcuaccagacacagacaaacagccccagacgggcuagaagcguggccagccagagcaucauugccuacacaaugucucugggcgccgagaacagcguggccuacuccaacaacucuaucgcuauccccaccaacuucaccaucagcgugaccaccgagauccugccuguguccaugaccaagaccagcguggacugcaccauguacaucugcggcgauuccaccgagugcuccaaccugcugcugcaguacggcagcuucugcacccagcugaauagagcccugacagggaucgccguggaacaggacaagaacacccaagagguguucgcccaagugaagcaaaucuacaagaccccuccuaucaaggacuucggcggcuucaauuucagccagauucugcccgauccuagcaagcccagcaagcggagcuucaucgaggaccugcuguucaacaaagugacacuggccgacgccggcuucaucaagcaguauggcgauugucugggcgacauugccgccagggaucugauuugcgcccagaaguuuaacggacugacagugcugccuccucugcugaccgaugagaugaucgcccaguacacaucugcccugcuggccggcacaaucacaagcggcuggacauuuggagcuggcgccgcucugcagauccccuuugcuaugcagauggccuaccgguucaacggcaucggagugacccagaaugugcuguacgagaaccagaagcugaucgccaaccaguucaacagcgccaucggcaagauccaggacagccugagcagcacagcaagcgcccugggaaagcugcaggacguggucaaccagaaugcccaggcacugaacacccuggucaagcagcuguccuccaacuucggcgccaucagcucugugcugaacgauauccugagcagacuggacccuccugaggccgaggugcagaucgacagacugaucacaggcagacugcagagccuccagacauacgugacccagcagcugaucagagccgccgagauuagagccucugccaaucuggccgccaccaagaugucugagugugugcugggccagagcaagagaguggacuuuugcggcaagggcuaccaccugaugagcuucccucagucugccccucacggcgugguguuucugcacgugacauaugugcccgcucaagagaagaauuucaccaccgcuccagccaucugccacgacggcaaagcccacuuuccuagagaaggcguguucguguccaacggcacccauugguucgugacacagcggaacuucuacgagccccagaucaucaccaccgacaacaccuucgugucuggcaacugcgacguugugaucggcauugugaacaauaccguguacgacccucugcagcccgagcuggacagcuucaaagaggaacuggacaaguacuuuaagaaccacacaagccccgacguggaccugggcgauaucagcggaaucaaugccagcgucgugaacauccagaaagagaucgaccggcugaacgagguggccaagaaucugaacgagagccugaucgaccugcaagaacuggggaaguacgagcaguacaucaaguggcccugguacaucuggcugggcuuuaucgccggacugauugccaucgugauggucacaaucaugcuguguugcaugaccagcugcuguagcugccugaagggcuguuguagcuguggcagcugcugcaaguucgacgaggacgauucugagcccgugcugaagggcgugaaacugcacuacaccugaggacuaguuauaagacugacuagcccgaugggccucccaacgggcccuccuccccuccuugcaccgagauuaauagaucucaaaggcucuuuucagagccaccaaaaaaaaaaaaaaaaaaaaaaaaaaaaaaaaaaaaaaaaaaaaaaaaaaaaaaaaaaaaaaaaaaaaaaaaaaaaaaaaaaaaaaaaaaaaaaaaaaaaa

SEQ ID NO: 24470 - RNA, 4041 nt, Artificial Sequence
  SARS-CoV-2/Wuhan/WIV05/2019__EPI_ISL_402128 spike protein mRNA gc mod (1-1273)(K986P_V987P_ D614G)
aggagaaagcuuaccauguucguguuucuggugcugcugccccugguguccagccagugugugaaccugaccaccagaacacagcugccuccagccuacaccaacagcuucaccagaggcguguacuaccccgacaagguguucagauccagcgugcugcacucuacccaggaccuguuccugccuuucuucagcaacgugaccugguuccacgccauccacguguccggcaccaauggcaccaagagauucgacaaccccgugcugcccuucaacgacgggguguacuuugccagcaccgagaaguccaacaucaucagaggcuggaucuucggcaccacacuggacagcaagacccagagccugcugaucgugaacaacgccaccaacguggucaucaaagugugcgaguuccaguucugcaacgaccccuuccugggcgucuacuaccacaagaacaacaagagcuggauggaaagcgaguuccggguguacagcagcgccaacaacugcaccuucgaguacgugucccagccuuuccugauggaccuggaaggcaagcagggcaacuucaagaaccugcgcgaguucguguucaagaacaucgacggcuacuucaaaaucuacagcaagcacaccccuaucaaccucgugcgggaucugccucagggcuucucugcucuggaaccccugguggaucugcccaucggcaucaacaucacccgguuucagacacugcuggcccugcacagaagcuaccugacaccuggcgauagcagcagcggauggacagcuggugccgccgcuuacuaugugggcuaccugcagccuagaaccuuccugcugaaguacaacgagaacggcaccaucaccgacgccguggauugugcucuggauccucugagcgagacaaagugcacccugaaguccuucaccguggaaaagggcaucuaccagaccagcaacuuccgggugcagcccaccgaauccaucgugcgguuccccaauaucaccaaucugugccccuucggcgagguguucaaugccaccagauucgccucuguguacgccuggaaccggaagcggaucagcaauugcguggccgacuacuccgugcuguacaacuccgccagcuucagcaccuucaagugcuacggcguguccccuaccaagcugaacgaccugugcuucacaaacguguacgccgacagcuucgugauccggggagaugaagugcggcagauugccccuggacagacaggcaagaucgccgacuacaacuacaagcugcccgacgacuucaccggcugugugauugccuggaacagcaacaaccuggacuccaaagucggcggcaacuacaauuaccuguaccggcuguuccggaaguccaaucugaagcccuucgagcgggacaucagcaccgaaaucuaucaggccggcagcaccccuugcaacggcguggaaggcuucaacugcuacuucccacugcaguccuacggcuuucagcccacaaauggcgugggcuaucagcccuacagagugguggugcugagcuucgaacugcugcaugcuccugccacagugugcggcccuaagaaaagcaccaaucucgugaagaacaaaugcgugaacuucaacuucaacggccugaccggcaccggcgugcugacagagagcaacaagaaguuccugccauuccagcaguuuggccgggauaucgccgauaccacagacgccguuagagauccccagacacuggaaauccuggacaucaccccaugcagcuucggcggagugucugugaucaccccuggcaccaacaccagcaaucagguggcagugcuguaccagggcgugaacuguaccgaagugcccguggccauucacgccgaucagcugacaccuacauggcggguguacuccaccggcagcaauguguuucagaccagagccggcugucugaucggagccgagcacgugaacaauagcuacgagugcgacauccccaucggcgcuggcaucugugccagcuaccagacacagacaaacagccccagacgggcuagaagcguggccagccagagcaucauugccuacacaaugucucugggcgccgagaacagcguggccuacuccaacaacucuaucgcuauccccaccaacuucaccaucagcgugaccaccgagauccugccuguguccaugaccaagaccagcguggacugcaccauguacaucugcggcgauuccaccgagugcuccaaccugcugcugcaguacggcagcuucugcacccagcugaauagagcccugacagggaucgccguggaacaggacaagaacacccaagagguguucgcccaagugaagcaaaucuacaagaccccuccuaucaaggacuucggcggcuucaauuucagccagauucugcccgauccuagcaagcccagcaagcggagcuucaucgaggaccugcuguucaacaaagugacacuggccgacgccggcuucaucaagcaguauggcgauugucugggcgacauugccgccagggaucugauuugcgcccagaaguuuaacggacugacagugcugccuccucugcugaccgaugagaugaucgcccaguacacaucugcccugcuggccggcacaaucacaagcggcuggacauuuggagcuggcgccgcucugcagauccccuuugcuaugcagauggccuaccgguucaacggcaucggagugacccagaaugugcuguacgagaaccagaagcugaucgccaaccaguucaacagcgccaucggcaagauccaggacagccugagcagcacagcaagcgcccugggaaagcugcaggacguggucaaccagaaugcccaggcacugaacacccuggucaagcagcuguccuccaacuucggcgccaucagcucugugcugaacgauauccugagcagacuggacccuccugaggccgaggugcagaucgacagacugaucacaggcagacugcagagccuccagacauacgugacccagcagcugaucagagccgccgagauuagagccucugccaaucuggccgccaccaagaugucugagugugugcugggccagagcaagagaguggacuuuugcggcaagggcuaccaccugaugagcuucccucagucugccccucacggcgugguguuucugcacgugacauaugugcccgcucaagagaagaauuucaccaccgcuccagccaucugccacgacggcaaagcccacuuuccuagagaaggcguguucguguccaacggcacccauugguucgugacacagcggaacuucuacgagccccagaucaucaccaccgacaacaccuucgugucuggcaacugcgacguugugaucggcauugugaacaauaccguguacgacccucugcagcccgagcuggacagcuucaaagaggaacuggacaaguacuuuaagaaccacacaagccccgacguggaccugggcgauaucagcggaaucaaugccagcgucgugaacauccagaaagagaucgaccggcugaacgagguggccaagaaucugaacgagagccugaucgaccugcaagaacuggggaaguacgagcaguacaucaaguggcccugguacaucuggcugggcuuuaucgccggacugauugccaucgugauggucacaaucaugcuguguugcaugaccagcugcuguagcugccugaagggcuguuguagcuguggcagcugcugcaaguucgacgaggacgauucugagcccgugcugaagggcgugaaacugcacuacaccugaggacuaguuauaagacugacuagcccgaugggccucccaacgggcccuccuccccuccuugcaccgagauuaauagaucucaaaggcucuuuucagagccaccaaaaaaaaaaaaaaaaaaaaaaaaaaaaaaaaaaaaaaaaaaaaaaaaaaaaaaaaaaaaaaaaaaaaaaaaaaaaaaaaaaaaaaaaaaaaaaaaaaaaa

SEQ ID NO: 24471 - RNA, 4041 nt, Artificial Sequence
  SARS-CoV-2/Wuhan/WIV05/2019__EPI_ISL_402128 spike protein mRNA gc mod (1-1273)(K986P_V987P_A222V_D614G)
aggagaaagcuuaccauguucguguuucuggugcugcugccccugguguccagccagugugugaaccugaccaccagaacacagcugccuccagccuacaccaacagcuucaccagaggcguguacuaccccgacaagguguucagauccagcgugcugcacucuacccaggaccuguuccugccuuucuucagcaacgugaccugguuccacgccauccacguguccggcaccaauggcaccaagagauucgacaaccccgugcugcccuucaacgacgggguguacuuugccagcaccgagaaguccaacaucaucagaggcuggaucuucggcaccacacuggacagcaagacccagagccugcugaucgugaacaacgccaccaacguggucaucaaagugugcgaguuccaguucugcaacgaccccuuccugggcgucuacuaccacaagaacaacaagagcuggauggaaagcgaguuccggguguacagcagcgccaacaacugcaccuucgaguacgugucccagccuuuccugauggaccuggaaggcaagcagggcaacuucaagaaccugcgcgaguucguguucaagaacaucgacggcuacuucaaaaucuacagcaagcacaccccuaucaaccucgugcgggaucugccucagggcuucucugugcuggaaccccugguggaucugcccaucggcaucaacaucacccgguuucagacacugcuggcccugcacagaagcuaccugacaccuggcgauagcagcagcggauggacagcuggugccgccgcuuacuaugugggcuaccugcagccuagaaccuuccugcugaaguacaacgagaacggcaccaucaccgacgccguggauugugcucuggauccucugagcgagacaaagugcacccugaaguccuucaccguggaaaagggcaucuaccagaccagcaacuuccgggugcagcccaccgaauccaucgugcgguuccccaauaucaccaaucugugccccuucggcgagguguucaaugccaccagauucgccucuguguacgccuggaaccggaagcggaucagcaauugcguggccgacuacuccgugcuguacaacuccgccagcuucagcaccuucaagugcuacggcguguccccuaccaagcugaacgaccugugcuucacaaacguguacgccgacagcuucgugauccggggagaugaagugcggcagauugccccuggacagacaggcaagaucgccgacuacaacuacaagcugcccgacgacuucaccggcugugugauugccuggaacagcaacaaccuggacuccaaagucggcggcaacuacaauuaccuguaccggcuguuccggaaguccaaucugaagcccuucgagcgggacaucagcaccgaaaucuaucaggccggcagcaccccuugcaacggcguggaaggcuucaacugcuacuucccacugcaguccuacggcuuucagcccacaaauggcgugggcuaucagcccuacagagugguggugcugagcuucgaacugcugcaugcuccugccacagugugcggcccuaagaaaagcaccaaucucgugaagaacaaaugcgugaacuucaacuucaacggccugaccggcaccggcgugcugacagagagcaacaagaaguuccugccauuccagcaguuuggccgggauaucgccgauaccacagacgccguuagagauccccagacacuggaaauccuggacaucaccccaugcagcuucggcggagugucugugaucaccccuggcaccaacaccagcaaucagguggcagugcuguaccagggcgugaacuguaccgaagugcccguggccauucacgccgaucagcugacaccuacauggcggguguacuccaccggcagcaauguguuucagaccagagccggcugucugaucggagccgagcacgugaacaauagcuacgagugcgacauccccaucggcgcuggcaucugugccagcuaccagacacagacaaacagccccagacgggcuagaagcguggccagccagagcaucauugccuacacaaugucucugggcgccgagaacagcguggccuacuccaacaacucuaucgcuauccccaccaacuucaccaucagcgugaccaccgagauccugccuguguccaugaccaagaccagcguggacugcaccauguacaucugcggcgauuccaccgagugcuccaaccugcugcugcaguacggcagcuucugcacccagcugaauagagcccugacagggaucgccguggaacaggacaagaacacccaagagguguucgcccaagugaagcaaaucuacaagaccccuccuaucaaggacuucggcggcuucaauuucagccagauucugcccgauccuagcaagcccagcaagcggagcuucaucgaggaccugcuguucaacaaagugacacuggccgacgccggcuucaucaagcaguauggcgauugucugggcgacauugccgccagggaucugauuugcgcccagaaguuuaacggacugacagugcugccuccucugcugaccgaugagaugaucgcccaguacacaucugcccugcuggccggcacaaucacaagcggcuggacauuuggagcuggcgccgcucugcagauccccuuugcuaugcagauggccuaccgguucaacggcaucggagugacccagaaugugcuguacgagaaccagaagcugaucgccaaccaguucaacagcgccaucggcaagauccaggacagccugagcagcacagcaagcgcccugggaaagcugcaggacguggucaaccagaaugcccaggcacugaacacccuggucaagcagcuguccuccaacuucggcgccaucagcucugugcugaacgauauccugagcagacuggacccuccugaggccgaggugcagaucgacagacugaucacaggcagacugcagagccuccagacauacgugacccagcagcugaucagagccgccgagauuagagccucugccaaucuggccgccaccaagaugucugagugugugcugggccagagcaagagaguggacuuuugcggcaagggcuaccaccugaugagcuucccucagucugccccucacggcgugguguuucugcacgugacauaugugcccgcucaagagaagaauuucaccaccgcuccagccaucugccacgacggcaaagcccacuuuccuagagaaggcguguucguguccaacggcacccauugguucgugacacagcggaacuucuacgagccccagaucaucaccaccgacaacaccuucgugucuggcaacugcgacguugugaucggcauugugaacaauaccguguacgacccucugcagcccgagcuggacagcuucaaagaggaacuggacaaguacuuuaagaaccacacaagccccgacguggaccugggcgauaucagcggaaucaaugccagcgucgugaacauccagaaagagaucgaccggcugaacgagguggccaagaaucugaacgagagccugaucgaccugcaagaacuggggaaguacgagcaguacaucaaguggcccugguacaucuggcugggcuuuaucgccggacugauugccaucgugauggucacaaucaugcuguguugcaugaccagcugcuguagcugccugaagggcuguuguagcuguggcagcugcugcaaguucgacgaggacgauucugagcccgugcugaagggcgugaaacugcacuacaccugaggacuaguuauaagacugacuagcccgaugggccucccaacgggcccuccuccccuccuugcaccgagauuaauagaucucaaaggcucuuuucagagccaccaaaaaaaaaaaaaaaaaaaaaaaaaaaaaaaaaaaaaaaaaaaaaaaaaaaaaaaaaaaaaaaaaaaaaaaaaaaaaaaaaaaaaaaaaaaaaaaaaaaaa

SEQ ID NO: 24472 - RNA, 4041 nt, Artificial Sequence
  SARS-CoV-2/Wuhan/WIV05/2019__EPI_ISL_402128 spike protein mRNA gc mod (1-1273)(K986P_V987P_N439K_D614G)
aggagaaagcuuaccauguucguguuucuggugcugcugccccugguguccagccagugugugaaccugaccaccagaacacagcugccuccagccuacaccaacagcuucaccagaggcguguacuaccccgacaagguguucagauccagcgugcugcacucuacccaggaccuguuccugccuuucuucagcaacgugaccugguuccacgccauccacguguccggcaccaauggcaccaagagauucgacaaccccgugcugcccuucaacgacgggguguacuuugccagcaccgagaaguccaacaucaucagaggcuggaucuucggcaccacacuggacagcaagacccagagccugcugaucgugaacaacgccaccaacguggucaucaaagugugcgaguuccaguucugcaacgaccccuuccugggcgucuacuaccacaagaacaacaagagcuggauggaaagcgaguuccggguguacagcagcgccaacaacugcaccuucgaguacgugucccagccuuuccugauggaccuggaaggcaagcagggcaacuucaagaaccugcgcgaguucguguucaagaacaucgacggcuacuucaaaaucuacagcaagcacaccccuaucaaccucgugcgggaucugccucagggcuucucugcucuggaaccccugguggaucugcccaucggcaucaacaucacccgguuucagacacugcuggcccugcacagaagcuaccugacaccuggcgauagcagcagcggauggacagcuggugccgccgcuuacuaugugggcuaccugcagccuagaaccuuccugcugaaguacaacgagaacggcaccaucaccgacgccguggauugugcucuggauccucugagcgagacaaagugcacccugaaguccuucaccguggaaaagggcaucuaccagaccagcaacuuccgggugcagcccaccgaauccaucgugcgguuccccaauaucaccaaucugugccccuucggcgagguguucaaugccaccagauucgccucuguguacgccuggaaccggaagcggaucagcaauugcguggccgacuacuccgugcuguacaacuccgccagcuucagcaccuucaagugcuacggcguguccccuaccaagcugaacgaccugugcuucacaaacguguacgccgacagcuucgugauccggggagaugaagugcggcagauugccccuggacagacaggcaagaucgccgacuacaacuacaagcugcccgacgacuucaccggcugugugauugccuggaacagcaagaaccuggacuccaaagucggcggcaacuacaauuaccuguaccggcuguuccggaaguccaaucugaagcccuucgagcgggacaucagcaccgaaaucuaucaggccggcagcaccccuugcaacggcguggaaggcuucaacugcuacuucccacugcaguccuacggcuuucagcccacaaauggcgugggcuaucagcccuacagagugguggugcugagcuucgaacugcugcaugcuccugccacagugugcggcccuaagaaaagcaccaaucucgugaagaacaaaugcgugaacuucaacuucaacggccugaccggcaccggcgugcugacagagagcaacaagaaguuccugccauuccagcaguuuggccgggauaucgccgauaccacagacgccguuagagauccccagacacuggaaauccuggacaucaccccaugcagcuucggcggagugucugugaucaccccuggcaccaacaccagcaaucagguggcagugcuguaccagggcgugaacuguaccgaagugcccguggccauucacgccgaucagcugacaccuacauggcggguguacuccaccggcagcaauguguuucagaccagagccggcugucugaucggagccgagcacgugaacaauagcuacgagugcgacauccccaucggcgcuggcaucugugccagcuaccagacacagacaaacagccccagacgggcuagaagcguggccagccagagcaucauugccuacacaaugucucugggcgccgagaacagcguggccuacuccaacaacucuaucgcuauccccaccaacuucaccaucagcgugaccaccgagauccugccuguguccaugaccaagaccagcguggacugcaccauguacaucugcggcgauuccaccgagugcuccaaccugcugcugcaguacggcagcuucugcacccagcugaauagagcccugacagggaucgccguggaacaggacaagaacacccaagagguguucgcccaagugaagcaaaucuacaagaccccuccuaucaaggacuucggcggcuucaauuucagccagauucugcccgauccuagcaagcccagcaagcggagcuucaucgaggaccugcuguucaacaaagugacacuggccgacgccggcuucaucaagcaguauggcgauugucugggcgacauugccgccagggaucugauuugcgcccagaaguuuaacggacugacagugcugccuccucugcugaccgaugagaugaucgcccaguacacaucugcccugcuggccggcacaaucacaagcggcuggacauuuggagcuggcgccgcucugcagauccccuuugcuaugcagauggccuaccgguucaacggcaucggagugacccagaaugugcuguacgagaaccagaagcugaucgccaaccaguucaacagcgccaucggcaagauccaggacagccugagcagcacagcaagcgcccugggaaagcugcaggacguggucaaccagaaugcccaggcacugaacacccuggucaagcagcuguccuccaacuucggcgccaucagcucugugcugaacgauauccugagcagacuggacccuccugaggccgaggugcagaucgacagacugaucacaggcagacugcagagccuccagacauacgugacccagcagcugaucagagccgccgagauuagagccucugccaaucuggccgccaccaagaugucugagugugugcugggccagagcaagagaguggacuuuugcggcaagggcuaccaccugaugagcuucccucagucugccccucacggcgugguguuucugcacgugacauaugugcccgcucaagagaagaauuucaccaccgcuccagccaucugccacgacggcaaagcccacuuuccuagagaaggcguguucguguccaacggcacccauugguucgugacacagcggaacuucuacgagccccagaucaucaccaccgacaacaccuucgugucuggcaacugcgacguugugaucggcauugugaacaauaccguguacgacccucugcagcccgagcuggacagcuucaaagaggaacuggacaaguacuuuaagaaccacacaagccccgacguggaccugggcgauaucagcggaaucaaugccagcgucgugaacauccagaaagagaucgaccggcugaacgagguggccaagaaucugaacgagagccugaucgaccugcaagaacuggggaaguacgagcaguacaucaaguggcccugguacaucuggcugggcuuuaucgccggacugauugccaucgugauggucacaaucaugcuguguugcaugaccagcugcuguagcugccugaagggcuguuguagcuguggcagcugcugcaaguucgacgaggacgauucugagcccgugcugaagggcgugaaacugcacuacaccugaggacuaguuauaagacugacuagcccgaugggccucccaacgggcccuccuccccuccuugcaccgagauuaauagaucucaaaggcucuuuucagagccaccaaaaaaaaaaaaaaaaaaaaaaaaaaaaaaaaaaaaaaaaaaaaaaaaaaaaaaaaaaaaaaaaaaaaaaaaaaaaaaaaaaaaaaaaaaaaaaaaaaaaa

SEQ ID NO: 24473 - RNA, 4041 nt, Artificial Sequence
  SARS-CoV-2/Wuhan/WIV05/2019__EPI_ISL_402128 spike protein mRNA gc mod (1-1273)(K986P_V987P_S477N_D614G)
aggagaaagcuuaccauguucguguuucuggugcugcugccccugguguccagccagugugugaaccugaccaccagaacacagcugccuccagccuacaccaacagcuucaccagaggcguguacuaccccgacaagguguucagauccagcgugcugcacucuacccaggaccuguuccugccuuucuucagcaacgugaccugguuccacgccauccacguguccggcaccaauggcaccaagagauucgacaaccccgugcugcccuucaacgacgggguguacuuugccagcaccgagaaguccaacaucaucagaggcuggaucuucggcaccacacuggacagcaagacccagagccugcugaucgugaacaacgccaccaacguggucaucaaagugugcgaguuccaguucugcaacgaccccuuccugggcgucuacuaccacaagaacaacaagagcuggauggaaagcgaguuccggguguacagcagcgccaacaacugcaccuucgaguacgugucccagccuuuccugauggaccuggaaggcaagcagggcaacuucaagaaccugcgcgaguucguguucaagaacaucgacggcuacuucaaaaucuacagcaagcacaccccuaucaaccucgugcgggaucugccucagggcuucucugcucuggaaccccugguggaucugcccaucggcaucaacaucacccgguuucagacacugcuggcccugcacagaagcuaccugacaccuggcgauagcagcagcggauggacagcuggugccgccgcuuacuaugugggcuaccugcagccuagaaccuuccugcugaaguacaacgagaacggcaccaucaccgacgccguggauugugcucuggauccucugagcgagacaaagugcacccugaaguccuucaccguggaaaagggcaucuaccagaccagcaacuuccgggugcagcccaccgaauccaucgugcgguuccccaauaucaccaaucugugccccuucggcgagguguucaaugccaccagauucgccucuguguacgccuggaaccggaagcggaucagcaauugcguggccgacuacuccgugcuguacaacuccgccagcuucagcaccuucaagugcuacggcguguccccuaccaagcugaacgaccugugcuucacaaacguguacgccgacagcuucgugauccggggagaugaagugcggcagauugccccuggacagacaggcaagaucgccgacuacaacuacaagcugcccgacgacuucaccggcugugugauugccuggaacagcaacaaccuggacuccaaagucggcggcaacuacaauuaccuguaccggcuguuccggaaguccaaucugaagcccuucgagcgggacaucagcaccgaaaucuaucaggccggcaacaccccuugcaacggcguggaaggcuucaacugcuacuucccacugcaguccuacggcuuucagcccacaaauggcgugggcuaucagcccuacagagugguggugcugagcuucgaacugcugcaugcuccugccacagugugcggcccuaagaaaagcaccaaucucgugaagaacaaaugcgugaacuucaacuucaacggccugaccggcaccggcgugcugacagagagcaacaagaaguuccugccauuccagcaguuuggccgggauaucgccgauaccacagacgccguuagagauccccagacacuggaaauccuggacaucaccccaugcagcuucggcggagugucugugaucaccccuggcaccaacaccagcaaucagguggcagugcuguaccagggcgugaacuguaccgaagugcccguggccauucacgccgaucagcugacaccuacauggcggguguacuccaccggcagcaauguguuucagaccagagccggcugucugaucggagccgagcacgugaacaauagcuacgagugcgacauccccaucggcgcuggcaucugugccagcuaccagacacagacaaacagccccagacgggcuagaagcguggccagccagagcaucauugccuacacaaugucucugggcgccgagaacagcguggccuacuccaacaacucuaucgcuauccccaccaacuucaccaucagcgugaccaccgagauccugccuguguccaugaccaagaccagcguggacugcaccauguacaucugcggcgauuccaccgagugcuccaaccugcugcugcaguacggcagcuucugcacccagcugaauagagcccugacagggaucgccguggaacaggacaagaacacccaagagguguucgcccaagugaagcaaaucuacaagaccccuccuaucaaggacuucggcggcuucaauuucagccagauucugcccgauccuagcaagcccagcaagcggagcuucaucgaggaccugcuguucaacaaagugacacuggccgacgccggcuucaucaagcaguauggcgauugucugggcgacauugccgccagggaucugauuugcgcccagaaguuuaacggacugacagugcugccuccucugcugaccgaugagaugaucgcccaguacacaucugcccugcuggccggcacaaucacaagcggcuggacauuuggagcuggcgccgcucugcagauccccuuugcuaugcagauggccuaccgguucaacggcaucggagugacccagaaugugcuguacgagaaccagaagcugaucgccaaccaguucaacagcgccaucggcaagauccaggacagccugagcagcacagcaagcgcccugggaaagcugcaggacguggucaaccagaaugcccaggcacugaacacccuggucaagcagcuguccuccaacuucggcgccaucagcucugugcugaacgauauccugagcagacuggacccuccugaggccgaggugcagaucgacagacugaucacaggcagacugcagagccuccagacauacgugacccagcagcugaucagagccgccgagauuagagccucugccaaucuggccgccaccaagaugucugagugugugcugggccagagcaagagaguggacuuuugcggcaagggcuaccaccugaugagcuucccucagucugccccucacggcgugguguuucugcacgugacauaugugcccgcucaagagaagaauuucaccaccgcuccagccaucugccacgacggcaaagcccacuuuccuagagaaggcguguucguguccaacggcacccauugguucgugacacagcggaacuucuacgagccccagaucaucaccaccgacaacaccuucgugucuggcaacugcgacguugugaucggcauugugaacaauaccguguacgacccucugcagcccgagcuggacagcuucaaagaggaacuggacaaguacuuuaagaaccacacaagccccgacguggaccugggcgauaucagcggaaucaaugccagcgucgugaacauccagaaagagaucgaccggcugaacgagguggccaagaaucugaacgagagccugaucgaccugcaagaacuggggaaguacgagcaguacaucaaguggcccugguacaucuggcugggcuuuaucgccggacugauugccaucgugauggucacaaucaugcuguguugcaugaccagcugcuguagcugccugaagggcuguuguagcuguggcagcugcugcaaguucgacgaggacgauucugagcccgugcugaagggcgugaaacugcacuacaccugaggacuaguuauaagacugacuagcccgaugggccucccaacgggcccuccuccccuccuugcaccgagauuaauagaucucaaaggcucuuuucagagccaccaaaaaaaaaaaaaaaaaaaaaaaaaaaaaaaaaaaaaaaaaaaaaaaaaaaaaaaaaaaaaaaaaaaaaaaaaaaaaaaaaaaaaaaaaaaaaaaaaaaaa

SEQ ID NO: 24474 - RNA, 4041 nt, Artificial Sequence
  SARS-CoV-2/Wuhan/WIV05/2019__EPI_ISL_402128 spike protein mRNA gc mod (1-1273)(K986P_V987P_N501Y_D614G)
aggagaaagcuuaccauguucguguuucuggugcugcugccccugguguccagccagugugugaaccugaccaccagaacacagcugccuccagccuacaccaacagcuucaccagaggcguguacuaccccgacaagguguucagauccagcgugcugcacucuacccaggaccuguuccugccuuucuucagcaacgugaccugguuccacgccauccacguguccggcaccaauggcaccaagagauucgacaaccccgugcugcccuucaacgacgggguguacuuugccagcaccgagaaguccaacaucaucagaggcuggaucuucggcaccacacuggacagcaagacccagagccugcugaucgugaacaacgccaccaacguggucaucaaagugugcgaguuccaguucugcaacgaccccuuccugggcgucuacuaccacaagaacaacaagagcuggauggaaagcgaguuccggguguacagcagcgccaacaacugcaccuucgaguacgugucccagccuuuccugauggaccuggaaggcaagcagggcaacuucaagaaccugcgcgaguucguguucaagaacaucgacggcuacuucaaaaucuacagcaagcacaccccuaucaaccucgugcgggaucugccucagggcuucucugcucuggaaccccugguggaucugcccaucggcaucaacaucacccgguuucagacacugcuggcccugcacagaagcuaccugacaccuggcgauagcagcagcggauggacagcuggugccgccgcuuacuaugugggcuaccugcagccuagaaccuuccugcugaaguacaacgagaacggcaccaucaccgacgccguggauugugcucuggauccucugagcgagacaaagugcacccugaaguccuucaccguggaaaagggcaucuaccagaccagcaacuuccgggugcagcccaccgaauccaucgugcgguuccccaauaucaccaaucugugccccuucggcgagguguucaaugccaccagauucgccucuguguacgccuggaaccggaagcggaucagcaauugcguggccgacuacuccgugcuguacaacuccgccagcuucagcaccuucaagugcuacggcguguccccuaccaagcugaacgaccugugcuucacaaacguguacgccgacagcuucgugauccggggagaugaagugcggcagauugccccuggacagacaggcaagaucgccgacuacaacuacaagcugcccgacgacuucaccggcugugugauugccuggaacagcaacaaccuggacuccaaagucggcggcaacuacaauuaccuguaccggcuguuccggaaguccaaucugaagcccuucgagcgggacaucagcaccgaaaucuaucaggccggcagcaccccuugcaacggcguggaaggcuucaacugcuacuucccacugcaguccuacggcuuucagcccacauacggcgugggcuaucagcccuacagagugguggugcugagcuucgaacugcugcaugcuccugccacagugugcggcccuaagaaaagcaccaaucucgugaagaacaaaugcgugaacuucaacuucaacggccugaccggcaccggcgugcugacagagagcaacaagaaguuccugccauuccagcaguuuggccgggauaucgccgauaccacagacgccguuagagauccccagacacuggaaauccuggacaucaccccaugcagcuucggcggagugucugugaucaccccuggcaccaacaccagcaaucagguggcagugcuguaccagggcgugaacuguaccgaagugcccguggccauucacgccgaucagcugacaccuacauggcggguguacuccaccggcagcaauguguuucagaccagagccggcugucugaucggagccgagcacgugaacaauagcuacgagugcgacauccccaucggcgcuggcaucugugccagcuaccagacacagacaaacagccccagacgggcuagaagcguggccagccagagcaucauugccuacacaaugucucugggcgccgagaacagcguggccuacuccaacaacucuaucgcuauccccaccaacuucaccaucagcgugaccaccgagauccugccuguguccaugaccaagaccagcguggacugcaccauguacaucugcggcgauuccaccgagugcuccaaccugcugcugcaguacggcagcuucugcacccagcugaauagagcccugacagggaucgccguggaacaggacaagaacacccaagagguguucgcccaagugaagcaaaucuacaagaccccuccuaucaaggacuucggcggcuucaauuucagccagauucugcccgauccuagcaagcccagcaagcggagcuucaucgaggaccugcuguucaacaaagugacacuggccgacgccggcuucaucaagcaguauggcgauugucugggcgacauugccgccagggaucugauuugcgcccagaaguuuaacggacugacagugcugccuccucugcugaccgaugagaugaucgcccaguacacaucugcccugcuggccggcacaaucacaagcggcuggacauuuggagcuggcgccgcucugcagauccccuuugcuaugcagauggccuaccgguucaacggcaucggagugacccagaaugugcuguacgagaaccagaagcugaucgccaaccaguucaacagcgccaucggcaagauccaggacagccugagcagcacagcaagcgcccugggaaagcugcaggacguggucaaccagaaugcccaggcacugaacacccuggucaagcagcuguccuccaacuucggcgccaucagcucugugcugaacgauauccugagcagacuggacccuccugaggccgaggugcagaucgacagacugaucacaggcagacugcagagccuccagacauacgugacccagcagcugaucagagccgccgagauuagagccucugccaaucuggccgccaccaagaugucugagugugugcugggccagagcaagagaguggacuuuugcggcaagggcuaccaccugaugagcuucccucagucugccccucacggcgugguguuucugcacgugacauaugugcccgcucaagagaagaauuucaccaccgcuccagccaucugccacgacggcaaagcccacuuuccuagagaaggcguguucguguccaacggcacccauugguucgugacacagcggaacuucuacgagccccagaucaucaccaccgacaacaccuucgugucuggcaacugcgacguugugaucggcauugugaacaauaccguguacgacccucugcagcccgagcuggacagcuucaaagaggaacuggacaaguacuuuaagaaccacacaagccccgacguggaccugggcgauaucagcggaaucaaugccagcgucgugaacauccagaaagagaucgaccggcugaacgagguggccaagaaucugaacgagagccugaucgaccugcaagaacuggggaaguacgagcaguacaucaaguggcccugguacaucuggcugggcuuuaucgccggacugauugccaucgugauggucacaaucaugcuguguugcaugaccagcugcuguagcugccugaagggcuguuguagcuguggcagcugcugcaaguucgacgaggacgauucugagcccgugcugaagggcgugaaacugcacuacaccugaggacuaguuauaagacugacuagcccgaugggccucccaacgggcccuccuccccuccuugcaccgagauuaauagaucucaaaggcucuuuucagagccaccaaaaaaaaaaaaaaaaaaaaaaaaaaaaaaaaaaaaaaaaaaaaaaaaaaaaaaaaaaaaaaaaaaaaaaaaaaaaaaaaaaaaaaaaaaaaaaaaaaaaa

SEQ ID NO: 24475 - RNA, 4035 nt, Artificial Sequence
  SARS-CoV-2/Wuhan/WIV05/2019__EPI_ISL_402128 spike protein mRNA gc mod (1-1273)(K986P_V987P_H69del_V70del_D614G)
aggagaaagcuuaccauguucguguuucuggugcugcugccccugguguccagccagugugugaaccugaccaccagaacacagcugccuccagccuacaccaacagcuucaccagaggcguguacuaccccgacaagguguucagauccagcgugcugcacucuacccaggaccuguuccugccuuucuucagcaacgugaccugguuccacgccaucuccggcaccaauggcaccaagagauucgacaaccccgugcugcccuucaacgacgggguguacuuugccagcaccgagaaguccaacaucaucagaggcuggaucuucggcaccacacuggacagcaagacccagagccugcugaucgugaacaacgccaccaacguggucaucaaagugugcgaguuccaguucugcaacgaccccuuccugggcgucuacuaccacaagaacaacaagagcuggauggaaagcgaguuccggguguacagcagcgccaacaacugcaccuucgaguacgugucccagccuuuccugauggaccuggaaggcaagcagggcaacuucaagaaccugcgcgaguucguguucaagaacaucgacggcuacuucaaaaucuacagcaagcacaccccuaucaaccucgugcgggaucugccucagggcuucucugcucuggaaccccugguggaucugcccaucggcaucaacaucacccgguuucagacacugcuggcccugcacagaagcuaccugacaccuggcgauagcagcagcggauggacagcuggugccgccgcuuacuaugugggcuaccugcagccuagaaccuuccugcugaaguacaacgagaacggcaccaucaccgacgccguggauugugcucuggauccucugagcgagacaaagugcacccugaaguccuucaccguggaaaagggcaucuaccagaccagcaacuuccgggugcagcccaccgaauccaucgugcgguuccccaauaucaccaaucugugccccuucggcgagguguucaaugccaccagauucgccucuguguacgccuggaaccggaagcggaucagcaauugcguggccgacuacuccgugcuguacaacuccgccagcuucagcaccuucaagugcuacggcguguccccuaccaagcugaacgaccugugcuucacaaacguguacgccgacagcuucgugauccggggagaugaagugcggcagauugccccuggacagacaggcaagaucgccgacuacaacuacaagcugcccgacgacuucaccggcugugugauugccuggaacagcaacaaccuggacuccaaagucggcggcaacuacaauuaccuguaccggcuguuccggaaguccaaucugaagcccuucgagcgggacaucagcaccgaaaucuaucaggccggcagcaccccuugcaacggcguggaaggcuucaacugcuacuucccacugcaguccuacggcuuucagcccacaaauggcgugggcuaucagcccuacagagugguggugcugagcuucgaacugcugcaugcuccugccacagugugcggcccuaagaaaagcaccaaucucgugaagaacaaaugcgugaacuucaacuucaacggccugaccggcaccggcgugcugacagagagcaacaagaaguuccugccauuccagcaguuuggccgggauaucgccgauaccacagacgccguuagagauccccagacacuggaaauccuggacaucaccccaugcagcuucggcggagugucugugaucaccccuggcaccaacaccagcaaucagguggcagugcuguaccagggcgugaacuguaccgaagugcccguggccauucacgccgaucagcugacaccuacauggcggguguacuccaccggcagcaauguguuucagaccagagccggcugucugaucggagccgagcacgugaacaauagcuacgagugcgacauccccaucggcgcuggcaucugugccagcuaccagacacagacaaacagccccagacgggcuagaagcguggccagccagagcaucauugccuacacaaugucucugggcgccgagaacagcguggccuacuccaacaacucuaucgcuauccccaccaacuucaccaucagcgugaccaccgagauccugccuguguccaugaccaagaccagcguggacugcaccauguacaucugcggcgauuccaccgagugcuccaaccugcugcugcaguacggcagcuucugcacccagcugaauagagcccugacagggaucgccguggaacaggacaagaacacccaagagguguucgcccaagugaagcaaaucuacaagaccccuccuaucaaggacuucggcggcuucaauuucagccagauucugcccgauccuagcaagcccagcaagcggagcuucaucgaggaccugcuguucaacaaagugacacuggccgacgccggcuucaucaagcaguauggcgauugucugggcgacauugccgccagggaucugauuugcgcccagaaguuuaacggacugacagugcugccuccucugcugaccgaugagaugaucgcccaguacacaucugcccugcuggccggcacaaucacaagcggcuggacauuuggagcuggcgccgcucugcagauccccuuugcuaugcagauggccuaccgguucaacggcaucggagugacccagaaugugcuguacgagaaccagaagcugaucgccaaccaguucaacagcgccaucggcaagauccaggacagccugagcagcacagcaagcgcccugggaaagcugcaggacguggucaaccagaaugcccaggcacugaacacccuggucaagcagcuguccuccaacuucggcgccaucagcucugugcugaacgauauccugagcagacuggacccuccugaggccgaggugcagaucgacagacugaucacaggcagacugcagagccuccagacauacgugacccagcagcugaucagagccgccgagauuagagccucugccaaucuggccgccaccaagaugucugagugugugcugggccagagcaagagaguggacuuuugcggcaagggcuaccaccugaugagcuucccucagucugccccucacggcgugguguuucugcacgugacauaugugcccgcucaagagaagaauuucaccaccgcuccagccaucugccacgacggcaaagcccacuuuccuagagaaggcguguucguguccaacggcacccauugguucgugacacagcggaacuucuacgagccccagaucaucaccaccgacaacaccuucgugucuggcaacugcgacguugugaucggcauugugaacaauaccguguacgacccucugcagcccgagcuggacagcuucaaagaggaacuggacaaguacuuuaagaaccacacaagccccgacguggaccugggcgauaucagcggaaucaaugccagcgucgugaacauccagaaagagaucgaccggcugaacgagguggccaagaaucugaacgagagccugaucgaccugcaagaacuggggaaguacgagcaguacaucaaguggcccugguacaucuggcugggcuuuaucgccggacugauugccaucgugauggucacaaucaugcuguguugcaugaccagcugcuguagcugccugaagggcuguuguagcuguggcagcugcugcaaguucgacgaggacgauucugagcccgugcugaagggcgugaaacugcacuacaccugaggacuaguuauaagacugacuagcccgaugggccucccaacgggcccuccuccccuccuugcaccgagauuaauagaucucaaaggcucuuuucagagccaccaaaaaaaaaaaaaaaaaaaaaaaaaaaaaaaaaaaaaaaaaaaaaaaaaaaaaaaaaaaaaaaaaaaaaaaaaaaaaaaaaaaaaaaaaaaaaaaaaaaaa

SEQ ID NO: 24476 - RNA, 4041 nt, Artificial Sequence
  SARS-CoV-2/Wuhan/WIV05/2019__EPI_ISL_402128 spike protein mRNA gc mod (1-1273)(K986P_V987P_Y453F_D614G)
aggagaaagcuuaccauguucguguuucuggugcugcugccccugguguccagccagugugugaaccugaccaccagaacacagcugccuccagccuacaccaacagcuucaccagaggcguguacuaccccgacaagguguucagauccagcgugcugcacucuacccaggaccuguuccugccuuucuucagcaacgugaccugguuccacgccauccacguguccggcaccaauggcaccaagagauucgacaaccccgugcugcccuucaacgacgggguguacuuugccagcaccgagaaguccaacaucaucagaggcuggaucuucggcaccacacuggacagcaagacccagagccugcugaucgugaacaacgccaccaacguggucaucaaagugugcgaguuccaguucugcaacgaccccuuccugggcgucuacuaccacaagaacaacaagagcuggauggaaagcgaguuccggguguacagcagcgccaacaacugcaccuucgaguacgugucccagccuuuccugauggaccuggaaggcaagcagggcaacuucaagaaccugcgcgaguucguguucaagaacaucgacggcuacuucaaaaucuacagcaagcacaccccuaucaaccucgugcgggaucugccucagggcuucucugcucuggaaccccugguggaucugcccaucggcaucaacaucacccgguuucagacacugcuggcccugcacagaagcuaccugacaccuggcgauagcagcagcggauggacagcuggugccgccgcuuacuaugugggcuaccugcagccuagaaccuuccugcugaaguacaacgagaacggcaccaucaccgacgccguggauugugcucuggauccucugagcgagacaaagugcacccugaaguccuucaccguggaaaagggcaucuaccagaccagcaacuuccgggugcagcccaccgaauccaucgugcgguuccccaauaucaccaaucugugccccuucggcgagguguucaaugccaccagauucgccucuguguacgccuggaaccggaagcggaucagcaauugcguggccgacuacuccgugcuguacaacuccgccagcuucagcaccuucaagugcuacggcguguccccuaccaagcugaacgaccugugcuucacaaacguguacgccgacagcuucgugauccggggagaugaagugcggcagauugccccuggacagacaggcaagaucgccgacuacaacuacaagcugcccgacgacuucaccggcugugugauugccuggaacagcaacaaccuggacuccaaagucggcggcaacuacaauuaccuguuccggcuguuccggaaguccaaucugaagcccuucgagcgggacaucagcaccgaaaucuaucaggccggcagcaccccuugcaacggcguggaaggcuucaacugcuacuucccacugcaguccuacggcuuucagcccacaaauggcgugggcuaucagcccuacagagugguggugcugagcuucgaacugcugcaugcuccugccacagugugcggcccuaagaaaagcaccaaucucgugaagaacaaaugcgugaacuucaacuucaacggccugaccggcaccggcgugcugacagagagcaacaagaaguuccugccauuccagcaguuuggccgggauaucgccgauaccacagacgccguuagagauccccagacacuggaaauccuggacaucaccccaugcagcuucggcggagugucugugaucaccccuggcaccaacaccagcaaucagguggcagugcuguaccagggcgugaacuguaccgaagugcccguggccauucacgccgaucagcugacaccuacauggcggguguacuccaccggcagcaauguguuucagaccagagccggcugucugaucggagccgagcacgugaacaauagcuacgagugcgacauccccaucggcgcuggcaucugugccagcuaccagacacagacaaacagccccagacgggcuagaagcguggccagccagagcaucauugccuacacaaugucucugggcgccgagaacagcguggccuacuccaacaacucuaucgcuauccccaccaacuucaccaucagcgugaccaccgagauccugccuguguccaugaccaagaccagcguggacugcaccauguacaucugcggcgauuccaccgagugcuccaaccugcugcugcaguacggcagcuucugcacccagcugaauagagcccugacagggaucgccguggaacaggacaagaacacccaagagguguucgcccaagugaagcaaaucuacaagaccccuccuaucaaggacuucggcggcuucaauuucagccagauucugcccgauccuagcaagcccagcaagcggagcuucaucgaggaccugcuguucaacaaagugacacuggccgacgccggcuucaucaagcaguauggcgauugucugggcgacauugccgccagggaucugauuugcgcccagaaguuuaacggacugacagugcugccuccucugcugaccgaugagaugaucgcccaguacacaucugcccugcuggccggcacaaucacaagcggcuggacauuuggagcuggcgccgcucugcagauccccuuugcuaugcagauggccuaccgguucaacggcaucggagugacccagaaugugcuguacgagaaccagaagcugaucgccaaccaguucaacagcgccaucggcaagauccaggacagccugagcagcacagcaagcgcccugggaaagcugcaggacguggucaaccagaaugcccaggcacugaacacccuggucaagcagcuguccuccaacuucggcgccaucagcucugugcugaacgauauccugagcagacuggacccuccugaggccgaggugcagaucgacagacugaucacaggcagacugcagagccuccagacauacgugacccagcagcugaucagagccgccgagauuagagccucugccaaucuggccgccaccaagaugucugagugugugcugggccagagcaagagaguggacuuuugcggcaagggcuaccaccugaugagcuucccucagucugccccucacggcgugguguuucugcacgugacauaugugcccgcucaagagaagaauuucaccaccgcuccagccaucugccacgacggcaaagcccacuuuccuagagaaggcguguucguguccaacggcacccauugguucgugacacagcggaacuucuacgagccccagaucaucaccaccgacaacaccuucgugucuggcaacugcgacguugugaucggcauugugaacaauaccguguacgacccucugcagcccgagcuggacagcuucaaagaggaacuggacaaguacuuuaagaaccacacaagccccgacguggaccugggcgauaucagcggaaucaaugccagcgucgugaacauccagaaagagaucgaccggcugaacgagguggccaagaaucugaacgagagccugaucgaccugcaagaacuggggaaguacgagcaguacaucaaguggcccugguacaucuggcugggcuuuaucgccggacugauugccaucgugauggucacaaucaugcuguguugcaugaccagcugcuguagcugccugaagggcuguuguagcuguggcagcugcugcaaguucgacgaggacgauucugagcccgugcugaagggcgugaaacugcacuacaccugaggacuaguuauaagacugacuagcccgaugggccucccaacgggcccuccuccccuccuugcaccgagauuaauagaucucaaaggcucuuuucagagccaccaaaaaaaaaaaaaaaaaaaaaaaaaaaaaaaaaaaaaaaaaaaaaaaaaaaaaaaaaaaaaaaaaaaaaaaaaaaaaaaaaaaaaaaaaaaaaaaaaaaaa

SEQ ID NO: 24477 - RNA, 4041 nt, Artificial Sequence
  SARS-CoV-2/Wuhan/WIV05/2019__EPI_ISL_402128 spike protein mRNA gc mod (1-1273)(K986P_V987P_D614G_I692V)
aggagaaagcuuaccauguucguguuucuggugcugcugccccugguguccagccagugugugaaccugaccaccagaacacagcugccuccagccuacaccaacagcuucaccagaggcguguacuaccccgacaagguguucagauccagcgugcugcacucuacccaggaccuguuccugccuuucuucagcaacgugaccugguuccacgccauccacguguccggcaccaauggcaccaagagauucgacaaccccgugcugcccuucaacgacgggguguacuuugccagcaccgagaaguccaacaucaucagaggcuggaucuucggcaccacacuggacagcaagacccagagccugcugaucgugaacaacgccaccaacguggucaucaaagugugcgaguuccaguucugcaacgaccccuuccugggcgucuacuaccacaagaacaacaagagcuggauggaaagcgaguuccggguguacagcagcgccaacaacugcaccuucgaguacgugucccagccuuuccugauggaccuggaaggcaagcagggcaacuucaagaaccugcgcgaguucguguucaagaacaucgacggcuacuucaaaaucuacagcaagcacaccccuaucaaccucgugcgggaucugccucagggcuucucugcucuggaaccccugguggaucugcccaucggcaucaacaucacccgguuucagacacugcuggcccugcacagaagcuaccugacaccuggcgauagcagcagcggauggacagcuggugccgccgcuuacuaugugggcuaccugcagccuagaaccuuccugcugaaguacaacgagaacggcaccaucaccgacgccguggauugugcucuggauccucugagcgagacaaagugcacccugaaguccuucaccguggaaaagggcaucuaccagaccagcaacuuccgggugcagcccaccgaauccaucgugcgguuccccaauaucaccaaucugugccccuucggcgagguguucaaugccaccagauucgccucuguguacgccuggaaccggaagcggaucagcaauugcguggccgacuacuccgugcuguacaacuccgccagcuucagcaccuucaagugcuacggcguguccccuaccaagcugaacgaccugugcuucacaaacguguacgccgacagcuucgugauccggggagaugaagugcggcagauugccccuggacagacaggcaagaucgccgacuacaacuacaagcugcccgacgacuucaccggcugugugauugccuggaacagcaacaaccuggacuccaaagucggcggcaacuacaauuaccuguaccggcuguuccggaaguccaaucugaagcccuucgagcgggacaucagcaccgaaaucuaucaggccggcagcaccccuugcaacggcguggaaggcuucaacugcuacuucccacugcaguccuacggcuuucagcccacaaauggcgugggcuaucagcccuacagagugguggugcugagcuucgaacugcugcaugcuccugccacagugugcggcccuaagaaaagcaccaaucucgugaagaacaaaugcgugaacuucaacuucaacggccugaccggcaccggcgugcugacagagagcaacaagaaguuccugccauuccagcaguuuggccgggauaucgccgauaccacagacgccguuagagauccccagacacuggaaauccuggacaucaccccaugcagcuucggcggagugucugugaucaccccuggcaccaacaccagcaaucagguggcagugcuguaccagggcgugaacuguaccgaagugcccguggccauucacgccgaucagcugacaccuacauggcggguguacuccaccggcagcaauguguuucagaccagagccggcugucugaucggagccgagcacgugaacaauagcuacgagugcgacauccccaucggcgcuggcaucugugccagcuaccagacacagacaaacagccccagacgggcuagaagcguggccagccagagcgugauugccuacacaaugucucugggcgccgagaacagcguggccuacuccaacaacucuaucgcuauccccaccaacuucaccaucagcgugaccaccgagauccugccuguguccaugaccaagaccagcguggacugcaccauguacaucugcggcgauuccaccgagugcuccaaccugcugcugcaguacggcagcuucugcacccagcugaauagagcccugacagggaucgccguggaacaggacaagaacacccaagagguguucgcccaagugaagcaaaucuacaagaccccuccuaucaaggacuucggcggcuucaauuucagccagauucugcccgauccuagcaagcccagcaagcggagcuucaucgaggaccugcuguucaacaaagugacacuggccgacgccggcuucaucaagcaguauggcgauugucugggcgacauugccgccagggaucugauuugcgcccagaaguuuaacggacugacagugcugccuccucugcugaccgaugagaugaucgcccaguacacaucugcccugcuggccggcacaaucacaagcggcuggacauuuggagcuggcgccgcucugcagauccccuuugcuaugcagauggccuaccgguucaacggcaucggagugacccagaaugugcuguacgagaaccagaagcugaucgccaaccaguucaacagcgccaucggcaagauccaggacagccugagcagcacagcaagcgcccugggaaagcugcaggacguggucaaccagaaugcccaggcacugaacacccuggucaagcagcuguccuccaacuucggcgccaucagcucugugcugaacgauauccugagcagacuggacccuccugaggccgaggugcagaucgacagacugaucacaggcagacugcagagccuccagacauacgugacccagcagcugaucagagccgccgagauuagagccucugccaaucuggccgccaccaagaugucugagugugugcugggccagagcaagagaguggacuuuugcggcaagggcuaccaccugaugagcuucccucagucugccccucacggcgugguguuucugcacgugacauaugugcccgcucaagagaagaauuucaccaccgcuccagccaucugccacgacggcaaagcccacuuuccuagagaaggcguguucguguccaacggcacccauugguucgugacacagcggaacuucuacgagccccagaucaucaccaccgacaacaccuucgugucuggcaacugcgacguugugaucggcauugugaacaauaccguguacgacccucugcagcccgagcuggacagcuucaaagaggaacuggacaaguacuuuaagaaccacacaagccccgacguggaccugggcgauaucagcggaaucaaugccagcgucgugaacauccagaaagagaucgaccggcugaacgagguggccaagaaucugaacgagagccugaucgaccugcaagaacuggggaaguacgagcaguacaucaaguggcccugguacaucuggcugggcuuuaucgccggacugauugccaucgugauggucacaaucaugcuguguugcaugaccagcugcuguagcugccugaagggcuguuguagcuguggcagcugcugcaaguucgacgaggacgauucugagcccgugcugaagggcgugaaacugcacuacaccugaggacuaguuauaagacugacuagcccgaugggccucccaacgggcccuccuccccuccuugcaccgagauuaauagaucucaaaggcucuuuucagagccaccaaaaaaaaaaaaaaaaaaaaaaaaaaaaaaaaaaaaaaaaaaaaaaaaaaaaaaaaaaaaaaaaaaaaaaaaaaaaaaaaaaaaaaaaaaaaaaaaaaaaa

SEQ ID NO: 24478 - RNA, 4041 nt, Artificial Sequence
  SARS-CoV-2/Wuhan/WIV05/2019__EPI_ISL_402128 spike protein mRNA gc mod (1-1273)(K986P_V987P_D614G_M1229I)
aggagaaagcuuaccauguucguguuucuggugcugcugccccugguguccagccagugugugaaccugaccaccagaacacagcugccuccagccuacaccaacagcuucaccagaggcguguacuaccccgacaagguguucagauccagcgugcugcacucuacccaggaccuguuccugccuuucuucagcaacgugaccugguuccacgccauccacguguccggcaccaauggcaccaagagauucgacaaccccgugcugcccuucaacgacgggguguacuuugccagcaccgagaaguccaacaucaucagaggcuggaucuucggcaccacacuggacagcaagacccagagccugcugaucgugaacaacgccaccaacguggucaucaaagugugcgaguuccaguucugcaacgaccccuuccugggcgucuacuaccacaagaacaacaagagcuggauggaaagcgaguuccggguguacagcagcgccaacaacugcaccuucgaguacgugucccagccuuuccugauggaccuggaaggcaagcagggcaacuucaagaaccugcgcgaguucguguucaagaacaucgacggcuacuucaaaaucuacagcaagcacaccccuaucaaccucgugcgggaucugccucagggcuucucugcucuggaaccccugguggaucugcccaucggcaucaacaucacccgguuucagacacugcuggcccugcacagaagcuaccugacaccuggcgauagcagcagcggauggacagcuggugccgccgcuuacuaugugggcuaccugcagccuagaaccuuccugcugaaguacaacgagaacggcaccaucaccgacgccguggauugugcucuggauccucugagcgagacaaagugcacccugaaguccuucaccguggaaaagggcaucuaccagaccagcaacuuccgggugcagcccaccgaauccaucgugcgguuccccaauaucaccaaucugugccccuucggcgagguguucaaugccaccagauucgccucuguguacgccuggaaccggaagcggaucagcaauugcguggccgacuacuccgugcuguacaacuccgccagcuucagcaccuucaagugcuacggcguguccccuaccaagcugaacgaccugugcuucacaaacguguacgccgacagcuucgugauccggggagaugaagugcggcagauugccccuggacagacaggcaagaucgccgacuacaacuacaagcugcccgacgacuucaccggcugugugauugccuggaacagcaacaaccuggacuccaaagucggcggcaacuacaauuaccuguaccggcuguuccggaaguccaaucugaagcccuucgagcgggacaucagcaccgaaaucuaucaggccggcagcaccccuugcaacggcguggaaggcuucaacugcuacuucccacugcaguccuacggcuuucagcccacaaauggcgugggcuaucagcccuacagagugguggugcugagcuucgaacugcugcaugcuccugccacagugugcggcccuaagaaaagcaccaaucucgugaagaacaaaugcgugaacuucaacuucaacggccugaccggcaccggcgugcugacagagagcaacaagaaguuccugccauuccagcaguuuggccgggauaucgccgauaccacagacgccguuagagauccccagacacuggaaauccuggacaucaccccaugcagcuucggcggagugucugugaucaccccuggcaccaacaccagcaaucagguggcagugcuguaccagggcgugaacuguaccgaagugcccguggccauucacgccgaucagcugacaccuacauggcggguguacuccaccggcagcaauguguuucagaccagagccggcugucugaucggagccgagcacgugaacaauagcuacgagugcgacauccccaucggcgcuggcaucugugccagcuaccagacacagacaaacagccccagacgggcuagaagcguggccagccagagcaucauugccuacacaaugucucugggcgccgagaacagcguggccuacuccaacaacucuaucgcuauccccaccaacuucaccaucagcgugaccaccgagauccugccuguguccaugaccaagaccagcguggacugcaccauguacaucugcggcgauuccaccgagugcuccaaccugcugcugcaguacggcagcuucugcacccagcugaauagagcccugacagggaucgccguggaacaggacaagaacacccaagagguguucgcccaagugaagcaaaucuacaagaccccuccuaucaaggacuucggcggcuucaauuucagccagauucugcccgauccuagcaagcccagcaagcggagcuucaucgaggaccugcuguucaacaaagugacacuggccgacgccggcuucaucaagcaguauggcgauugucugggcgacauugccgccagggaucugauuugcgcccagaaguuuaacggacugacagugcugccuccucugcugaccgaugagaugaucgcccaguacacaucugcccugcuggccggcacaaucacaagcggcuggacauuuggagcuggcgccgcucugcagauccccuuugcuaugcagauggccuaccgguucaacggcaucggagugacccagaaugugcuguacgagaaccagaagcugaucgccaaccaguucaacagcgccaucggcaagauccaggacagccugagcagcacagcaagcgcccugggaaagcugcaggacguggucaaccagaaugcccaggcacugaacacccuggucaagcagcuguccuccaacuucggcgccaucagcucugugcugaacgauauccugagcagacuggacccuccugaggccgaggugcagaucgacagacugaucacaggcagacugcagagccuccagacauacgugacccagcagcugaucagagccgccgagauuagagccucugccaaucuggccgccaccaagaugucugagugugugcugggccagagcaagagaguggacuuuugcggcaagggcuaccaccugaugagcuucccucagucugccccucacggcgugguguuucugcacgugacauaugugcccgcucaagagaagaauuucaccaccgcuccagccaucugccacgacggcaaagcccacuuuccuagagaaggcguguucguguccaacggcacccauugguucgugacacagcggaacuucuacgagccccagaucaucaccaccgacaacaccuucgugucuggcaacugcgacguugugaucggcauugugaacaauaccguguacgacccucugcagcccgagcuggacagcuucaaagaggaacuggacaaguacuuuaagaaccacacaagccccgacguggaccugggcgauaucagcggaaucaaugccagcgucgugaacauccagaaagagaucgaccggcugaacgagguggccaagaaucugaacgagagccugaucgaccugcaagaacuggggaaguacgagcaguacaucaaguggcccugguacaucuggcugggcuuuaucgccggacugauugccaucgugaucgucacaaucaugcuguguugcaugaccagcugcuguagcugccugaagggcuguuguagcuguggcagcugcugcaaguucgacgaggacgauucugagcccgugcugaagggcgugaaacugcacuacaccugaggacuaguuauaagacugacuagcccgaugggccucccaacgggcccuccuccccuccuugcaccgagauuaauagaucucaaaggcucuuuucagagccaccaaaaaaaaaaaaaaaaaaaaaaaaaaaaaaaaaaaaaaaaaaaaaaaaaaaaaaaaaaaaaaaaaaaaaaaaaaaaaaaaaaaaaaaaaaaaaaaaaaaaa

SEQ ID NO: 24479 - RNA, 4035 nt, Artificial Sequence
  SARS-CoV-2/Wuhan/WIV05/2019__EPI_ISL_402128 spike protein mRNA gc mod (1-1273)(K986P_V987P_H69del_V70del_A222V_Y453F_S477N_D614G_I692V)
aggagaaagcuuaccauguucguguuucuggugcugcugccccugguguccagccagugugugaaccugaccaccagaacacagcugccuccagccuacaccaacagcuucaccagaggcguguacuaccccgacaagguguucagauccagcgugcugcacucuacccaggaccuguuccugccuuucuucagcaacgugaccugguuccacgccaucuccggcaccaauggcaccaagagauucgacaaccccgugcugcccuucaacgacgggguguacuuugccagcaccgagaaguccaacaucaucagaggcuggaucuucggcaccacacuggacagcaagacccagagccugcugaucgugaacaacgccaccaacguggucaucaaagugugcgaguuccaguucugcaacgaccccuuccugggcgucuacuaccacaagaacaacaagagcuggauggaaagcgaguuccggguguacagcagcgccaacaacugcaccuucgaguacgugucccagccuuuccugauggaccuggaaggcaagcagggcaacuucaagaaccugcgcgaguucguguucaagaacaucgacggcuacuucaaaaucuacagcaagcacaccccuaucaaccucgugcgggaucugccucagggcuucucugugcuggaaccccugguggaucugcccaucggcaucaacaucacccgguuucagacacugcuggcccugcacagaagcuaccugacaccuggcgauagcagcagcggauggacagcuggugccgccgcuuacuaugugggcuaccugcagccuagaaccuuccugcugaaguacaacgagaacggcaccaucaccgacgccguggauugugcucuggauccucugagcgagacaaagugcacccugaaguccuucaccguggaaaagggcaucuaccagaccagcaacuuccgggugcagcccaccgaauccaucgugcgguuccccaauaucaccaaucugugccccuucggcgagguguucaaugccaccagauucgccucuguguacgccuggaaccggaagcggaucagcaauugcguggccgacuacuccgugcuguacaacuccgccagcuucagcaccuucaagugcuacggcguguccccuaccaagcugaacgaccugugcuucacaaacguguacgccgacagcuucgugauccggggagaugaagugcggcagauugccccuggacagacaggcaagaucgccgacuacaacuacaagcugcccgacgacuucaccggcugugugauugccuggaacagcaacaaccuggacuccaaagucggcggcaacuacaauuaccuguuccggcuguuccggaaguccaaucugaagcccuucgagcgggacaucagcaccgaaaucuaucaggccggcaacaccccuugcaacggcguggaaggcuucaacugcuacuucccacugcaguccuacggcuuucagcccacaaauggcgugggcuaucagcccuacagagugguggugcugagcuucgaacugcugcaugcuccugccacagugugcggcccuaagaaaagcaccaaucucgugaagaacaaaugcgugaacuucaacuucaacggccugaccggcaccggcgugcugacagagagcaacaagaaguuccugccauuccagcaguuuggccgggauaucgccgauaccacagacgccguuagagauccccagacacuggaaauccuggacaucaccccaugcagcuucggcggagugucugugaucaccccuggcaccaacaccagcaaucagguggcagugcuguaccagggcgugaacuguaccgaagugcccguggccauucacgccgaucagcugacaccuacauggcggguguacuccaccggcagcaauguguuucagaccagagccggcugucugaucggagccgagcacgugaacaauagcuacgagugcgacauccccaucggcgcuggcaucugugccagcuaccagacacagacaaacagccccagacgggcuagaagcguggccagccagagcgugauugccuacacaaugucucugggcgccgagaacagcguggccuacuccaacaacucuaucgcuauccccaccaacuucaccaucagcgugaccaccgagauccugccuguguccaugaccaagaccagcguggacugcaccauguacaucugcggcgauuccaccgagugcuccaaccugcugcugcaguacggcagcuucugcacccagcugaauagagcccugacagggaucgccguggaacaggacaagaacacccaagagguguucgcccaagugaagcaaaucuacaagaccccuccuaucaaggacuucggcggcuucaauuucagccagauucugcccgauccuagcaagcccagcaagcggagcuucaucgaggaccugcuguucaacaaagugacacuggccgacgccggcuucaucaagcaguauggcgauugucugggcgacauugccgccagggaucugauuugcgcccagaaguuuaacggacugacagugcugccuccucugcugaccgaugagaugaucgcccaguacacaucugcccugcuggccggcacaaucacaagcggcuggacauuuggagcuggcgccgcucugcagauccccuuugcuaugcagauggccuaccgguucaacggcaucggagugacccagaaugugcuguacgagaaccagaagcugaucgccaaccaguucaacagcgccaucggcaagauccaggacagccugagcagcacagcaagcgcccugggaaagcugcaggacguggucaaccagaaugcccaggcacugaacacccuggucaagcagcuguccuccaacuucggcgccaucagcucugugcugaacgauauccugagcagacuggacccuccugaggccgaggugcagaucgacagacugaucacaggcagacugcagagccuccagacauacgugacccagcagcugaucagagccgccgagauuagagccucugccaaucuggccgccaccaagaugucugagugugugcugggccagagcaagagaguggacuuuugcggcaagggcuaccaccugaugagcuucccucagucugccccucacggcgugguguuucugcacgugacauaugugcccgcucaagagaagaauuucaccaccgcuccagccaucugccacgacggcaaagcccacuuuccuagagaaggcguguucguguccaacggcacccauugguucgugacacagcggaacuucuacgagccccagaucaucaccaccgacaacaccuucgugucuggcaacugcgacguugugaucggcauugugaacaauaccguguacgacccucugcagcccgagcuggacagcuucaaagaggaacuggacaaguacuuuaagaaccacacaagccccgacguggaccugggcgauaucagcggaaucaaugccagcgucgugaacauccagaaagagaucgaccggcugaacgagguggccaagaaucugaacgagagccugaucgaccugcaagaacuggggaaguacgagcaguacaucaaguggcccugguacaucuggcugggcuuuaucgccggacugauugccaucgugauggucacaaucaugcuguguugcaugaccagcugcuguagcugccugaagggcuguuguagcuguggcagcugcugcaaguucgacgaggacgauucugagcccgugcugaagggcgugaaacugcacuacaccugaggacuaguuauaagacugacuagcccgaugggccucccaacgggcccuccuccccuccuugcaccgagauuaauagaucucaaaggcucuuuucagagccaccaaaaaaaaaaaaaaaaaaaaaaaaaaaaaaaaaaaaaaaaaaaaaaaaaaaaaaaaaaaaaaaaaaaaaaaaaaaaaaaaaaaaaaaaaaaaaaaaaaaaa

SEQ ID NO: 24480 - RNA, 4035 nt, Artificial Sequence
  SARS-CoV-2/Wuhan/WIV05/2019__EPI_ISL_402128 spike protein mRNA gc mod (1-1273)(K986P_V987P_H69del_V70del_Y453F_D614G_I692V_M1229I)
aggagaaagcuuaccauguucguguuucuggugcugcugccccugguguccagccagugugugaaccugaccaccagaacacagcugccuccagccuacaccaacagcuucaccagaggcguguacuaccccgacaagguguucagauccagcgugcugcacucuacccaggaccuguuccugccuuucuucagcaacgugaccugguuccacgccaucuccggcaccaauggcaccaagagauucgacaaccccgugcugcccuucaacgacgggguguacuuugccagcaccgagaaguccaacaucaucagaggcuggaucuucggcaccacacuggacagcaagacccagagccugcugaucgugaacaacgccaccaacguggucaucaaagugugcgaguuccaguucugcaacgaccccuuccugggcgucuacuaccacaagaacaacaagagcuggauggaaagcgaguuccggguguacagcagcgccaacaacugcaccuucgaguacgugucccagccuuuccugauggaccuggaaggcaagcagggcaacuucaagaaccugcgcgaguucguguucaagaacaucgacggcuacuucaaaaucuacagcaagcacaccccuaucaaccucgugcgggaucugccucagggcuucucugcucuggaaccccugguggaucugcccaucggcaucaacaucacccgguuucagacacugcuggcccugcacagaagcuaccugacaccuggcgauagcagcagcggauggacagcuggugccgccgcuuacuaugugggcuaccugcagccuagaaccuuccugcugaaguacaacgagaacggcaccaucaccgacgccguggauugugcucuggauccucugagcgagacaaagugcacccugaaguccuucaccguggaaaagggcaucuaccagaccagcaacuuccgggugcagcccaccgaauccaucgugcgguuccccaauaucaccaaucugugccccuucggcgagguguucaaugccaccagauucgccucuguguacgccuggaaccggaagcggaucagcaauugcguggccgacuacuccgugcuguacaacuccgccagcuucagcaccuucaagugcuacggcguguccccuaccaagcugaacgaccugugcuucacaaacguguacgccgacagcuucgugauccggggagaugaagugcggcagauugccccuggacagacaggcaagaucgccgacuacaacuacaagcugcccgacgacuucaccggcugugugauugccuggaacagcaacaaccuggacuccaaagucggcggcaacuacaauuaccuguuccggcuguuccggaaguccaaucugaagcccuucgagcgggacaucagcaccgaaaucuaucaggccggcagcaccccuugcaacggcguggaaggcuucaacugcuacuucccacugcaguccuacggcuuucagcccacaaauggcgugggcuaucagcccuacagagugguggugcugagcuucgaacugcugcaugcuccugccacagugugcggcccuaagaaaagcaccaaucucgugaagaacaaaugcgugaacuucaacuucaacggccugaccggcaccggcgugcugacagagagcaacaagaaguuccugccauuccagcaguuuggccgggauaucgccgauaccacagacgccguuagagauccccagacacuggaaauccuggacaucaccccaugcagcuucggcggagugucugugaucaccccuggcaccaacaccagcaaucagguggcagugcuguaccagggcgugaacuguaccgaagugcccguggccauucacgccgaucagcugacaccuacauggcggguguacuccaccggcagcaauguguuucagaccagagccggcugucugaucggagccgagcacgugaacaauagcuacgagugcgacauccccaucggcgcuggcaucugugccagcuaccagacacagacaaacagccccagacgggcuagaagcguggccagccagagcgugauugccuacacaaugucucugggcgccgagaacagcguggccuacuccaacaacucuaucgcuauccccaccaacuucaccaucagcgugaccaccgagauccugccuguguccaugaccaagaccagcguggacugcaccauguacaucugcggcgauuccaccgagugcuccaaccugcugcugcaguacggcagcuucugcacccagcugaauagagcccugacagggaucgccguggaacaggacaagaacacccaagagguguucgcccaagugaagcaaaucuacaagaccccuccuaucaaggacuucggcggcuucaauuucagccagauucugcccgauccuagcaagcccagcaagcggagcuucaucgaggaccugcuguucaacaaagugacacuggccgacgccggcuucaucaagcaguauggcgauugucugggcgacauugccgccagggaucugauuugcgcccagaaguuuaacggacugacagugcugccuccucugcugaccgaugagaugaucgcccaguacacaucugcccugcuggccggcacaaucacaagcggcuggacauuuggagcuggcgccgcucugcagauccccuuugcuaugcagauggccuaccgguucaacggcaucggagugacccagaaugugcuguacgagaaccagaagcugaucgccaaccaguucaacagcgccaucggcaagauccaggacagccugagcagcacagcaagcgcccugggaaagcugcaggacguggucaaccagaaugcccaggcacugaacacccuggucaagcagcuguccuccaacuucggcgccaucagcucugugcugaacgauauccugagcagacuggacccuccugaggccgaggugcagaucgacagacugaucacaggcagacugcagagccuccagacauacgugacccagcagcugaucagagccgccgagauuagagccucugccaaucuggccgccaccaagaugucugagugugugcugggccagagcaagagaguggacuuuugcggcaagggcuaccaccugaugagcuucccucagucugccccucacggcgugguguuucugcacgugacauaugugcccgcucaagagaagaauuucaccaccgcuccagccaucugccacgacggcaaagcccacuuuccuagagaaggcguguucguguccaacggcacccauugguucgugacacagcggaacuucuacgagccccagaucaucaccaccgacaacaccuucgugucuggcaacugcgacguugugaucggcauugugaacaauaccguguacgacccucugcagcccgagcuggacagcuucaaagaggaacuggacaaguacuuuaagaaccacacaagccccgacguggaccugggcgauaucagcggaaucaaugccagcgucgugaacauccagaaagagaucgaccggcugaacgagguggccaagaaucugaacgagagccugaucgaccugcaagaacuggggaaguacgagcaguacaucaaguggcccugguacaucuggcugggcuuuaucgccggacugauugccaucgugaucgucacaaucaugcuguguugcaugaccagcugcuguagcugccugaagggcuguuguagcuguggcagcugcugcaaguucgacgaggacgauucugagcccgugcugaagggcgugaaacugcacuacaccugaggacuaguuauaagacugacuagcccgaugggccucccaacgggcccuccuccccuccuugcaccgagauuaauagaucucaaaggcucuuuucagagccaccaaaaaaaaaaaaaaaaaaaaaaaaaaaaaaaaaaaaaaaaaaaaaaaaaaaaaaaaaaaaaaaaaaaaaaaaaaaaaaaaaaaaaaaaaaaaaaaaaaaaa

SEQ ID NO: 24481 - RNA, 4032 nt, Artificial Sequence
  SARS-CoV-2/Wuhan/WIV05/2019__EPI_ISL_402128 spike protein mRNA gc mod (1-1273)(K986P_V987P_K986P_V987P_H69del_V70del_Y144del_N501Y_A570 D_D614G_P681H_T716I_S982A_D1118H)
aggagaaagcuuaccauguucguguuucuggugcugcugccccugguguccagccagugugugaaccugaccaccagaacacagcugccuccagccuacaccaacagcuucaccagaggcguguacuaccccgacaagguguucagauccagcgugcugcacucuacccaggaccuguuccugccuuucuucagcaacgugaccugguuccacgccaucuccggcaccaauggcaccaagagauucgacaaccccgugcugcccuucaacgacgggguguacuuugccagcaccgagaaguccaacaucaucagaggcuggaucuucggcaccacacuggacagcaagacccagagccugcugaucgugaacaacgccaccaacguggucaucaaagugugcgaguuccaguucugcaacgaccccuuccugggcgucuaccacaagaacaacaagagcuggauggaaagcgaguuccggguguacagcagcgccaacaacugcaccuucgaguacgugucccagccuuuccugauggaccuggaaggcaagcagggcaacuucaagaaccugcgcgaguucguguucaagaacaucgacggcuacuucaaaaucuacagcaagcacaccccuaucaaccucgugcgggaucugccucagggcuucucugcucuggaaccccugguggaucugcccaucggcaucaacaucacccgguuucagacacugcuggcccugcacagaagcuaccugacaccuggcgauagcagcagcggauggacagcuggugccgccgcuuacuaugugggcuaccugcagccuagaaccuuccugcugaaguacaacgagaacggcaccaucaccgacgccguggauugugcucuggauccucugagcgagacaaagugcacccugaaguccuucaccguggaaaagggcaucuaccagaccagcaacuuccgggugcagcccaccgaauccaucgugcgguuccccaauaucaccaaucugugccccuucggcgagguguucaaugccaccagauucgccucuguguacgccuggaaccggaagcggaucagcaauugcguggccgacuacuccgugcuguacaacuccgccagcuucagcaccuucaagugcuacggcguguccccuaccaagcugaacgaccugugcuucacaaacguguacgccgacagcuucgugauccggggagaugaagugcggcagauugccccuggacagacaggcaagaucgccgacuacaacuacaagcugcccgacgacuucaccggcugugugauugccuggaacagcaacaaccuggacuccaaagucggcggcaacuacaauuaccuguaccggcuguuccggaaguccaaucugaagcccuucgagcgggacaucagcaccgaaaucuaucaggccggcagcaccccuugcaacggcguggaaggcuucaacugcuacuucccacugcaguccuacggcuuucagcccacauacggcgugggcuaucagcccuacagagugguggugcugagcuucgaacugcugcaugcuccugccacagugugcggcccuaagaaaagcaccaaucucgugaagaacaaaugcgugaacuucaacuucaacggccugaccggcaccggcgugcugacagagagcaacaagaaguuccugccauuccagcaguuuggccgggauaucgacgauaccacagacgccguuagagauccccagacacuggaaauccuggacaucaccccaugcagcuucggcggagugucugugaucaccccuggcaccaacaccagcaaucagguggcagugcuguaccagggcgugaacuguaccgaagugcccguggccauucacgccgaucagcugacaccuacauggcggguguacuccaccggcagcaauguguuucagaccagagccggcugucugaucggagccgagcacgugaacaauagcuacgagugcgacauccccaucggcgcuggcaucugugccagcuaccagacacagacaaacagccacagacgggcuagaagcguggccagccagagcaucauugccuacacaaugucucugggcgccgagaacagcguggccuacuccaacaacucuaucgcuauccccaucaacuucaccaucagcgugaccaccgagauccugccuguguccaugaccaagaccagcguggacugcaccauguacaucugcggcgauuccaccgagugcuccaaccugcugcugcaguacggcagcuucugcacccagcugaauagagcccugacagggaucgccguggaacaggacaagaacacccaagagguguucgcccaagugaagcaaaucuacaagaccccuccuaucaaggacuucggcggcuucaauuucagccagauucugcccgauccuagcaagcccagcaagcggagcuucaucgaggaccugcuguucaacaaagugacacuggccgacgccggcuucaucaagcaguauggcgauugucugggcgacauugccgccagggaucugauuugcgcccagaaguuuaacggacugacagugcugccuccucugcugaccgaugagaugaucgcccaguacacaucugcccugcuggccggcacaaucacaagcggcuggacauuuggagcuggcgccgcucugcagauccccuuugcuaugcagauggccuaccgguucaacggcaucggagugacccagaaugugcuguacgagaaccagaagcugaucgccaaccaguucaacagcgccaucggcaagauccaggacagccugagcagcacagcaagcgcccugggaaagcugcaggacguggucaaccagaaugcccaggcacugaacacccuggucaagcagcuguccuccaacuucggcgccaucagcucugugcugaacgauauccuggccagacuggacccuccugaggccgaggugcagaucgacagacugaucacaggcagacugcagagccuccagacauacgugacccagcagcugaucagagccgccgagauuagagccucugccaaucuggccgccaccaagaugucugagugugugcugggccagagcaagagaguggacuuuugcggcaagggcuaccaccugaugagcuucccucagucugccccucacggcgugguguuucugcacgugacauaugugcccgcucaagagaagaauuucaccaccgcuccagccaucugccacgacggcaaagcccacuuuccuagagaaggcguguucguguccaacggcacccauugguucgugacacagcggaacuucuacgagccccagaucaucaccacccacaacaccuucgugucuggcaacugcgacguugugaucggcauugugaacaauaccguguacgacccucugcagcccgagcuggacagcuucaaagaggaacuggacaaguacuuuaagaaccacacaagccccgacguggaccugggcgauaucagcggaaucaaugccagcgucgugaacauccagaaagagaucgaccggcugaacgagguggccaagaaucugaacgagagccugaucgaccugcaagaacuggggaaguacgagcaguacaucaaguggcccugguacaucuggcugggcuuuaucgccggacugauugccaucgugauggucacaaucaugcuguguugcaugaccagcugcuguagcugccugaagggcuguuguagcuguggcagcugcugcaaguucgacgaggacgauucugagcccgugcugaagggcgugaaacugcacuacaccugaggacuaguuauaagacugacuagcccgaugggccucccaacgggcccuccuccccuccuugcaccgagauuaauagaucucaaaggcucuuuucagagccaccaaaaaaaaaaaaaaaaaaaaaaaaaaaaaaaaaaaaaaaaaaaaaaaaaaaaaaaaaaaaaaaaaaaaaaaaaaaaaaaaaaaaaaaaaaaaaaaaaaaaa

SEQ ID NO: 24482 - RNA, 4041 nt, Artificial Sequence
  SARS-CoV-2/Wuhan/WIV05/2019__EPI_ISL_402128 spike protein mRNA gc mod (1-1273)(K986P_V987P_K986P_V987P_K417N_E484K_N501Y_D614G)
aggagaaagcuuaccauguucguguuucuggugcugcugccccugguguccagccagugugugaaccugaccaccagaacacagcugccuccagccuacaccaacagcuucaccagaggcguguacuaccccgacaagguguucagauccagcgugcugcacucuacccaggaccuguuccugccuuucuucagcaacgugaccugguuccacgccauccacguguccggcaccaauggcaccaagagauucgacaaccccgugcugcccuucaacgacgggguguacuuugccagcaccgagaaguccaacaucaucagaggcuggaucuucggcaccacacuggacagcaagacccagagccugcugaucgugaacaacgccaccaacguggucaucaaagugugcgaguuccaguucugcaacgaccccuuccugggcgucuacuaccacaagaacaacaagagcuggauggaaagcgaguuccggguguacagcagcgccaacaacugcaccuucgaguacgugucccagccuuuccugauggaccuggaaggcaagcagggcaacuucaagaaccugcgcgaguucguguucaagaacaucgacggcuacuucaaaaucuacagcaagcacaccccuaucaaccucgugcgggaucugccucagggcuucucugcucuggaaccccugguggaucugcccaucggcaucaacaucacccgguuucagacacugcuggcccugcacagaagcuaccugacaccuggcgauagcagcagcggauggacagcuggugccgccgcuuacuaugugggcuaccugcagccuagaaccuuccugcugaaguacaacgagaacggcaccaucaccgacgccguggauugugcucuggauccucugagcgagacaaagugcacccugaaguccuucaccguggaaaagggcaucuaccagaccagcaacuuccgggugcagcccaccgaauccaucgugcgguuccccaauaucaccaaucugugccccuucggcgagguguucaaugccaccagauucgccucuguguacgccuggaaccggaagcggaucagcaauugcguggccgacuacuccgugcuguacaacuccgccagcuucagcaccuucaagugcuacggcguguccccuaccaagcugaacgaccugugcuucacaaacguguacgccgacagcuucgugauccggggagaugaagugcggcagauugccccuggacagacaggcaacaucgccgacuacaacuacaagcugcccgacgacuucaccggcugugugauugccuggaacagcaacaaccuggacuccaaagucggcggcaacuacaauuaccuguaccggcuguuccggaaguccaaucugaagcccuucgagcgggacaucagcaccgaaaucuaucaggccggcagcaccccuugcaacggcgugaagggcuucaacugcuacuucccacugcaguccuacggcuuucagcccacauacggcgugggcuaucagcccuacagagugguggugcugagcuucgaacugcugcaugcuccugccacagugugcggcccuaagaaaagcaccaaucucgugaagaacaaaugcgugaacuucaacuucaacggccugaccggcaccggcgugcugacagagagcaacaagaaguuccugccauuccagcaguuuggccgggauaucgccgauaccacagacgccguuagagauccccagacacuggaaauccuggacaucaccccaugcagcuucggcggagugucugugaucaccccuggcaccaacaccagcaaucagguggcagugcuguaccagggcgugaacuguaccgaagugcccguggccauucacgccgaucagcugacaccuacauggcggguguacuccaccggcagcaauguguuucagaccagagccggcugucugaucggagccgagcacgugaacaauagcuacgagugcgacauccccaucggcgcuggcaucugugccagcuaccagacacagacaaacagccccagacgggcuagaagcguggccagccagagcaucauugccuacacaaugucucugggcgccgagaacagcguggccuacuccaacaacucuaucgcuauccccaccaacuucaccaucagcgugaccaccgagauccugccuguguccaugaccaagaccagcguggacugcaccauguacaucugcggcgauuccaccgagugcuccaaccugcugcugcaguacggcagcuucugcacccagcugaauagagcccugacagggaucgccguggaacaggacaagaacacccaagagguguucgcccaagugaagcaaaucuacaagaccccuccuaucaaggacuucggcggcuucaauuucagccagauucugcccgauccuagcaagcccagcaagcggagcuucaucgaggaccugcuguucaacaaagugacacuggccgacgccggcuucaucaagcaguauggcgauugucugggcgacauugccgccagggaucugauuugcgcccagaaguuuaacggacugacagugcugccuccucugcugaccgaugagaugaucgcccaguacacaucugcccugcuggccggcacaaucacaagcggcuggacauuuggagcuggcgccgcucugcagauccccuuugcuaugcagauggccuaccgguucaacggcaucggagugacccagaaugugcuguacgagaaccagaagcugaucgccaaccaguucaacagcgccaucggcaagauccaggacagccugagcagcacagcaagcgcccugggaaagcugcaggacguggucaaccagaaugcccaggcacugaacacccuggucaagcagcuguccuccaacuucggcgccaucagcucugugcugaacgauauccugagcagacuggacccuccugaggccgaggugcagaucgacagacugaucacaggcagacugcagagccuccagacauacgugacccagcagcugaucagagccgccgagauuagagccucugccaaucuggccgccaccaagaugucugagugugugcugggccagagcaagagaguggacuuuugcggcaagggcuaccaccugaugagcuucccucagucugccccucacggcgugguguuucugcacgugacauaugugcccgcucaagagaagaauuucaccaccgcuccagccaucugccacgacggcaaagcccacuuuccuagagaaggcguguucguguccaacggcacccauugguucgugacacagcggaacuucuacgagccccagaucaucaccaccgacaacaccuucgugucuggcaacugcgacguugugaucggcauugugaacaauaccguguacgacccucugcagcccgagcuggacagcuucaaagaggaacuggacaaguacuuuaagaaccacacaagccccgacguggaccugggcgauaucagcggaaucaaugccagcgucgugaacauccagaaagagaucgaccggcugaacgagguggccaagaaucugaacgagagccugaucgaccugcaagaacuggggaaguacgagcaguacaucaaguggcccugguacaucuggcugggcuuuaucgccggacugauugccaucgugauggucacaaucaugcuguguugcaugaccagcugcuguagcugccugaagggcuguuguagcuguggcagcugcugcaaguucgacgaggacgauucugagcccgugcugaagggcgugaaacugcacuacaccugaggacuaguuauaagacugacuagcccgaugggccucccaacgggcccuccuccccuccuugcaccgagauuaauagaucucaaaggcucuuuucagagccaccaaaaaaaaaaaaaaaaaaaaaaaaaaaaaaaaaaaaaaaaaaaaaaaaaaaaaaaaaaaaaaaaaaaaaaaaaaaaaaaaaaaaaaaaaaaaaaaaaaaaa

SEQ ID NO: 24483 - RNA, 4032 nt, Artificial Sequence
  SARS-CoV-2/Wuhan/WIV05/2019__EPI_ISL_402128 spike protein mRNA gc mod (1-1273)(K986P_V987P_K986P_V987P_L18F_D80A_D215G_L242del_A243del_ L244del_R246I_K417N_E484K_N501Y_D614G_A701V)
aggagaaagcuuaccauguucguguuucuggugcugcugccccugguguccagccagugugugaacuucaccaccagaacacagcugccuccagccuacaccaacagcuucaccagaggcguguacuaccccgacaagguguucagauccagcgugcugcacucuacccaggaccuguuccugccuuucuucagcaacgugaccugguuccacgccauccacguguccggcaccaauggcaccaagagauucgccaaccccgugcugcccuucaacgacgggguguacuuugccagcaccgagaaguccaacaucaucagaggcuggaucuucggcaccacacuggacagcaagacccagagccugcugaucgugaacaacgccaccaacguggucaucaaagugugcgaguuccaguucugcaacgaccccuuccugggcgucuacuaccacaagaacaacaagagcuggauggaaagcgaguuccggguguacagcagcgccaacaacugcaccuucgaguacgugucccagccuuuccugauggaccuggaaggcaagcagggcaacuucaagaaccugcgcgaguucguguucaagaacaucgacggcuacuucaaaaucuacagcaagcacaccccuaucaaccucgugcggggccugccucagggcuucucugcucuggaaccccugguggaucugcccaucggcaucaacaucacccgguuucagacacugcacaucagcuaccugacaccuggcgauagcagcagcggauggacagcuggugccgccgcuuacuaugugggcuaccugcagccuagaaccuuccugcugaaguacaacgagaacggcaccaucaccgacgccguggauugugcucuggauccucugagcgagacaaagugcacccugaaguccuucaccguggaaaagggcaucuaccagaccagcaacuuccgggugcagcccaccgaauccaucgugcgguuccccaauaucaccaaucugugccccuucggcgagguguucaaugccaccagauucgccucuguguacgccuggaaccggaagcggaucagcaauugcguggccgacuacuccgugcuguacaacuccgccagcuucagcaccuucaagugcuacggcguguccccuaccaagcugaacgaccugugcuucacaaacguguacgccgacagcuucgugauccggggagaugaagugcggcagauugccccuggacagacaggcaacaucgccgacuacaacuacaagcugcccgacgacuucaccggcugugugauugccuggaacagcaacaaccuggacuccaaagucggcggcaacuacaauuaccuguaccggcuguuccggaaguccaaucugaagcccuucgagcgggacaucagcaccgaaaucuaucaggccggcagcaccccuugcaacggcgugaagggcuucaacugcuacuucccacugcaguccuacggcuuucagcccacauacggcgugggcuaucagcccuacagagugguggugcugagcuucgaacugcugcaugcuccugccacagugugcggcccuaagaaaagcaccaaucucgugaagaacaaaugcgugaacuucaacuucaacggccugaccggcaccggcgugcugacagagagcaacaagaaguuccugccauuccagcaguuuggccgggauaucgccgauaccacagacgccguuagagauccccagacacuggaaauccuggacaucaccccaugcagcuucggcggagugucugugaucaccccuggcaccaacaccagcaaucagguggcagugcuguaccagggcgugaacuguaccgaagugcccguggccauucacgccgaucagcugacaccuacauggcggguguacuccaccggcagcaauguguuucagaccagagccggcugucugaucggagccgagcacgugaacaauagcuacgagugcgacauccccaucggcgcuggcaucugugccagcuaccagacacagacaaacagccccagacgggcuagaagcguggccagccagagcaucauugccuacacaaugucucugggcguggagaacagcguggccuacuccaacaacucuaucgcuauccccaccaacuucaccaucagcgugaccaccgagauccugccuguguccaugaccaagaccagcguggacugcaccauguacaucugcggcgauuccaccgagugcuccaaccugcugcugcaguacggcagcuucugcacccagcugaauagagcccugacagggaucgccguggaacaggacaagaacacccaagagguguucgcccaagugaagcaaaucuacaagaccccuccuaucaaggacuucggcggcuucaauuucagccagauucugcccgauccuagcaagcccagcaagcggagcuucaucgaggaccugcuguucaacaaagugacacuggccgacgccggcuucaucaagcaguauggcgauugucugggcgacauugccgccagggaucugauuugcgcccagaaguuuaacggacugacagugcugccuccucugcugaccgaugagaugaucgcccaguacacaucugcccugcuggccggcacaaucacaagcggcuggacauuuggagcuggcgccgcucugcagauccccuuugcuaugcagauggccuaccgguucaacggcaucggagugacccagaaugugcuguacgagaaccagaagcugaucgccaaccaguucaacagcgccaucggcaagauccaggacagccugagcagcacagcaagcgcccugggaaagcugcaggacguggucaaccagaaugcccaggcacugaacacccuggucaagcagcuguccuccaacuucggcgccaucagcucugugcugaacgauauccugagcagacuggacccuccugaggccgaggugcagaucgacagacugaucacaggcagacugcagagccuccagacauacgugacccagcagcugaucagagccgccgagauuagagccucugccaaucuggccgccaccaagaugucugagugugugcugggccagagcaagagaguggacuuuugcggcaagggcuaccaccugaugagcuucccucagucugccccucacggcgugguguuucugcacgugacauaugugcccgcucaagagaagaauuucaccaccgcuccagccaucugccacgacggcaaagcccacuuuccuagagaaggcguguucguguccaacggcacccauugguucgugacacagcggaacuucuacgagccccagaucaucaccaccgacaacaccuucgugucuggcaacugcgacguugugaucggcauugugaacaauaccguguacgacccucugcagcccgagcuggacagcuucaaagaggaacuggacaaguacuuuaagaaccacacaagccccgacguggaccugggcgauaucagcggaaucaaugccagcgucgugaacauccagaaagagaucgaccggcugaacgagguggccaagaaucugaacgagagccugaucgaccugcaagaacuggggaaguacgagcaguacaucaaguggcccugguacaucuggcugggcuuuaucgccggacugauugccaucgugauggucacaaucaugcuguguugcaugaccagcugcuguagcugccugaagggcuguuguagcuguggcagcugcugcaaguucgacgaggacgauucugagcccgugcugaagggcgugaaacugcacuacaccugaggacuaguuauaagacugacuagcccgaugggccucccaacgggcccuccuccccuccuugcaccgagauuaauagaucucaaaggcucuuuucagagccaccaaaaaaaaaaaaaaaaaaaaaaaaaaaaaaaaaaaaaaaaaaaaaaaaaaaaaaaaaaaaaaaaaaaaaaaaaaaaaaaaaaaaaaaaaaaaaaaaaaaaa

SEQ ID NO: 24484 - RNA, 4041 nt, Artificial Sequence
  SARS-CoV-2/Wuhan/WIV05/2019__EPI_ISL_402128 spike protein mRNA gc mod (1-1273)(K986P_V987P_K986P_V987P_E484K_D614G)
aggagaaagcuuaccauguucguguuucuggugcugcugccccugguguccagccagugugugaaccugaccaccagaacacagcugccuccagccuacaccaacagcuucaccagaggcguguacuaccccgacaagguguucagauccagcgugcugcacucuacccaggaccuguuccugccuuucuucagcaacgugaccugguuccacgccauccacguguccggcaccaauggcaccaagagauucgacaaccccgugcugcccuucaacgacgggguguacuuugccagcaccgagaaguccaacaucaucagaggcuggaucuucggcaccacacuggacagcaagacccagagccugcugaucgugaacaacgccaccaacguggucaucaaagugugcgaguuccaguucugcaacgaccccuuccugggcgucuacuaccacaagaacaacaagagcuggauggaaagcgaguuccggguguacagcagcgccaacaacugcaccuucgaguacgugucccagccuuuccugauggaccuggaaggcaagcagggcaacuucaagaaccugcgcgaguucguguucaagaacaucgacggcuacuucaaaaucuacagcaagcacaccccuaucaaccucgugcgggaucugccucagggcuucucugcucuggaaccccugguggaucugcccaucggcaucaacaucacccgguuucagacacugcuggcccugcacagaagcuaccugacaccuggcgauagcagcagcggauggacagcuggugccgccgcuuacuaugugggcuaccugcagccuagaaccuuccugcugaaguacaacgagaacggcaccaucaccgacgccguggauugugcucuggauccucugagcgagacaaagugcacccugaaguccuucaccguggaaaagggcaucuaccagaccagcaacuuccgggugcagcccaccgaauccaucgugcgguuccccaauaucaccaaucugugccccuucggcgagguguucaaugccaccagauucgccucuguguacgccuggaaccggaagcggaucagcaauugcguggccgacuacuccgugcuguacaacuccgccagcuucagcaccuucaagugcuacggcguguccccuaccaagcugaacgaccugugcuucacaaacguguacgccgacagcuucgugauccggggagaugaagugcggcagauugccccuggacagacaggcaagaucgccgacuacaacuacaagcugcccgacgacuucaccggcugugugauugccuggaacagcaacaaccuggacuccaaagucggcggcaacuacaauuaccuguaccggcuguuccggaaguccaaucugaagcccuucgagcgggacaucagcaccgaaaucuaucaggccggcagcaccccuugcaacggcgugaagggcuucaacugcuacuucccacugcaguccuacggcuuucagcccacaaauggcgugggcuaucagcccuacagagugguggugcugagcuucgaacugcugcaugcuccugccacagugugcggcccuaagaaaagcaccaaucucgugaagaacaaaugcgugaacuucaacuucaacggccugaccggcaccggcgugcugacagagagcaacaagaaguuccugccauuccagcaguuuggccgggauaucgccgauaccacagacgccguuagagauccccagacacuggaaauccuggacaucaccccaugcagcuucggcggagugucugugaucaccccuggcaccaacaccagcaaucagguggcagugcuguaccagggcgugaacuguaccgaagugcccguggccauucacgccgaucagcugacaccuacauggcggguguacuccaccggcagcaauguguuucagaccagagccggcugucugaucggagccgagcacgugaacaauagcuacgagugcgacauccccaucggcgcuggcaucugugccagcuaccagacacagacaaacagccccagacgggcuagaagcguggccagccagagcaucauugccuacacaaugucucugggcgccgagaacagcguggccuacuccaacaacucuaucgcuauccccaccaacuucaccaucagcgugaccaccgagauccugccuguguccaugaccaagaccagcguggacugcaccauguacaucugcggcgauuccaccgagugcuccaaccugcugcugcaguacggcagcuucugcacccagcugaauagagcccugacagggaucgccguggaacaggacaagaacacccaagagguguucgcccaagugaagcaaaucuacaagaccccuccuaucaaggacuucggcggcuucaauuucagccagauucugcccgauccuagcaagcccagcaagcggagcuucaucgaggaccugcuguucaacaaagugacacuggccgacgccggcuucaucaagcaguauggcgauugucugggcgacauugccgccagggaucugauuugcgcccagaaguuuaacggacugacagugcugccuccucugcugaccgaugagaugaucgcccaguacacaucugcccugcuggccggcacaaucacaagcggcuggacauuuggagcuggcgccgcucugcagauccccuuugcuaugcagauggccuaccgguucaacggcaucggagugacccagaaugugcuguacgagaaccagaagcugaucgccaaccaguucaacagcgccaucggcaagauccaggacagccugagcagcacagcaagcgcccugggaaagcugcaggacguggucaaccagaaugcccaggcacugaacacccuggucaagcagcuguccuccaacuucggcgccaucagcucugugcugaacgauauccugagcagacuggacccuccugaggccgaggugcagaucgacagacugaucacaggcagacugcagagccuccagacauacgugacccagcagcugaucagagccgccgagauuagagccucugccaaucuggccgccaccaagaugucugagugugugcugggccagagcaagagaguggacuuuugcggcaagggcuaccaccugaugagcuucccucagucugccccucacggcgugguguuucugcacgugacauaugugcccgcucaagagaagaauuucaccaccgcuccagccaucugccacgacggcaaagcccacuuuccuagagaaggcguguucguguccaacggcacccauugguucgugacacagcggaacuucuacgagccccagaucaucaccaccgacaacaccuucgugucuggcaacugcgacguugugaucggcauugugaacaauaccguguacgacccucugcagcccgagcuggacagcuucaaagaggaacuggacaaguacuuuaagaaccacacaagccccgacguggaccugggcgauaucagcggaaucaaugccagcgucgugaacauccagaaagagaucgaccggcugaacgagguggccaagaaucugaacgagagccugaucgaccugcaagaacuggggaaguacgagcaguacaucaaguggcccugguacaucuggcugggcuuuaucgccggacugauugccaucgugauggucacaaucaugcuguguugcaugaccagcugcuguagcugccugaagggcuguuguagcuguggcagcugcugcaaguucgacgaggacgauucugagcccgugcugaagggcgugaaacugcacuacaccugaggacuaguuauaagacugacuagcccgaugggccucccaacgggcccuccuccccuccuugcaccgagauuaauagaucucaaaggcucuuuucagagccaccaaaaaaaaaaaaaaaaaaaaaaaaaaaaaaaaaaaaaaaaaaaaaaaaaaaaaaaaaaaaaaaaaaaaaaaaaaaaaaaaaaaaaaaaaaaaaaaaaaaaa

SEQ ID NO: 24485 - RNA, 4041 nt, Artificial Sequence
  SARS-CoV-2/Wuhan/WIV05/2019__EPI_ISL_402128 spike protein mRNA gc mod (1-1273)(K986P_V987P_K986P_V987P_L18F_T20N_P26S_D138Y_R190S_K417T _E484K_N501Y_D614G_H655Y_T1027I)
aggagaaagcuuaccauguucguguuucuggugcugcugccccugguguccagccagugugugaacuucaccaacagaacacagcugccuagcgccuacaccaacagcuucaccagaggcguguacuaccccgacaagguguucagauccagcgugcugcacucuacccaggaccuguuccugccuuucuucagcaacgugaccugguuccacgccauccacguguccggcaccaauggcaccaagagauucgacaaccccgugcugcccuucaacgacgggguguacuuugccagcaccgagaaguccaacaucaucagaggcuggaucuucggcaccacacuggacagcaagacccagagccugcugaucgugaacaacgccaccaacguggucaucaaagugugcgaguuccaguucugcaacuaccccuuccugggcgucuacuaccacaagaacaacaagagcuggauggaaagcgaguuccggguguacagcagcgccaacaacugcaccuucgaguacgugucccagccuuuccugauggaccuggaaggcaagcagggcaacuucaagaaccugagcgaguucguguucaagaacaucgacggcuacuucaaaaucuacagcaagcacaccccuaucaaccucgugcgggaucugccucagggcuucucugcucuggaaccccugguggaucugcccaucggcaucaacaucacccgguuucagacacugcuggcccugcacagaagcuaccugacaccuggcgauagcagcagcggauggacagcuggugccgccgcuuacuaugugggcuaccugcagccuagaaccuuccugcugaaguacaacgagaacggcaccaucaccgacgccguggauugugcucuggauccucugagcgagacaaagugcacccugaaguccuucaccguggaaaagggcaucuaccagaccagcaacuuccgggugcagcccaccgaauccaucgugcgguuccccaauaucaccaaucugugccccuucggcgagguguucaaugccaccagauucgccucuguguacgccuggaaccggaagcggaucagcaauugcguggccgacuacuccgugcuguacaacuccgccagcuucagcaccuucaagugcuacggcguguccccuaccaagcugaacgaccugugcuucacaaacguguacgccgacagcuucgugauccggggagaugaagugcggcagauugccccuggacagacaggcaccaucgccgacuacaacuacaagcugcccgacgacuucaccggcugugugauugccuggaacagcaacaaccuggacuccaaagucggcggcaacuacaauuaccuguaccggcuguuccggaaguccaaucugaagcccuucgagcgggacaucagcaccgaaaucuaucaggccggcagcaccccuugcaacggcgugaagggcuucaacugcuacuucccacugcaguccuacggcuuucagcccacauacggcgugggcuaucagcccuacagagugguggugcugagcuucgaacugcugcaugcuccugccacagugugcggcccuaagaaaagcaccaaucucgugaagaacaaaugcgugaacuucaacuucaacggccugaccggcaccggcgugcugacagagagcaacaagaaguuccugccauuccagcaguuuggccgggauaucgccgauaccacagacgccguuagagauccccagacacuggaaauccuggacaucaccccaugcagcuucggcggagugucugugaucaccccuggcaccaacaccagcaaucagguggcagugcuguaccagggcgugaacuguaccgaagugcccguggccauucacgccgaucagcugacaccuacauggcggguguacuccaccggcagcaauguguuucagaccagagccggcugucugaucggagccgaguacgugaacaauagcuacgagugcgacauccccaucggcgcuggcaucugugccagcuaccagacacagacaaacagccccagacgggcuagaagcguggccagccagagcaucauugccuacacaaugucucugggcgccgagaacagcguggccuacuccaacaacucuaucgcuauccccaccaacuucaccaucagcgugaccaccgagauccugccuguguccaugaccaagaccagcguggacugcaccauguacaucugcggcgauuccaccgagugcuccaaccugcugcugcaguacggcagcuucugcacccagcugaauagagcccugacagggaucgccguggaacaggacaagaacacccaagagguguucgcccaagugaagcaaaucuacaagaccccuccuaucaaggacuucggcggcuucaauuucagccagauucugcccgauccuagcaagcccagcaagcggagcuucaucgaggaccugcuguucaacaaagugacacuggccgacgccggcuucaucaagcaguauggcgauugucugggcgacauugccgccagggaucugauuugcgcccagaaguuuaacggacugacagugcugccuccucugcugaccgaugagaugaucgcccaguacacaucugcccugcuggccggcacaaucacaagcggcuggacauuuggagcuggcgccgcucugcagauccccuuugcuaugcagauggccuaccgguucaacggcaucggagugacccagaaugugcuguacgagaaccagaagcugaucgccaaccaguucaacagcgccaucggcaagauccaggacagccugagcagcacagcaagcgcccugggaaagcugcaggacguggucaaccagaaugcccaggcacugaacacccuggucaagcagcuguccuccaacuucggcgccaucagcucugugcugaacgauauccugagcagacuggacccuccugaggccgaggugcagaucgacagacugaucacaggcagacugcagagccuccagacauacgugacccagcagcugaucagagccgccgagauuagagccucugccaaucuggccgccaucaagaugucugagugugugcugggccagagcaagagaguggacuuuugcggcaagggcuaccaccugaugagcuucccucagucugccccucacggcgugguguuucugcacgugacauaugugcccgcucaagagaagaauuucaccaccgcuccagccaucugccacgacggcaaagcccacuuuccuagagaaggcguguucguguccaacggcacccauugguucgugacacagcggaacuucuacgagccccagaucaucaccaccgacaacaccuucgugucuggcaacugcgacguugugaucggcauugugaacaauaccguguacgacccucugcagcccgagcuggacagcuucaaagaggaacuggacaaguacuuuaagaaccacacaagccccgacguggaccugggcgauaucagcggaaucaaugccagcgucgugaacauccagaaagagaucgaccggcugaacgagguggccaagaaucugaacgagagccugaucgaccugcaagaacuggggaaguacgagcaguacaucaaguggcccugguacaucuggcugggcuuuaucgccggacugauugccaucgugauggucacaaucaugcuguguugcaugaccagcugcuguagcugccugaagggcuguuguagcuguggcagcugcugcaaguucgacgaggacgauucugagcccgugcugaagggcgugaaacugcacuacaccugaggacuaguuauaagacugacuagcccgaugggccucccaacgggcccuccuccccuccuugcaccgagauuaauagaucucaaaggcucuuuucagagccaccaaaaaaaaaaaaaaaaaaaaaaaaaaaaaaaaaaaaaaaaaaaaaaaaaaaaaaaaaaaaaaaaaaaaaaaaaaaaaaaaaaaaaaaaaaaaaaaaaaaaa

SEQ ID NO: 24486 - RNA, 4041 nt, Artificial Sequence
  SARS-CoV-2/Wuhan/WIV05/2019__EPI_ISL_402128 spike protein mRNA gc mod (1-1273)(K986P_V987P_K986P_V987P_S13I_W152C_L452R_D614G)
aggagaaagcuuaccauguucguguuucuggugcugcugccccugguguccauccagugugugaaccugaccaccagaacacagcugccuccagccuacaccaacagcuucaccagaggcguguacuaccccgacaagguguucagauccagcgugcugcacucuacccaggaccuguuccugccuuucuucagcaacgugaccugguuccacgccauccacguguccggcaccaauggcaccaagagauucgacaaccccgugcugcccuucaacgacgggguguacuuugccagcaccgagaaguccaacaucaucagaggcuggaucuucggcaccacacuggacagcaagacccagagccugcugaucgugaacaacgccaccaacguggucaucaaagugugcgaguuccaguucugcaacgaccccuuccugggcgucuacuaccacaagaacaacaagagcugcauggaaagcgaguuccggguguacagcagcgccaacaacugcaccuucgaguacgugucccagccuuuccugauggaccuggaaggcaagcagggcaacuucaagaaccugcgcgaguucguguucaagaacaucgacggcuacuucaaaaucuacagcaagcacaccccuaucaaccucgugcgggaucugccucagggcuucucugcucuggaaccccugguggaucugcccaucggcaucaacaucacccgguuucagacacugcuggcccugcacagaagcuaccugacaccuggcgauagcagcagcggauggacagcuggugccgccgcuuacuaugugggcuaccugcagccuagaaccuuccugcugaaguacaacgagaacggcaccaucaccgacgccguggauugugcucuggauccucugagcgagacaaagugcacccugaaguccuucaccguggaaaagggcaucuaccagaccagcaacuuccgggugcagcccaccgaauccaucgugcgguuccccaauaucaccaaucugugccccuucggcgagguguucaaugccaccagauucgccucuguguacgccuggaaccggaagcggaucagcaauugcguggccgacuacuccgugcuguacaacuccgccagcuucagcaccuucaagugcuacggcguguccccuaccaagcugaacgaccugugcuucacaaacguguacgccgacagcuucgugauccggggagaugaagugcggcagauugccccuggacagacaggcaagaucgccgacuacaacuacaagcugcccgacgacuucaccggcugugugauugccuggaacagcaacaaccuggacuccaaagucggcggcaacuacaauuaccgcuaccggcuguuccggaaguccaaucugaagcccuucgagcgggacaucagcaccgaaaucuaucaggccggcagcaccccuugcaacggcguggaaggcuucaacugcuacuucccacugcaguccuacggcuuucagcccacaaauggcgugggcuaucagcccuacagagugguggugcugagcuucgaacugcugcaugcuccugccacagugugcggcccuaagaaaagcaccaaucucgugaagaacaaaugcgugaacuucaacuucaacggccugaccggcaccggcgugcugacagagagcaacaagaaguuccugccauuccagcaguuuggccgggauaucgccgauaccacagacgccguuagagauccccagacacuggaaauccuggacaucaccccaugcagcuucggcggagugucugugaucaccccuggcaccaacaccagcaaucagguggcagugcuguaccagggcgugaacuguaccgaagugcccguggccauucacgccgaucagcugacaccuacauggcggguguacuccaccggcagcaauguguuucagaccagagccggcugucugaucggagccgagcacgugaacaauagcuacgagugcgacauccccaucggcgcuggcaucugugccagcuaccagacacagacaaacagccccagacgggcuagaagcguggccagccagagcaucauugccuacacaaugucucugggcgccgagaacagcguggccuacuccaacaacucuaucgcuauccccaccaacuucaccaucagcgugaccaccgagauccugccuguguccaugaccaagaccagcguggacugcaccauguacaucugcggcgauuccaccgagugcuccaaccugcugcugcaguacggcagcuucugcacccagcugaauagagcccugacagggaucgccguggaacaggacaagaacacccaagagguguucgcccaagugaagcaaaucuacaagaccccuccuaucaaggacuucggcggcuucaauuucagccagauucugcccgauccuagcaagcccagcaagcggagcuucaucgaggaccugcuguucaacaaagugacacuggccgacgccggcuucaucaagcaguauggcgauugucugggcgacauugccgccagggaucugauuugcgcccagaaguuuaacggacugacagugcugccuccucugcugaccgaugagaugaucgcccaguacacaucugcccugcuggccggcacaaucacaagcggcuggacauuuggagcuggcgccgcucugcagauccccuuugcuaugcagauggccuaccgguucaacggcaucggagugacccagaaugugcuguacgagaaccagaagcugaucgccaaccaguucaacagcgccaucggcaagauccaggacagccugagcagcacagcaagcgcccugggaaagcugcaggacguggucaaccagaaugcccaggcacugaacacccuggucaagcagcuguccuccaacuucggcgccaucagcucugugcugaacgauauccugagcagacuggacccuccugaggccgaggugcagaucgacagacugaucacaggcagacugcagagccuccagacauacgugacccagcagcugaucagagccgccgagauuagagccucugccaaucuggccgccaccaagaugucugagugugugcugggccagagcaagagaguggacuuuugcggcaagggcuaccaccugaugagcuucccucagucugccccucacggcgugguguuucugcacgugacauaugugcccgcucaagagaagaauuucaccaccgcuccagccaucugccacgacggcaaagcccacuuuccuagagaaggcguguucguguccaacggcacccauugguucgugacacagcggaacuucuacgagccccagaucaucaccaccgacaacaccuucgugucuggcaacugcgacguugugaucggcauugugaacaauaccguguacgacccucugcagcccgagcuggacagcuucaaagaggaacuggacaaguacuuuaagaaccacacaagccccgacguggaccugggcgauaucagcggaaucaaugccagcgucgugaacauccagaaagagaucgaccggcugaacgagguggccaagaaucugaacgagagccugaucgaccugcaagaacuggggaaguacgagcaguacaucaaguggcccugguacaucuggcugggcuuuaucgccggacugauugccaucgugauggucacaaucaugcuguguugcaugaccagcugcuguagcugccugaagggcuguuguagcuguggcagcugcugcaaguucgacgaggacgauucugagcccgugcugaagggcgugaaacugcacuacaccugaggacuaguuauaagacugacuagcccgaugggccucccaacgggcccuccuccccuccuugcaccgagauuaauagaucucaaaggcucuuuucagagccaccaaaaaaaaaaaaaaaaaaaaaaaaaaaaaaaaaaaaaaaaaaaaaaaaaaaaaaaaaaaaaaaaaaaaaaaaaaaaaaaaaaaaaaaaaaaaaaaaaaaaa

SEQ ID NO: 24487 - RNA, 4041 nt, Artificial Sequence
  SARS-CoV-2/Wuhan/WIV05/2019__EPI_ISL_402128 spike protein mRNA gc mod (1-1273)(K986P_V987P)
aggagaaagcuuaccauguucguguuccuggugcugcugccucugguguccagccagugugugaaccugaccaccagaacacagcugccuccagccuacaccaacagcuuuaccagaggcguguacuaccccgacaagguguucagauccagcgugcugcacucuacccaggaccuguuccugccuuucuucagcaacgugaccugguuccacgccauccacguguccggcaccaauggcaccaagagauucgacaaccccgugcugcccuucaacgacgggguguacuuugccagcaccgagaaguccaacaucaucagaggcuggaucuucggcaccacacuggacagcaagacccagagccugcugaucgugaacaacgccaccaacguggucaucaaagugugcgaguuccaguucugcaacgaccccuuccugggcgucuacuaccacaagaacaacaagagcuggauggaaagcgaguuccggguguacagcagcgccaacaacugcaccuucgaguacgugucccagccuuuccugauggaccuggaaggcaagcagggcaacuucaagaaccugcgcgaguucguguuuaagaacaucgacggcuacuucaagaucuacagcaagcacaccccuaucaaccucgugcgggaucugccucagggcuucucugcucuggaaccccugguggaucugcccaucggcaucaacaucacccgguuucagacacugcuggcccugcacagaagcuaccugacaccuggcgauagcagcagcggauggacagcuggugccgccgcuuacuaugugggcuaccugcagccuagaaccuuccugcugaaguacaacgagaacggcaccaucaccgacgccguggauugugcucuggauccucugagcgagacaaagugcacccugaaguccuucaccguggaaaagggcaucuaccagaccagcaacuuccgggugcagcccaccgaauccaucgugcgguuccccaauaucaccaaucugugccccuucggcgagguguucaaugccaccagauucgccucuguguacgccuggaaccggaagcggaucagcaauugcguggccgacuacuccgugcuguacaacuccgccagcuucagcaccuucaagugcuacggcguguccccuaccaagcugaacgaccugugcuucacaaacguguacgccgacagcuucgugauccggggagaugaagugcggcagauugccccuggacagacaggcaagaucgccgacuacaacuacaagcugcccgacgacuucaccggcugugugauugccuggaacagcaacaaccuggacuccaaagucggcggcaacuacaauuaccuguaccggcuguuccggaaguccaaucugaagcccuucgagcgggacaucuccaccgagaucuaucaggccggcagcaccccuuguaacggcguggaaggcuucaacugcuacuucccacugcaguccuacggcuuucagcccacaaauggcgugggcuaucagcccuacagagugguggugcugagcuucgaacugcugcaugccccugccacagugugcggcccuaagaaaagcaccaaucucgugaagaacaaaugcgugaacuucaacuucaacggccugaccggcaccggcgugcugacagagagcaacaagaaguuccugccauuccagcaguuuggccgggauaucgccgauaccacagacgccguuagagauccccagacacuggaaauccuggacaucaccccuugcagcuucggcggagugucugugaucaccccuggcaccaacaccagcaaucagguggcagugcuguaccaggacgugaacuguaccgaagugcccguggccauucacgccgaucagcugacaccuacauggcggguguacuccaccggcagcaauguguuucagaccagagccggcugucugaucggagccgagcacgugaacaauagcuacgagugcgacauccccaucggcgcuggaaucugcgccagcuaccagacacagacaaacagcccucggagagccagaagcguggccagccagagcaucauugccuacacaaugucucugggcgccgagaacagcguggccuacuccaacaacucuaucgcuauccccaccaacuucaccaucagcgugaccacagagauccugccuguguccaugaccaagaccagcguggacugcaccauguacaucugcggcgauuccaccgagugcuccaaccugcugcugcaguacggcagcuucugcacccagcugaauagagcccugacagggaucgccguggaacaggacaagaacacccaagagguguucgcccaagugaagcagaucuacaagaccccuccuaucaaggacuucggcggcuucaauuucagccagauucugcccgauccuagcaagcccagcaagcggagcuucaucgaggaccugcuguucaacaaagugacacuggccgacgccggcuucaucaagcaguauggcgauugucugggcgacauugccgccagggaucugauuugcgcccagaaguuuaacggacugacagugcugccuccucugcugaccgaugagaugaucgcccaguacacaucugcccugcuggccggcacaaucacaagcggcuggacauuuggagcaggcgccgcucugcagauccccuuugcuaugcagauggccuaccgguucaacggcaucggagugacccagaaugugcuguacgagaaccagaagcugaucgccaaccaguucaacagcgccaucggcaagauccaggacagccugagcagcacagcaagcgcccugggaaagcugcaggacguggucaaccagaaugcccaggcacugaacacccuggucaagcagcuguccuccaacuucggcgccaucagcucugugcugaacgauauccugagcagacuggacccuccugaggccgaggugcagaucgacagacugaucacaggcagacugcagagccuccagacauacgugacccagcagcugaucagagccgccgagauuagagccucugccaaucuggccgccaccaagaugucugagugugugcugggccagagcaagagaguggacuuuugcggcaagggcuaccaccugaugagcuucccucagucugccccucacggcgugguguuucugcacgugacauaugugcccgcucaagagaagaauuucaccaccgcuccagccaucugccacgacggcaaagcccacuuuccuagagaaggcguguucguguccaacggcacccauugguucgugacacagcggaacuucuacgagccccagaucaucaccaccgacaacaccuucgugucuggcaacugcgacgucgugaucggcauugugaacaauaccguguacgacccucugcagcccgagcuggacagcuucaaagaggaacuggacaaguacuuuaagaaccacacaagccccgacguggaccugggcgauaucagcggaaucaaugccagcgucgugaacauccagaaagagaucgaccggcugaacgagguggccaagaaucugaacgagagccugaucgaccugcaagaacuggggaaguacgagcaguacaucaaguggcccugguacaucuggcugggcuuuaucgccggacugauugccaucgugauggucacaaucaugcuguguugcaugaccagcugcuguagcugccugaagggcuguuguagcuguggcagcugcugcaaguucgacgaggacgauucugagcccgugcugaagggcgugaaacugcacuacacaugaggacuaguuauaagacugacuagcccgaugggccucccaacgggcccuccuccccuccuugcaccgagauuaauagaucucaaaggcucuuuucagagccaccaaaaaaaaaaaaaaaaaaaaaaaaaaaaaaaaaaaaaaaaaaaaaaaaaaaaaaaaaaaaaaaaaaaaaaaaaaaaaaaaaaaaaaaaaaaaaaaaaaaaa

SEQ ID NO: 24488 - RNA, 4041 nt, Artificial Sequence
  SARS-CoV-2/Wuhan/WIV05/2019__EPI_ISL_402128 spike protein mRNA gc mod (1-1273)(K986P_V987P_ D614G)
aggagaaagcuuaccauguucguguuccuggugcugcugccucugguguccagccagugugugaaccugaccaccagaacacagcugccuccagccuacaccaacagcuuuaccagaggcguguacuaccccgacaagguguucagauccagcgugcugcacucuacccaggaccuguuccugccuuucuucagcaacgugaccugguuccacgccauccacguguccggcaccaauggcaccaagagauucgacaaccccgugcugcccuucaacgacgggguguacuuugccagcaccgagaaguccaacaucaucagaggcuggaucuucggcaccacacuggacagcaagacccagagccugcugaucgugaacaacgccaccaacguggucaucaaagugugcgaguuccaguucugcaacgaccccuuccugggcgucuacuaccacaagaacaacaagagcuggauggaaagcgaguuccggguguacagcagcgccaacaacugcaccuucgaguacgugucccagccuuuccugauggaccuggaaggcaagcagggcaacuucaagaaccugcgcgaguucguguuuaagaacaucgacggcuacuucaagaucuacagcaagcacaccccuaucaaccucgugcgggaucugccucagggcuucucugcucuggaaccccugguggaucugcccaucggcaucaacaucacccgguuucagacacugcuggcccugcacagaagcuaccugacaccuggcgauagcagcagcggauggacagcuggugccgccgcuuacuaugugggcuaccugcagccuagaaccuuccugcugaaguacaacgagaacggcaccaucaccgacgccguggauugugcucuggauccucugagcgagacaaagugcacccugaaguccuucaccguggaaaagggcaucuaccagaccagcaacuuccgggugcagcccaccgaauccaucgugcgguuccccaauaucaccaaucugugccccuucggcgagguguucaaugccaccagauucgccucuguguacgccuggaaccggaagcggaucagcaauugcguggccgacuacuccgugcuguacaacuccgccagcuucagcaccuucaagugcuacggcguguccccuaccaagcugaacgaccugugcuucacaaacguguacgccgacagcuucgugauccggggagaugaagugcggcagauugccccuggacagacaggcaagaucgccgacuacaacuacaagcugcccgacgacuucaccggcugugugauugccuggaacagcaacaaccuggacuccaaagucggcggcaacuacaauuaccuguaccggcuguuccggaaguccaaucugaagcccuucgagcgggacaucuccaccgagaucuaucaggccggcagcaccccuuguaacggcguggaaggcuucaacugcuacuucccacugcaguccuacggcuuucagcccacaaauggcgugggcuaucagcccuacagagugguggugcugagcuucgaacugcugcaugccccugccacagugugcggcccuaagaaaagcaccaaucucgugaagaacaaaugcgugaacuucaacuucaacggccugaccggcaccggcgugcugacagagagcaacaagaaguuccugccauuccagcaguuuggccgggauaucgccgauaccacagacgccguuagagauccccagacacuggaaauccuggacaucaccccuugcagcuucggcggagugucugugaucaccccuggcaccaacaccagcaaucagguggcagugcuguaccagggcgugaacuguaccgaagugcccguggccauucacgccgaucagcugacaccuacauggcggguguacuccaccggcagcaauguguuucagaccagagccggcugucugaucggagccgagcacgugaacaauagcuacgagugcgacauccccaucggcgcuggaaucugcgccagcuaccagacacagacaaacagcccucggagagccagaagcguggccagccagagcaucauugccuacacaaugucucugggcgccgagaacagcguggccuacuccaacaacucuaucgcuauccccaccaacuucaccaucagcgugaccacagagauccugccuguguccaugaccaagaccagcguggacugcaccauguacaucugcggcgauuccaccgagugcuccaaccugcugcugcaguacggcagcuucugcacccagcugaauagagcccugacagggaucgccguggaacaggacaagaacacccaagagguguucgcccaagugaagcagaucuacaagaccccuccuaucaaggacuucggcggcuucaauuucagccagauucugcccgauccuagcaagcccagcaagcggagcuucaucgaggaccugcuguucaacaaagugacacuggccgacgccggcuucaucaagcaguauggcgauugucugggcgacauugccgccagggaucugauuugcgcccagaaguuuaacggacugacagugcugccuccucugcugaccgaugagaugaucgcccaguacacaucugcccugcuggccggcacaaucacaagcggcuggacauuuggagcaggcgccgcucugcagauccccuuugcuaugcagauggccuaccgguucaacggcaucggagugacccagaaugugcuguacgagaaccagaagcugaucgccaaccaguucaacagcgccaucggcaagauccaggacagccugagcagcacagcaagcgcccugggaaagcugcaggacguggucaaccagaaugcccaggcacugaacacccuggucaagcagcuguccuccaacuucggcgccaucagcucugugcugaacgauauccugagcagacuggacccuccugaggccgaggugcagaucgacagacugaucacaggcagacugcagagccuccagacauacgugacccagcagcugaucagagccgccgagauuagagccucugccaaucuggccgccaccaagaugucugagugugugcugggccagagcaagagaguggacuuuugcggcaagggcuaccaccugaugagcuucccucagucugccccucacggcgugguguuucugcacgugacauaugugcccgcucaagagaagaauuucaccaccgcuccagccaucugccacgacggcaaagcccacuuuccuagagaaggcguguucguguccaacggcacccauugguucgugacacagcggaacuucuacgagccccagaucaucaccaccgacaacaccuucgugucuggcaacugcgacgucgugaucggcauugugaacaauaccguguacgacccucugcagcccgagcuggacagcuucaaagaggaacuggacaaguacuuuaagaaccacacaagccccgacguggaccugggcgauaucagcggaaucaaugccagcgucgugaacauccagaaagagaucgaccggcugaacgagguggccaagaaucugaacgagagccugaucgaccugcaagaacuggggaaguacgagcaguacaucaaguggcccugguacaucuggcugggcuuuaucgccggacugauugccaucgugauggucacaaucaugcuguguugcaugaccagcugcuguagcugccugaagggcuguuguagcuguggcagcugcugcaaguucgacgaggacgauucugagcccgugcugaagggcgugaaacugcacuacacaugaggacuaguuauaagacugacuagcccgaugggccucccaacgggcccuccuccccuccuugcaccgagauuaauagaucucaaaggcucuuuucagagccaccaaaaaaaaaaaaaaaaaaaaaaaaaaaaaaaaaaaaaaaaaaaaaaaaaaaaaaaaaaaaaaaaaaaaaaaaaaaaaaaaaaaaaaaaaaaaaaaaaaaaa

SEQ ID NO: 24489 - RNA, 4041 nt, Artificial Sequence
  SARS-CoV-2/Wuhan/WIV05/2019__EPI_ISL_402128 spike protein mRNA gc mod (1-1273)(K986P_V987P_A222V_D614G)
aggagaaagcuuaccauguucguguuccuggugcugcugccucugguguccagccagugugugaaccugaccaccagaacacagcugccuccagccuacaccaacagcuuuaccagaggcguguacuaccccgacaagguguucagauccagcgugcugcacucuacccaggaccuguuccugccuuucuucagcaacgugaccugguuccacgccauccacguguccggcaccaauggcaccaagagauucgacaaccccgugcugcccuucaacgacgggguguacuuugccagcaccgagaaguccaacaucaucagaggcuggaucuucggcaccacacuggacagcaagacccagagccugcugaucgugaacaacgccaccaacguggucaucaaagugugcgaguuccaguucugcaacgaccccuuccugggcgucuacuaccacaagaacaacaagagcuggauggaaagcgaguuccggguguacagcagcgccaacaacugcaccuucgaguacgugucccagccuuuccugauggaccuggaaggcaagcagggcaacuucaagaaccugcgcgaguucguguuuaagaacaucgacggcuacuucaagaucuacagcaagcacaccccuaucaaccucgugcgggaucugccucagggcuucucugugcuggaaccccugguggaucugcccaucggcaucaacaucacccgguuucagacacugcuggcccugcacagaagcuaccugacaccuggcgauagcagcagcggauggacagcuggugccgccgcuuacuaugugggcuaccugcagccuagaaccuuccugcugaaguacaacgagaacggcaccaucaccgacgccguggauugugcucuggauccucugagcgagacaaagugcacccugaaguccuucaccguggaaaagggcaucuaccagaccagcaacuuccgggugcagcccaccgaauccaucgugcgguuccccaauaucaccaaucugugccccuucggcgagguguucaaugccaccagauucgccucuguguacgccuggaaccggaagcggaucagcaauugcguggccgacuacuccgugcuguacaacuccgccagcuucagcaccuucaagugcuacggcguguccccuaccaagcugaacgaccugugcuucacaaacguguacgccgacagcuucgugauccggggagaugaagugcggcagauugccccuggacagacaggcaagaucgccgacuacaacuacaagcugcccgacgacuucaccggcugugugauugccuggaacagcaacaaccuggacuccaaagucggcggcaacuacaauuaccuguaccggcuguuccggaaguccaaucugaagcccuucgagcgggacaucuccaccgagaucuaucaggccggcagcaccccuuguaacggcguggaaggcuucaacugcuacuucccacugcaguccuacggcuuucagcccacaaauggcgugggcuaucagcccuacagagugguggugcugagcuucgaacugcugcaugccccugccacagugugcggcccuaagaaaagcaccaaucucgugaagaacaaaugcgugaacuucaacuucaacggccugaccggcaccggcgugcugacagagagcaacaagaaguuccugccauuccagcaguuuggccgggauaucgccgauaccacagacgccguuagagauccccagacacuggaaauccuggacaucaccccuugcagcuucggcggagugucugugaucaccccuggcaccaacaccagcaaucagguggcagugcuguaccagggcgugaacuguaccgaagugcccguggccauucacgccgaucagcugacaccuacauggcggguguacuccaccggcagcaauguguuucagaccagagccggcugucugaucggagccgagcacgugaacaauagcuacgagugcgacauccccaucggcgcuggaaucugcgccagcuaccagacacagacaaacagcccucggagagccagaagcguggccagccagagcaucauugccuacacaaugucucugggcgccgagaacagcguggccuacuccaacaacucuaucgcuauccccaccaacuucaccaucagcgugaccacagagauccugccuguguccaugaccaagaccagcguggacugcaccauguacaucugcggcgauuccaccgagugcuccaaccugcugcugcaguacggcagcuucugcacccagcugaauagagcccugacagggaucgccguggaacaggacaagaacacccaagagguguucgcccaagugaagcagaucuacaagaccccuccuaucaaggacuucggcggcuucaauuucagccagauucugcccgauccuagcaagcccagcaagcggagcuucaucgaggaccugcuguucaacaaagugacacuggccgacgccggcuucaucaagcaguauggcgauugucugggcgacauugccgccagggaucugauuugcgcccagaaguuuaacggacugacagugcugccuccucugcugaccgaugagaugaucgcccaguacacaucugcccugcuggccggcacaaucacaagcggcuggacauuuggagcaggcgccgcucugcagauccccuuugcuaugcagauggccuaccgguucaacggcaucggagugacccagaaugugcuguacgagaaccagaagcugaucgccaaccaguucaacagcgccaucggcaagauccaggacagccugagcagcacagcaagcgcccugggaaagcugcaggacguggucaaccagaaugcccaggcacugaacacccuggucaagcagcuguccuccaacuucggcgccaucagcucugugcugaacgauauccugagcagacuggacccuccugaggccgaggugcagaucgacagacugaucacaggcagacugcagagccuccagacauacgugacccagcagcugaucagagccgccgagauuagagccucugccaaucuggccgccaccaagaugucugagugugugcugggccagagcaagagaguggacuuuugcggcaagggcuaccaccugaugagcuucccucagucugccccucacggcgugguguuucugcacgugacauaugugcccgcucaagagaagaauuucaccaccgcuccagccaucugccacgacggcaaagcccacuuuccuagagaaggcguguucguguccaacggcacccauugguucgugacacagcggaacuucuacgagccccagaucaucaccaccgacaacaccuucgugucuggcaacugcgacgucgugaucggcauugugaacaauaccguguacgacccucugcagcccgagcuggacagcuucaaagaggaacuggacaaguacuuuaagaaccacacaagccccgacguggaccugggcgauaucagcggaaucaaugccagcgucgugaacauccagaaagagaucgaccggcugaacgagguggccaagaaucugaacgagagccugaucgaccugcaagaacuggggaaguacgagcaguacaucaaguggcccugguacaucuggcugggcuuuaucgccggacugauugccaucgugauggucacaaucaugcuguguugcaugaccagcugcuguagcugccugaagggcuguuguagcuguggcagcugcugcaaguucgacgaggacgauucugagcccgugcugaagggcgugaaacugcacuacacaugaggacuaguuauaagacugacuagcccgaugggccucccaacgggcccuccuccccuccuugcaccgagauuaauagaucucaaaggcucuuuucagagccaccaaaaaaaaaaaaaaaaaaaaaaaaaaaaaaaaaaaaaaaaaaaaaaaaaaaaaaaaaaaaaaaaaaaaaaaaaaaaaaaaaaaaaaaaaaaaaaaaaaaaa

SEQ ID NO: 24490 - RNA, 4041 nt, Artificial Sequence
  SARS-CoV-2/Wuhan/WIV05/2019__EPI_ISL_402128 spike protein mRNA gc mod (1-1273)(K986P_V987P_N439K_D614G)
aggagaaagcuuaccauguucguguuccuggugcugcugccucugguguccagccagugugugaaccugaccaccagaacacagcugccuccagccuacaccaacagcuuuaccagaggcguguacuaccccgacaagguguucagauccagcgugcugcacucuacccaggaccuguuccugccuuucuucagcaacgugaccugguuccacgccauccacguguccggcaccaauggcaccaagagauucgacaaccccgugcugcccuucaacgacgggguguacuuugccagcaccgagaaguccaacaucaucagaggcuggaucuucggcaccacacuggacagcaagacccagagccugcugaucgugaacaacgccaccaacguggucaucaaagugugcgaguuccaguucugcaacgaccccuuccugggcgucuacuaccacaagaacaacaagagcuggauggaaagcgaguuccggguguacagcagcgccaacaacugcaccuucgaguacgugucccagccuuuccugauggaccuggaaggcaagcagggcaacuucaagaaccugcgcgaguucguguuuaagaacaucgacggcuacuucaagaucuacagcaagcacaccccuaucaaccucgugcgggaucugccucagggcuucucugcucuggaaccccugguggaucugcccaucggcaucaacaucacccgguuucagacacugcuggcccugcacagaagcuaccugacaccuggcgauagcagcagcggauggacagcuggugccgccgcuuacuaugugggcuaccugcagccuagaaccuuccugcugaaguacaacgagaacggcaccaucaccgacgccguggauugugcucuggauccucugagcgagacaaagugcacccugaaguccuucaccguggaaaagggcaucuaccagaccagcaacuuccgggugcagcccaccgaauccaucgugcgguuccccaauaucaccaaucugugccccuucggcgagguguucaaugccaccagauucgccucuguguacgccuggaaccggaagcggaucagcaauugcguggccgacuacuccgugcuguacaacuccgccagcuucagcaccuucaagugcuacggcguguccccuaccaagcugaacgaccugugcuucacaaacguguacgccgacagcuucgugauccggggagaugaagugcggcagauugccccuggacagacaggcaagaucgccgacuacaacuacaagcugcccgacgacuucaccggcugugugauugccuggaacagcaagaaccuggacuccaaagucggcggcaacuacaauuaccuguaccggcuguuccggaaguccaaucugaagcccuucgagcgggacaucuccaccgagaucuaucaggccggcagcaccccuuguaacggcguggaaggcuucaacugcuacuucccacugcaguccuacggcuuucagcccacaaauggcgugggcuaucagcccuacagagugguggugcugagcuucgaacugcugcaugccccugccacagugugcggcccuaagaaaagcaccaaucucgugaagaacaaaugcgugaacuucaacuucaacggccugaccggcaccggcgugcugacagagagcaacaagaaguuccugccauuccagcaguuuggccgggauaucgccgauaccacagacgccguuagagauccccagacacuggaaauccuggacaucaccccuugcagcuucggcggagugucugugaucaccccuggcaccaacaccagcaaucagguggcagugcuguaccagggcgugaacuguaccgaagugcccguggccauucacgccgaucagcugacaccuacauggcggguguacuccaccggcagcaauguguuucagaccagagccggcugucugaucggagccgagcacgugaacaauagcuacgagugcgacauccccaucggcgcuggaaucugcgccagcuaccagacacagacaaacagcccucggagagccagaagcguggccagccagagcaucauugccuacacaaugucucugggcgccgagaacagcguggccuacuccaacaacucuaucgcuauccccaccaacuucaccaucagcgugaccacagagauccugccuguguccaugaccaagaccagcguggacugcaccauguacaucugcggcgauuccaccgagugcuccaaccugcugcugcaguacggcagcuucugcacccagcugaauagagcccugacagggaucgccguggaacaggacaagaacacccaagagguguucgcccaagugaagcagaucuacaagaccccuccuaucaaggacuucggcggcuucaauuucagccagauucugcccgauccuagcaagcccagcaagcggagcuucaucgaggaccugcuguucaacaaagugacacuggccgacgccggcuucaucaagcaguauggcgauugucugggcgacauugccgccagggaucugauuugcgcccagaaguuuaacggacugacagugcugccuccucugcugaccgaugagaugaucgcccaguacacaucugcccugcuggccggcacaaucacaagcggcuggacauuuggagcaggcgccgcucugcagauccccuuugcuaugcagauggccuaccgguucaacggcaucggagugacccagaaugugcuguacgagaaccagaagcugaucgccaaccaguucaacagcgccaucggcaagauccaggacagccugagcagcacagcaagcgcccugggaaagcugcaggacguggucaaccagaaugcccaggcacugaacacccuggucaagcagcuguccuccaacuucggcgccaucagcucugugcugaacgauauccugagcagacuggacccuccugaggccgaggugcagaucgacagacugaucacaggcagacugcagagccuccagacauacgugacccagcagcugaucagagccgccgagauuagagccucugccaaucuggccgccaccaagaugucugagugugugcugggccagagcaagagaguggacuuuugcggcaagggcuaccaccugaugagcuucccucagucugccccucacggcgugguguuucugcacgugacauaugugcccgcucaagagaagaauuucaccaccgcuccagccaucugccacgacggcaaagcccacuuuccuagagaaggcguguucguguccaacggcacccauugguucgugacacagcggaacuucuacgagccccagaucaucaccaccgacaacaccuucgugucuggcaacugcgacgucgugaucggcauugugaacaauaccguguacgacccucugcagcccgagcuggacagcuucaaagaggaacuggacaaguacuuuaagaaccacacaagccccgacguggaccugggcgauaucagcggaaucaaugccagcgucgugaacauccagaaagagaucgaccggcugaacgagguggccaagaaucugaacgagagccugaucgaccugcaagaacuggggaaguacgagcaguacaucaaguggcccugguacaucuggcugggcuuuaucgccggacugauugccaucgugauggucacaaucaugcuguguugcaugaccagcugcuguagcugccugaagggcuguuguagcuguggcagcugcugcaaguucgacgaggacgauucugagcccgugcugaagggcgugaaacugcacuacacaugaggacuaguuauaagacugacuagcccgaugggccucccaacgggcccuccuccccuccuugcaccgagauuaauagaucucaaaggcucuuuucagagccaccaaaaaaaaaaaaaaaaaaaaaaaaaaaaaaaaaaaaaaaaaaaaaaaaaaaaaaaaaaaaaaaaaaaaaaaaaaaaaaaaaaaaaaaaaaaaaaaaaaaaa

SEQ ID NO: 24491 - RNA, 4041 nt, Artificial Sequence
  SARS-CoV-2/Wuhan/WIV05/2019__EPI_ISL_402128 spike protein mRNA gc mod (1-1273)(K986P_V987P_S477N_D614G)
aggagaaagcuuaccauguucguguuccuggugcugcugccucugguguccagccagugugugaaccugaccaccagaacacagcugccuccagccuacaccaacagcuuuaccagaggcguguacuaccccgacaagguguucagauccagcgugcugcacucuacccaggaccuguuccugccuuucuucagcaacgugaccugguuccacgccauccacguguccggcaccaauggcaccaagagauucgacaaccccgugcugcccuucaacgacgggguguacuuugccagcaccgagaaguccaacaucaucagaggcuggaucuucggcaccacacuggacagcaagacccagagccugcugaucgugaacaacgccaccaacguggucaucaaagugugcgaguuccaguucugcaacgaccccuuccugggcgucuacuaccacaagaacaacaagagcuggauggaaagcgaguuccggguguacagcagcgccaacaacugcaccuucgaguacgugucccagccuuuccugauggaccuggaaggcaagcagggcaacuucaagaaccugcgcgaguucguguuuaagaacaucgacggcuacuucaagaucuacagcaagcacaccccuaucaaccucgugcgggaucugccucagggcuucucugcucuggaaccccugguggaucugcccaucggcaucaacaucacccgguuucagacacugcuggcccugcacagaagcuaccugacaccuggcgauagcagcagcggauggacagcuggugccgccgcuuacuaugugggcuaccugcagccuagaaccuuccugcugaaguacaacgagaacggcaccaucaccgacgccguggauugugcucuggauccucugagcgagacaaagugcacccugaaguccuucaccguggaaaagggcaucuaccagaccagcaacuuccgggugcagcccaccgaauccaucgugcgguuccccaauaucaccaaucugugccccuucggcgagguguucaaugccaccagauucgccucuguguacgccuggaaccggaagcggaucagcaauugcguggccgacuacuccgugcuguacaacuccgccagcuucagcaccuucaagugcuacggcguguccccuaccaagcugaacgaccugugcuucacaaacguguacgccgacagcuucgugauccggggagaugaagugcggcagauugccccuggacagacaggcaagaucgccgacuacaacuacaagcugcccgacgacuucaccggcugugugauugccuggaacagcaacaaccuggacuccaaagucggcggcaacuacaauuaccuguaccggcuguuccggaaguccaaucugaagcccuucgagcgggacaucuccaccgagaucuaucaggccggcaacaccccuuguaacggcguggaaggcuucaacugcuacuucccacugcaguccuacggcuuucagcccacaaauggcgugggcuaucagcccuacagagugguggugcugagcuucgaacugcugcaugccccugccacagugugcggcccuaagaaaagcaccaaucucgugaagaacaaaugcgugaacuucaacuucaacggccugaccggcaccggcgugcugacagagagcaacaagaaguuccugccauuccagcaguuuggccgggauaucgccgauaccacagacgccguuagagauccccagacacuggaaauccuggacaucaccccuugcagcuucggcggagugucugugaucaccccuggcaccaacaccagcaaucagguggcagugcuguaccagggcgugaacuguaccgaagugcccguggccauucacgccgaucagcugacaccuacauggcggguguacuccaccggcagcaauguguuucagaccagagccggcugucugaucggagccgagcacgugaacaauagcuacgagugcgacauccccaucggcgcuggaaucugcgccagcuaccagacacagacaaacagcccucggagagccagaagcguggccagccagagcaucauugccuacacaaugucucugggcgccgagaacagcguggccuacuccaacaacucuaucgcuauccccaccaacuucaccaucagcgugaccacagagauccugccuguguccaugaccaagaccagcguggacugcaccauguacaucugcggcgauuccaccgagugcuccaaccugcugcugcaguacggcagcuucugcacccagcugaauagagcccugacagggaucgccguggaacaggacaagaacacccaagagguguucgcccaagugaagcagaucuacaagaccccuccuaucaaggacuucggcggcuucaauuucagccagauucugcccgauccuagcaagcccagcaagcggagcuucaucgaggaccugcuguucaacaaagugacacuggccgacgccggcuucaucaagcaguauggcgauugucugggcgacauugccgccagggaucugauuugcgcccagaaguuuaacggacugacagugcugccuccucugcugaccgaugagaugaucgcccaguacacaucugcccugcuggccggcacaaucacaagcggcuggacauuuggagcaggcgccgcucugcagauccccuuugcuaugcagauggccuaccgguucaacggcaucggagugacccagaaugugcuguacgagaaccagaagcugaucgccaaccaguucaacagcgccaucggcaagauccaggacagccugagcagcacagcaagcgcccugggaaagcugcaggacguggucaaccagaaugcccaggcacugaacacccuggucaagcagcuguccuccaacuucggcgccaucagcucugugcugaacgauauccugagcagacuggacccuccugaggccgaggugcagaucgacagacugaucacaggcagacugcagagccuccagacauacgugacccagcagcugaucagagccgccgagauuagagccucugccaaucuggccgccaccaagaugucugagugugugcugggccagagcaagagaguggacuuuugcggcaagggcuaccaccugaugagcuucccucagucugccccucacggcgugguguuucugcacgugacauaugugcccgcucaagagaagaauuucaccaccgcuccagccaucugccacgacggcaaagcccacuuuccuagagaaggcguguucguguccaacggcacccauugguucgugacacagcggaacuucuacgagccccagaucaucaccaccgacaacaccuucgugucuggcaacugcgacgucgugaucggcauugugaacaauaccguguacgacccucugcagcccgagcuggacagcuucaaagaggaacuggacaaguacuuuaagaaccacacaagccccgacguggaccugggcgauaucagcggaaucaaugccagcgucgugaacauccagaaagagaucgaccggcugaacgagguggccaagaaucugaacgagagccugaucgaccugcaagaacuggggaaguacgagcaguacaucaaguggcccugguacaucuggcugggcuuuaucgccggacugauugccaucgugauggucacaaucaugcuguguugcaugaccagcugcuguagcugccugaagggcuguuguagcuguggcagcugcugcaaguucgacgaggacgauucugagcccgugcugaagggcgugaaacugcacuacacaugaggacuaguuauaagacugacuagcccgaugggccucccaacgggcccuccuccccuccuugcaccgagauuaauagaucucaaaggcucuuuucagagccaccaaaaaaaaaaaaaaaaaaaaaaaaaaaaaaaaaaaaaaaaaaaaaaaaaaaaaaaaaaaaaaaaaaaaaaaaaaaaaaaaaaaaaaaaaaaaaaaaaaaaa

SEQ ID NO: 24492 - RNA, 4041 nt, Artificial Sequence
  SARS-CoV-2/Wuhan/WIV05/2019__EPI_ISL_402128 spike protein mRNA gc mod (1-1273)(K986P_V987P_N501Y_D614G)
aggagaaagcuuaccauguucguguuccuggugcugcugccucugguguccagccagugugugaaccugaccaccagaacacagcugccuccagccuacaccaacagcuuuaccagaggcguguacuaccccgacaagguguucagauccagcgugcugcacucuacccaggaccuguuccugccuuucuucagcaacgugaccugguuccacgccauccacguguccggcaccaauggcaccaagagauucgacaaccccgugcugcccuucaacgacgggguguacuuugccagcaccgagaaguccaacaucaucagaggcuggaucuucggcaccacacuggacagcaagacccagagccugcugaucgugaacaacgccaccaacguggucaucaaagugugcgaguuccaguucugcaacgaccccuuccugggcgucuacuaccacaagaacaacaagagcuggauggaaagcgaguuccggguguacagcagcgccaacaacugcaccuucgaguacgugucccagccuuuccugauggaccuggaaggcaagcagggcaacuucaagaaccugcgcgaguucguguuuaagaacaucgacggcuacuucaagaucuacagcaagcacaccccuaucaaccucgugcgggaucugccucagggcuucucugcucuggaaccccugguggaucugcccaucggcaucaacaucacccgguuucagacacugcuggcccugcacagaagcuaccugacaccuggcgauagcagcagcggauggacagcuggugccgccgcuuacuaugugggcuaccugcagccuagaaccuuccugcugaaguacaacgagaacggcaccaucaccgacgccguggauugugcucuggauccucugagcgagacaaagugcacccugaaguccuucaccguggaaaagggcaucuaccagaccagcaacuuccgggugcagcccaccgaauccaucgugcgguuccccaauaucaccaaucugugccccuucggcgagguguucaaugccaccagauucgccucuguguacgccuggaaccggaagcggaucagcaauugcguggccgacuacuccgugcuguacaacuccgccagcuucagcaccuucaagugcuacggcguguccccuaccaagcugaacgaccugugcuucacaaacguguacgccgacagcuucgugauccggggagaugaagugcggcagauugccccuggacagacaggcaagaucgccgacuacaacuacaagcugcccgacgacuucaccggcugugugauugccuggaacagcaacaaccuggacuccaaagucggcggcaacuacaauuaccuguaccggcuguuccggaaguccaaucugaagcccuucgagcgggacaucuccaccgagaucuaucaggccggcagcaccccuuguaacggcguggaaggcuucaacugcuacuucccacugcaguccuacggcuuucagcccacauacggcgugggcuaucagcccuacagagugguggugcugagcuucgaacugcugcaugccccugccacagugugcggcccuaagaaaagcaccaaucucgugaagaacaaaugcgugaacuucaacuucaacggccugaccggcaccggcgugcugacagagagcaacaagaaguuccugccauuccagcaguuuggccgggauaucgccgauaccacagacgccguuagagauccccagacacuggaaauccuggacaucaccccuugcagcuucggcggagugucugugaucaccccuggcaccaacaccagcaaucagguggcagugcuguaccagggcgugaacuguaccgaagugcccguggccauucacgccgaucagcugacaccuacauggcggguguacuccaccggcagcaauguguuucagaccagagccggcugucugaucggagccgagcacgugaacaauagcuacgagugcgacauccccaucggcgcuggaaucugcgccagcuaccagacacagacaaacagcccucggagagccagaagcguggccagccagagcaucauugccuacacaaugucucugggcgccgagaacagcguggccuacuccaacaacucuaucgcuauccccaccaacuucaccaucagcgugaccacagagauccugccuguguccaugaccaagaccagcguggacugcaccauguacaucugcggcgauuccaccgagugcuccaaccugcugcugcaguacggcagcuucugcacccagcugaauagagcccugacagggaucgccguggaacaggacaagaacacccaagagguguucgcccaagugaagcagaucuacaagaccccuccuaucaaggacuucggcggcuucaauuucagccagauucugcccgauccuagcaagcccagcaagcggagcuucaucgaggaccugcuguucaacaaagugacacuggccgacgccggcuucaucaagcaguauggcgauugucugggcgacauugccgccagggaucugauuugcgcccagaaguuuaacggacugacagugcugccuccucugcugaccgaugagaugaucgcccaguacacaucugcccugcuggccggcacaaucacaagcggcuggacauuuggagcaggcgccgcucugcagauccccuuugcuaugcagauggccuaccgguucaacggcaucggagugacccagaaugugcuguacgagaaccagaagcugaucgccaaccaguucaacagcgccaucggcaagauccaggacagccugagcagcacagcaagcgcccugggaaagcugcaggacguggucaaccagaaugcccaggcacugaacacccuggucaagcagcuguccuccaacuucggcgccaucagcucugugcugaacgauauccugagcagacuggacccuccugaggccgaggugcagaucgacagacugaucacaggcagacugcagagccuccagacauacgugacccagcagcugaucagagccgccgagauuagagccucugccaaucuggccgccaccaagaugucugagugugugcugggccagagcaagagaguggacuuuugcggcaagggcuaccaccugaugagcuucccucagucugccccucacggcgugguguuucugcacgugacauaugugcccgcucaagagaagaauuucaccaccgcuccagccaucugccacgacggcaaagcccacuuuccuagagaaggcguguucguguccaacggcacccauugguucgugacacagcggaacuucuacgagccccagaucaucaccaccgacaacaccuucgugucuggcaacugcgacgucgugaucggcauugugaacaauaccguguacgacccucugcagcccgagcuggacagcuucaaagaggaacuggacaaguacuuuaagaaccacacaagccccgacguggaccugggcgauaucagcggaaucaaugccagcgucgugaacauccagaaagagaucgaccggcugaacgagguggccaagaaucugaacgagagccugaucgaccugcaagaacuggggaaguacgagcaguacaucaaguggcccugguacaucuggcugggcuuuaucgccggacugauugccaucgugauggucacaaucaugcuguguugcaugaccagcugcuguagcugccugaagggcuguuguagcuguggcagcugcugcaaguucgacgaggacgauucugagcccgugcugaagggcgugaaacugcacuacacaugaggacuaguuauaagacugacuagcccgaugggccucccaacgggcccuccuccccuccuugcaccgagauuaauagaucucaaaggcucuuuucagagccaccaaaaaaaaaaaaaaaaaaaaaaaaaaaaaaaaaaaaaaaaaaaaaaaaaaaaaaaaaaaaaaaaaaaaaaaaaaaaaaaaaaaaaaaaaaaaaaaaaaaaa

SEQ ID NO: 24493 - RNA, 4035 nt, Artificial Sequence
  SARS-CoV-2/Wuhan/WIV05/2019__EPI_ISL_402128 spike protein mRNA gc mod (1-1273)(K986P_V987P_H69del_V70del_D614G)
aggagaaagcuuaccauguucguguuccuggugcugcugccucugguguccagccagugugugaaccugaccaccagaacacagcugccuccagccuacaccaacagcuuuaccagaggcguguacuaccccgacaagguguucagauccagcgugcugcacucuacccaggaccuguuccugccuuucuucagcaacgugaccugguuccacgccaucuccggcaccaauggcaccaagagauucgacaaccccgugcugcccuucaacgacgggguguacuuugccagcaccgagaaguccaacaucaucagaggcuggaucuucggcaccacacuggacagcaagacccagagccugcugaucgugaacaacgccaccaacguggucaucaaagugugcgaguuccaguucugcaacgaccccuuccugggcgucuacuaccacaagaacaacaagagcuggauggaaagcgaguuccggguguacagcagcgccaacaacugcaccuucgaguacgugucccagccuuuccugauggaccuggaaggcaagcagggcaacuucaagaaccugcgcgaguucguguuuaagaacaucgacggcuacuucaagaucuacagcaagcacaccccuaucaaccucgugcgggaucugccucagggcuucucugcucuggaaccccugguggaucugcccaucggcaucaacaucacccgguuucagacacugcuggcccugcacagaagcuaccugacaccuggcgauagcagcagcggauggacagcuggugccgccgcuuacuaugugggcuaccugcagccuagaaccuuccugcugaaguacaacgagaacggcaccaucaccgacgccguggauugugcucuggauccucugagcgagacaaagugcacccugaaguccuucaccguggaaaagggcaucuaccagaccagcaacuuccgggugcagcccaccgaauccaucgugcgguuccccaauaucaccaaucugugccccuucggcgagguguucaaugccaccagauucgccucuguguacgccuggaaccggaagcggaucagcaauugcguggccgacuacuccgugcuguacaacuccgccagcuucagcaccuucaagugcuacggcguguccccuaccaagcugaacgaccugugcuucacaaacguguacgccgacagcuucgugauccggggagaugaagugcggcagauugccccuggacagacaggcaagaucgccgacuacaacuacaagcugcccgacgacuucaccggcugugugauugccuggaacagcaacaaccuggacuccaaagucggcggcaacuacaauuaccuguaccggcuguuccggaaguccaaucugaagcccuucgagcgggacaucuccaccgagaucuaucaggccggcagcaccccuuguaacggcguggaaggcuucaacugcuacuucccacugcaguccuacggcuuucagcccacaaauggcgugggcuaucagcccuacagagugguggugcugagcuucgaacugcugcaugccccugccacagugugcggcccuaagaaaagcaccaaucucgugaagaacaaaugcgugaacuucaacuucaacggccugaccggcaccggcgugcugacagagagcaacaagaaguuccugccauuccagcaguuuggccgggauaucgccgauaccacagacgccguuagagauccccagacacuggaaauccuggacaucaccccuugcagcuucggcggagugucugugaucaccccuggcaccaacaccagcaaucagguggcagugcuguaccagggcgugaacuguaccgaagugcccguggccauucacgccgaucagcugacaccuacauggcggguguacuccaccggcagcaauguguuucagaccagagccggcugucugaucggagccgagcacgugaacaauagcuacgagugcgacauccccaucggcgcuggaaucugcgccagcuaccagacacagacaaacagcccucggagagccagaagcguggccagccagagcaucauugccuacacaaugucucugggcgccgagaacagcguggccuacuccaacaacucuaucgcuauccccaccaacuucaccaucagcgugaccacagagauccugccuguguccaugaccaagaccagcguggacugcaccauguacaucugcggcgauuccaccgagugcuccaaccugcugcugcaguacggcagcuucugcacccagcugaauagagcccugacagggaucgccguggaacaggacaagaacacccaagagguguucgcccaagugaagcagaucuacaagaccccuccuaucaaggacuucggcggcuucaauuucagccagauucugcccgauccuagcaagcccagcaagcggagcuucaucgaggaccugcuguucaacaaagugacacuggccgacgccggcuucaucaagcaguauggcgauugucugggcgacauugccgccagggaucugauuugcgcccagaaguuuaacggacugacagugcugccuccucugcugaccgaugagaugaucgcccaguacacaucugcccugcuggccggcacaaucacaagcggcuggacauuuggagcaggcgccgcucugcagauccccuuugcuaugcagauggccuaccgguucaacggcaucggagugacccagaaugugcuguacgagaaccagaagcugaucgccaaccaguucaacagcgccaucggcaagauccaggacagccugagcagcacagcaagcgcccugggaaagcugcaggacguggucaaccagaaugcccaggcacugaacacccuggucaagcagcuguccuccaacuucggcgccaucagcucugugcugaacgauauccugagcagacuggacccuccugaggccgaggugcagaucgacagacugaucacaggcagacugcagagccuccagacauacgugacccagcagcugaucagagccgccgagauuagagccucugccaaucuggccgccaccaagaugucugagugugugcugggccagagcaagagaguggacuuuugcggcaagggcuaccaccugaugagcuucccucagucugccccucacggcgugguguuucugcacgugacauaugugcccgcucaagagaagaauuucaccaccgcuccagccaucugccacgacggcaaagcccacuuuccuagagaaggcguguucguguccaacggcacccauugguucgugacacagcggaacuucuacgagccccagaucaucaccaccgacaacaccuucgugucuggcaacugcgacgucgugaucggcauugugaacaauaccguguacgacccucugcagcccgagcuggacagcuucaaagaggaacuggacaaguacuuuaagaaccacacaagccccgacguggaccugggcgauaucagcggaaucaaugccagcgucgugaacauccagaaagagaucgaccggcugaacgagguggccaagaaucugaacgagagccugaucgaccugcaagaacuggggaaguacgagcaguacaucaaguggcccugguacaucuggcugggcuuuaucgccggacugauugccaucgugauggucacaaucaugcuguguugcaugaccagcugcuguagcugccugaagggcuguuguagcuguggcagcugcugcaaguucgacgaggacgauucugagcccgugcugaagggcgugaaacugcacuacacaugaggacuaguuauaagacugacuagcccgaugggccucccaacgggcccuccuccccuccuugcaccgagauuaauagaucucaaaggcucuuuucagagccaccaaaaaaaaaaaaaaaaaaaaaaaaaaaaaaaaaaaaaaaaaaaaaaaaaaaaaaaaaaaaaaaaaaaaaaaaaaaaaaaaaaaaaaaaaaaaaaaaaaaaa

SEQ ID NO: 24494 - RNA, 4041 nt, Artificial Sequence
  SARS-CoV-2/Wuhan/WIV05/2019__EPI_ISL_402128 spike protein mRNA gc mod (1-1273)(K986P_V987P_Y453F_D614G)
aggagaaagcuuaccauguucguguuccuggugcugcugccucugguguccagccagugugugaaccugaccaccagaacacagcugccuccagccuacaccaacagcuuuaccagaggcguguacuaccccgacaagguguucagauccagcgugcugcacucuacccaggaccuguuccugccuuucuucagcaacgugaccugguuccacgccauccacguguccggcaccaauggcaccaagagauucgacaaccccgugcugcccuucaacgacgggguguacuuugccagcaccgagaaguccaacaucaucagaggcuggaucuucggcaccacacuggacagcaagacccagagccugcugaucgugaacaacgccaccaacguggucaucaaagugugcgaguuccaguucugcaacgaccccuuccugggcgucuacuaccacaagaacaacaagagcuggauggaaagcgaguuccggguguacagcagcgccaacaacugcaccuucgaguacgugucccagccuuuccugauggaccuggaaggcaagcagggcaacuucaagaaccugcgcgaguucguguuuaagaacaucgacggcuacuucaagaucuacagcaagcacaccccuaucaaccucgugcgggaucugccucagggcuucucugcucuggaaccccugguggaucugcccaucggcaucaacaucacccgguuucagacacugcuggcccugcacagaagcuaccugacaccuggcgauagcagcagcggauggacagcuggugccgccgcuuacuaugugggcuaccugcagccuagaaccuuccugcugaaguacaacgagaacggcaccaucaccgacgccguggauugugcucuggauccucugagcgagacaaagugcacccugaaguccuucaccguggaaaagggcaucuaccagaccagcaacuuccgggugcagcccaccgaauccaucgugcgguuccccaauaucaccaaucugugccccuucggcgagguguucaaugccaccagauucgccucuguguacgccuggaaccggaagcggaucagcaauugcguggccgacuacuccgugcuguacaacuccgccagcuucagcaccuucaagugcuacggcguguccccuaccaagcugaacgaccugugcuucacaaacguguacgccgacagcuucgugauccggggagaugaagugcggcagauugccccuggacagacaggcaagaucgccgacuacaacuacaagcugcccgacgacuucaccggcugugugauugccuggaacagcaacaaccuggacuccaaagucggcggcaacuacaauuaccuguuccggcuguuccggaaguccaaucugaagcccuucgagcgggacaucuccaccgagaucuaucaggccggcagcaccccuuguaacggcguggaaggcuucaacugcuacuucccacugcaguccuacggcuuucagcccacaaauggcgugggcuaucagcccuacagagugguggugcugagcuucgaacugcugcaugccccugccacagugugcggcccuaagaaaagcaccaaucucgugaagaacaaaugcgugaacuucaacuucaacggccugaccggcaccggcgugcugacagagagcaacaagaaguuccugccauuccagcaguuuggccgggauaucgccgauaccacagacgccguuagagauccccagacacuggaaauccuggacaucaccccuugcagcuucggcggagugucugugaucaccccuggcaccaacaccagcaaucagguggcagugcuguaccagggcgugaacuguaccgaagugcccguggccauucacgccgaucagcugacaccuacauggcggguguacuccaccggcagcaauguguuucagaccagagccggcugucugaucggagccgagcacgugaacaauagcuacgagugcgacauccccaucggcgcuggaaucugcgccagcuaccagacacagacaaacagcccucggagagccagaagcguggccagccagagcaucauugccuacacaaugucucugggcgccgagaacagcguggccuacuccaacaacucuaucgcuauccccaccaacuucaccaucagcgugaccacagagauccugccuguguccaugaccaagaccagcguggacugcaccauguacaucugcggcgauuccaccgagugcuccaaccugcugcugcaguacggcagcuucugcacccagcugaauagagcccugacagggaucgccguggaacaggacaagaacacccaagagguguucgcccaagugaagcagaucuacaagaccccuccuaucaaggacuucggcggcuucaauuucagccagauucugcccgauccuagcaagcccagcaagcggagcuucaucgaggaccugcuguucaacaaagugacacuggccgacgccggcuucaucaagcaguauggcgauugucugggcgacauugccgccagggaucugauuugcgcccagaaguuuaacggacugacagugcugccuccucugcugaccgaugagaugaucgcccaguacacaucugcccugcuggccggcacaaucacaagcggcuggacauuuggagcaggcgccgcucugcagauccccuuugcuaugcagauggccuaccgguucaacggcaucggagugacccagaaugugcuguacgagaaccagaagcugaucgccaaccaguucaacagcgccaucggcaagauccaggacagccugagcagcacagcaagcgcccugggaaagcugcaggacguggucaaccagaaugcccaggcacugaacacccuggucaagcagcuguccuccaacuucggcgccaucagcucugugcugaacgauauccugagcagacuggacccuccugaggccgaggugcagaucgacagacugaucacaggcagacugcagagccuccagacauacgugacccagcagcugaucagagccgccgagauuagagccucugccaaucuggccgccaccaagaugucugagugugugcugggccagagcaagagaguggacuuuugcggcaagggcuaccaccugaugagcuucccucagucugccccucacggcgugguguuucugcacgugacauaugugcccgcucaagagaagaauuucaccaccgcuccagccaucugccacgacggcaaagcccacuuuccuagagaaggcguguucguguccaacggcacccauugguucgugacacagcggaacuucuacgagccccagaucaucaccaccgacaacaccuucgugucuggcaacugcgacgucgugaucggcauugugaacaauaccguguacgacccucugcagcccgagcuggacagcuucaaagaggaacuggacaaguacuuuaagaaccacacaagccccgacguggaccugggcgauaucagcggaaucaaugccagcgucgugaacauccagaaagagaucgaccggcugaacgagguggccaagaaucugaacgagagccugaucgaccugcaagaacuggggaaguacgagcaguacaucaaguggcccugguacaucuggcugggcuuuaucgccggacugauugccaucgugauggucacaaucaugcuguguugcaugaccagcugcuguagcugccugaagggcuguuguagcuguggcagcugcugcaaguucgacgaggacgauucugagcccgugcugaagggcgugaaacugcacuacacaugaggacuaguuauaagacugacuagcccgaugggccucccaacgggcccuccuccccuccuugcaccgagauuaauagaucucaaaggcucuuuucagagccaccaaaaaaaaaaaaaaaaaaaaaaaaaaaaaaaaaaaaaaaaaaaaaaaaaaaaaaaaaaaaaaaaaaaaaaaaaaaaaaaaaaaaaaaaaaaaaaaaaaaaa

SEQ ID NO: 24495 - RNA, 4041 nt, Artificial Sequence
  SARS-CoV-2/Wuhan/WIV05/2019__EPI_ISL_402128 spike protein mRNA gc mod (1-1273)(K986P_V987P_D614G_I692V)
aggagaaagcuuaccauguucguguuccuggugcugcugccucugguguccagccagugugugaaccugaccaccagaacacagcugccuccagccuacaccaacagcuuuaccagaggcguguacuaccccgacaagguguucagauccagcgugcugcacucuacccaggaccuguuccugccuuucuucagcaacgugaccugguuccacgccauccacguguccggcaccaauggcaccaagagauucgacaaccccgugcugcccuucaacgacgggguguacuuugccagcaccgagaaguccaacaucaucagaggcuggaucuucggcaccacacuggacagcaagacccagagccugcugaucgugaacaacgccaccaacguggucaucaaagugugcgaguuccaguucugcaacgaccccuuccugggcgucuacuaccacaagaacaacaagagcuggauggaaagcgaguuccggguguacagcagcgccaacaacugcaccuucgaguacgugucccagccuuuccugauggaccuggaaggcaagcagggcaacuucaagaaccugcgcgaguucguguuuaagaacaucgacggcuacuucaagaucuacagcaagcacaccccuaucaaccucgugcgggaucugccucagggcuucucugcucuggaaccccugguggaucugcccaucggcaucaacaucacccgguuucagacacugcuggcccugcacagaagcuaccugacaccuggcgauagcagcagcggauggacagcuggugccgccgcuuacuaugugggcuaccugcagccuagaaccuuccugcugaaguacaacgagaacggcaccaucaccgacgccguggauugugcucuggauccucugagcgagacaaagugcacccugaaguccuucaccguggaaaagggcaucuaccagaccagcaacuuccgggugcagcccaccgaauccaucgugcgguuccccaauaucaccaaucugugccccuucggcgagguguucaaugccaccagauucgccucuguguacgccuggaaccggaagcggaucagcaauugcguggccgacuacuccgugcuguacaacuccgccagcuucagcaccuucaagugcuacggcguguccccuaccaagcugaacgaccugugcuucacaaacguguacgccgacagcuucgugauccggggagaugaagugcggcagauugccccuggacagacaggcaagaucgccgacuacaacuacaagcugcccgacgacuucaccggcugugugauugccuggaacagcaacaaccuggacuccaaagucggcggcaacuacaauuaccuguaccggcuguuccggaaguccaaucugaagcccuucgagcgggacaucuccaccgagaucuaucaggccggcagcaccccuuguaacggcguggaaggcuucaacugcuacuucccacugcaguccuacggcuuucagcccacaaauggcgugggcuaucagcccuacagagugguggugcugagcuucgaacugcugcaugccccugccacagugugcggcccuaagaaaagcaccaaucucgugaagaacaaaugcgugaacuucaacuucaacggccugaccggcaccggcgugcugacagagagcaacaagaaguuccugccauuccagcaguuuggccgggauaucgccgauaccacagacgccguuagagauccccagacacuggaaauccuggacaucaccccuugcagcuucggcggagugucugugaucaccccuggcaccaacaccagcaaucagguggcagugcuguaccagggcgugaacuguaccgaagugcccguggccauucacgccgaucagcugacaccuacauggcggguguacuccaccggcagcaauguguuucagaccagagccggcugucugaucggagccgagcacgugaacaauagcuacgagugcgacauccccaucggcgcuggaaucugcgccagcuaccagacacagacaaacagcccucggagagccagaagcguggccagccagagcgugauugccuacacaaugucucugggcgccgagaacagcguggccuacuccaacaacucuaucgcuauccccaccaacuucaccaucagcgugaccacagagauccugccuguguccaugaccaagaccagcguggacugcaccauguacaucugcggcgauuccaccgagugcuccaaccugcugcugcaguacggcagcuucugcacccagcugaauagagcccugacagggaucgccguggaacaggacaagaacacccaagagguguucgcccaagugaagcagaucuacaagaccccuccuaucaaggacuucggcggcuucaauuucagccagauucugcccgauccuagcaagcccagcaagcggagcuucaucgaggaccugcuguucaacaaagugacacuggccgacgccggcuucaucaagcaguauggcgauugucugggcgacauugccgccagggaucugauuugcgcccagaaguuuaacggacugacagugcugccuccucugcugaccgaugagaugaucgcccaguacacaucugcccugcuggccggcacaaucacaagcggcuggacauuuggagcaggcgccgcucugcagauccccuuugcuaugcagauggccuaccgguucaacggcaucggagugacccagaaugugcuguacgagaaccagaagcugaucgccaaccaguucaacagcgccaucggcaagauccaggacagccugagcagcacagcaagcgcccugggaaagcugcaggacguggucaaccagaaugcccaggcacugaacacccuggucaagcagcuguccuccaacuucggcgccaucagcucugugcugaacgauauccugagcagacuggacccuccugaggccgaggugcagaucgacagacugaucacaggcagacugcagagccuccagacauacgugacccagcagcugaucagagccgccgagauuagagccucugccaaucuggccgccaccaagaugucugagugugugcugggccagagcaagagaguggacuuuugcggcaagggcuaccaccugaugagcuucccucagucugccccucacggcgugguguuucugcacgugacauaugugcccgcucaagagaagaauuucaccaccgcuccagccaucugccacgacggcaaagcccacuuuccuagagaaggcguguucguguccaacggcacccauugguucgugacacagcggaacuucuacgagccccagaucaucaccaccgacaacaccuucgugucuggcaacugcgacgucgugaucggcauugugaacaauaccguguacgacccucugcagcccgagcuggacagcuucaaagaggaacuggacaaguacuuuaagaaccacacaagccccgacguggaccugggcgauaucagcggaaucaaugccagcgucgugaacauccagaaagagaucgaccggcugaacgagguggccaagaaucugaacgagagccugaucgaccugcaagaacuggggaaguacgagcaguacaucaaguggcccugguacaucuggcugggcuuuaucgccggacugauugccaucgugauggucacaaucaugcuguguugcaugaccagcugcuguagcugccugaagggcuguuguagcuguggcagcugcugcaaguucgacgaggacgauucugagcccgugcugaagggcgugaaacugcacuacacaugaggacuaguuauaagacugacuagcccgaugggccucccaacgggcccuccuccccuccuugcaccgagauuaauagaucucaaaggcucuuuucagagccaccaaaaaaaaaaaaaaaaaaaaaaaaaaaaaaaaaaaaaaaaaaaaaaaaaaaaaaaaaaaaaaaaaaaaaaaaaaaaaaaaaaaaaaaaaaaaaaaaaaaaa

SEQ ID NO: 24496 - RNA, 4041 nt, Artificial Sequence
  SARS-CoV-2/Wuhan/WIV05/2019__EPI_ISL_402128 spike protein mRNA gc mod (1-1273)(K986P_V987P_D614G_M1229I)
aggagaaagcuuaccauguucguguuccuggugcugcugccucugguguccagccagugugugaaccugaccaccagaacacagcugccuccagccuacaccaacagcuuuaccagaggcguguacuaccccgacaagguguucagauccagcgugcugcacucuacccaggaccuguuccugccuuucuucagcaacgugaccugguuccacgccauccacguguccggcaccaauggcaccaagagauucgacaaccccgugcugcccuucaacgacgggguguacuuugccagcaccgagaaguccaacaucaucagaggcuggaucuucggcaccacacuggacagcaagacccagagccugcugaucgugaacaacgccaccaacguggucaucaaagugugcgaguuccaguucugcaacgaccccuuccugggcgucuacuaccacaagaacaacaagagcuggauggaaagcgaguuccggguguacagcagcgccaacaacugcaccuucgaguacgugucccagccuuuccugauggaccuggaaggcaagcagggcaacuucaagaaccugcgcgaguucguguuuaagaacaucgacggcuacuucaagaucuacagcaagcacaccccuaucaaccucgugcgggaucugccucagggcuucucugcucuggaaccccugguggaucugcccaucggcaucaacaucacccgguuucagacacugcuggcccugcacagaagcuaccugacaccuggcgauagcagcagcggauggacagcuggugccgccgcuuacuaugugggcuaccugcagccuagaaccuuccugcugaaguacaacgagaacggcaccaucaccgacgccguggauugugcucuggauccucugagcgagacaaagugcacccugaaguccuucaccguggaaaagggcaucuaccagaccagcaacuuccgggugcagcccaccgaauccaucgugcgguuccccaauaucaccaaucugugccccuucggcgagguguucaaugccaccagauucgccucuguguacgccuggaaccggaagcggaucagcaauugcguggccgacuacuccgugcuguacaacuccgccagcuucagcaccuucaagugcuacggcguguccccuaccaagcugaacgaccugugcuucacaaacguguacgccgacagcuucgugauccggggagaugaagugcggcagauugccccuggacagacaggcaagaucgccgacuacaacuacaagcugcccgacgacuucaccggcugugugauugccuggaacagcaacaaccuggacuccaaagucggcggcaacuacaauuaccuguaccggcuguuccggaaguccaaucugaagcccuucgagcgggacaucuccaccgagaucuaucaggccggcagcaccccuuguaacggcguggaaggcuucaacugcuacuucccacugcaguccuacggcuuucagcccacaaauggcgugggcuaucagcccuacagagugguggugcugagcuucgaacugcugcaugccccugccacagugugcggcccuaagaaaagcaccaaucucgugaagaacaaaugcgugaacuucaacuucaacggccugaccggcaccggcgugcugacagagagcaacaagaaguuccugccauuccagcaguuuggccgggauaucgccgauaccacagacgccguuagagauccccagacacuggaaauccuggacaucaccccuugcagcuucggcggagugucugugaucaccccuggcaccaacaccagcaaucagguggcagugcuguaccagggcgugaacuguaccgaagugcccguggccauucacgccgaucagcugacaccuacauggcggguguacuccaccggcagcaauguguuucagaccagagccggcugucugaucggagccgagcacgugaacaauagcuacgagugcgacauccccaucggcgcuggaaucugcgccagcuaccagacacagacaaacagcccucggagagccagaagcguggccagccagagcaucauugccuacacaaugucucugggcgccgagaacagcguggccuacuccaacaacucuaucgcuauccccaccaacuucaccaucagcgugaccacagagauccugccuguguccaugaccaagaccagcguggacugcaccauguacaucugcggcgauuccaccgagugcuccaaccugcugcugcaguacggcagcuucugcacccagcugaauagagcccugacagggaucgccguggaacaggacaagaacacccaagagguguucgcccaagugaagcagaucuacaagaccccuccuaucaaggacuucggcggcuucaauuucagccagauucugcccgauccuagcaagcccagcaagcggagcuucaucgaggaccugcuguucaacaaagugacacuggccgacgccggcuucaucaagcaguauggcgauugucugggcgacauugccgccagggaucugauuugcgcccagaaguuuaacggacugacagugcugccuccucugcugaccgaugagaugaucgcccaguacacaucugcccugcuggccggcacaaucacaagcggcuggacauuuggagcaggcgccgcucugcagauccccuuugcuaugcagauggccuaccgguucaacggcaucggagugacccagaaugugcuguacgagaaccagaagcugaucgccaaccaguucaacagcgccaucggcaagauccaggacagccugagcagcacagcaagcgcccugggaaagcugcaggacguggucaaccagaaugcccaggcacugaacacccuggucaagcagcuguccuccaacuucggcgccaucagcucugugcugaacgauauccugagcagacuggacccuccugaggccgaggugcagaucgacagacugaucacaggcagacugcagagccuccagacauacgugacccagcagcugaucagagccgccgagauuagagccucugccaaucuggccgccaccaagaugucugagugugugcugggccagagcaagagaguggacuuuugcggcaagggcuaccaccugaugagcuucccucagucugccccucacggcgugguguuucugcacgugacauaugugcccgcucaagagaagaauuucaccaccgcuccagccaucugccacgacggcaaagcccacuuuccuagagaaggcguguucguguccaacggcacccauugguucgugacacagcggaacuucuacgagccccagaucaucaccaccgacaacaccuucgugucuggcaacugcgacgucgugaucggcauugugaacaauaccguguacgacccucugcagcccgagcuggacagcuucaaagaggaacuggacaaguacuuuaagaaccacacaagccccgacguggaccugggcgauaucagcggaaucaaugccagcgucgugaacauccagaaagagaucgaccggcugaacgagguggccaagaaucugaacgagagccugaucgaccugcaagaacuggggaaguacgagcaguacaucaaguggcccugguacaucuggcugggcuuuaucgccggacugauugccaucgugaucgucacaaucaugcuguguugcaugaccagcugcuguagcugccugaagggcuguuguagcuguggcagcugcugcaaguucgacgaggacgauucugagcccgugcugaagggcgugaaacugcacuacacaugaggacuaguuauaagacugacuagcccgaugggccucccaacgggcccuccuccccuccuugcaccgagauuaauagaucucaaaggcucuuuucagagccaccaaaaaaaaaaaaaaaaaaaaaaaaaaaaaaaaaaaaaaaaaaaaaaaaaaaaaaaaaaaaaaaaaaaaaaaaaaaaaaaaaaaaaaaaaaaaaaaaaaaaa

SEQ ID NO: 24497 - RNA, 4035 nt, Artificial Sequence
  SARS-CoV-2/Wuhan/WIV05/2019__EPI_ISL_402128 spike protein mRNA gc mod (1-1273)(K986P_V987P_H69del_V70del_A222V_Y453F_S477N_D614G_I692V)
aggagaaagcuuaccauguucguguuccuggugcugcugccucugguguccagccagugugugaaccugaccaccagaacacagcugccuccagccuacaccaacagcuuuaccagaggcguguacuaccccgacaagguguucagauccagcgugcugcacucuacccaggaccuguuccugccuuucuucagcaacgugaccugguuccacgccaucuccggcaccaauggcaccaagagauucgacaaccccgugcugcccuucaacgacgggguguacuuugccagcaccgagaaguccaacaucaucagaggcuggaucuucggcaccacacuggacagcaagacccagagccugcugaucgugaacaacgccaccaacguggucaucaaagugugcgaguuccaguucugcaacgaccccuuccugggcgucuacuaccacaagaacaacaagagcuggauggaaagcgaguuccggguguacagcagcgccaacaacugcaccuucgaguacgugucccagccuuuccugauggaccuggaaggcaagcagggcaacuucaagaaccugcgcgaguucguguuuaagaacaucgacggcuacuucaagaucuacagcaagcacaccccuaucaaccucgugcgggaucugccucagggcuucucugugcuggaaccccugguggaucugcccaucggcaucaacaucacccgguuucagacacugcuggcccugcacagaagcuaccugacaccuggcgauagcagcagcggauggacagcuggugccgccgcuuacuaugugggcuaccugcagccuagaaccuuccugcugaaguacaacgagaacggcaccaucaccgacgccguggauugugcucuggauccucugagcgagacaaagugcacccugaaguccuucaccguggaaaagggcaucuaccagaccagcaacuuccgggugcagcccaccgaauccaucgugcgguuccccaauaucaccaaucugugccccuucggcgagguguucaaugccaccagauucgccucuguguacgccuggaaccggaagcggaucagcaauugcguggccgacuacuccgugcuguacaacuccgccagcuucagcaccuucaagugcuacggcguguccccuaccaagcugaacgaccugugcuucacaaacguguacgccgacagcuucgugauccggggagaugaagugcggcagauugccccuggacagacaggcaagaucgccgacuacaacuacaagcugcccgacgacuucaccggcugugugauugccuggaacagcaacaaccuggacuccaaagucggcggcaacuacaauuaccuguuccggcuguuccggaaguccaaucugaagcccuucgagcgggacaucuccaccgagaucuaucaggccggcaacaccccuuguaacggcguggaaggcuucaacugcuacuucccacugcaguccuacggcuuucagcccacaaauggcgugggcuaucagcccuacagagugguggugcugagcuucgaacugcugcaugccccugccacagugugcggcccuaagaaaagcaccaaucucgugaagaacaaaugcgugaacuucaacuucaacggccugaccggcaccggcgugcugacagagagcaacaagaaguuccugccauuccagcaguuuggccgggauaucgccgauaccacagacgccguuagagauccccagacacuggaaauccuggacaucaccccuugcagcuucggcggagugucugugaucaccccuggcaccaacaccagcaaucagguggcagugcuguaccagggcgugaacuguaccgaagugcccguggccauucacgccgaucagcugacaccuacauggcggguguacuccaccggcagcaauguguuucagaccagagccggcugucugaucggagccgagcacgugaacaauagcuacgagugcgacauccccaucggcgcuggaaucugcgccagcuaccagacacagacaaacagcccucggagagccagaagcguggccagccagagcgugauugccuacacaaugucucugggcgccgagaacagcguggccuacuccaacaacucuaucgcuauccccaccaacuucaccaucagcgugaccacagagauccugccuguguccaugaccaagaccagcguggacugcaccauguacaucugcggcgauuccaccgagugcuccaaccugcugcugcaguacggcagcuucugcacccagcugaauagagcccugacagggaucgccguggaacaggacaagaacacccaagagguguucgcccaagugaagcagaucuacaagaccccuccuaucaaggacuucggcggcuucaauuucagccagauucugcccgauccuagcaagcccagcaagcggagcuucaucgaggaccugcuguucaacaaagugacacuggccgacgccggcuucaucaagcaguauggcgauugucugggcgacauugccgccagggaucugauuugcgcccagaaguuuaacggacugacagugcugccuccucugcugaccgaugagaugaucgcccaguacacaucugcccugcuggccggcacaaucacaagcggcuggacauuuggagcaggcgccgcucugcagauccccuuugcuaugcagauggccuaccgguucaacggcaucggagugacccagaaugugcuguacgagaaccagaagcugaucgccaaccaguucaacagcgccaucggcaagauccaggacagccugagcagcacagcaagcgcccugggaaagcugcaggacguggucaaccagaaugcccaggcacugaacacccuggucaagcagcuguccuccaacuucggcgccaucagcucugugcugaacgauauccugagcagacuggacccuccugaggccgaggugcagaucgacagacugaucacaggcagacugcagagccuccagacauacgugacccagcagcugaucagagccgccgagauuagagccucugccaaucuggccgccaccaagaugucugagugugugcugggccagagcaagagaguggacuuuugcggcaagggcuaccaccugaugagcuucccucagucugccccucacggcgugguguuucugcacgugacauaugugcccgcucaagagaagaauuucaccaccgcuccagccaucugccacgacggcaaagcccacuuuccuagagaaggcguguucguguccaacggcacccauugguucgugacacagcggaacuucuacgagccccagaucaucaccaccgacaacaccuucgugucuggcaacugcgacgucgugaucggcauugugaacaauaccguguacgacccucugcagcccgagcuggacagcuucaaagaggaacuggacaaguacuuuaagaaccacacaagccccgacguggaccugggcgauaucagcggaaucaaugccagcgucgugaacauccagaaagagaucgaccggcugaacgagguggccaagaaucugaacgagagccugaucgaccugcaagaacuggggaaguacgagcaguacaucaaguggcccugguacaucuggcugggcuuuaucgccggacugauugccaucgugauggucacaaucaugcuguguugcaugaccagcugcuguagcugccugaagggcuguuguagcuguggcagcugcugcaaguucgacgaggacgauucugagcccgugcugaagggcgugaaacugcacuacacaugaggacuaguuauaagacugacuagcccgaugggccucccaacgggcccuccuccccuccuugcaccgagauuaauagaucucaaaggcucuuuucagagccaccaaaaaaaaaaaaaaaaaaaaaaaaaaaaaaaaaaaaaaaaaaaaaaaaaaaaaaaaaaaaaaaaaaaaaaaaaaaaaaaaaaaaaaaaaaaaaaaaaaaaa

SEQ ID NO: 24498 - RNA, 4035 nt, Artificial Sequence
  SARS-CoV-2/Wuhan/WIV05/2019__EPI_ISL_402128 spike protein mRNA gc mod (1-1273)(K986P_V987P_H69del_V70del_Y453F_D614G_I692V_M1229I)
aggagaaagcuuaccauguucguguuccuggugcugcugccucugguguccagccagugugugaaccugaccaccagaacacagcugccuccagccuacaccaacagcuuuaccagaggcguguacuaccccgacaagguguucagauccagcgugcugcacucuacccaggaccuguuccugccuuucuucagcaacgugaccugguuccacgccaucuccggcaccaauggcaccaagagauucgacaaccccgugcugcccuucaacgacgggguguacuuugccagcaccgagaaguccaacaucaucagaggcuggaucuucggcaccacacuggacagcaagacccagagccugcugaucgugaacaacgccaccaacguggucaucaaagugugcgaguuccaguucugcaacgaccccuuccugggcgucuacuaccacaagaacaacaagagcuggauggaaagcgaguuccggguguacagcagcgccaacaacugcaccuucgaguacgugucccagccuuuccugauggaccuggaaggcaagcagggcaacuucaagaaccugcgcgaguucguguuuaagaacaucgacggcuacuucaagaucuacagcaagcacaccccuaucaaccucgugcgggaucugccucagggcuucucugcucuggaaccccugguggaucugcccaucggcaucaacaucacccgguuucagacacugcuggcccugcacagaagcuaccugacaccuggcgauagcagcagcggauggacagcuggugccgccgcuuacuaugugggcuaccugcagccuagaaccuuccugcugaaguacaacgagaacggcaccaucaccgacgccguggauugugcucuggauccucugagcgagacaaagugcacccugaaguccuucaccguggaaaagggcaucuaccagaccagcaacuuccgggugcagcccaccgaauccaucgugcgguuccccaauaucaccaaucugugccccuucggcgagguguucaaugccaccagauucgccucuguguacgccuggaaccggaagcggaucagcaauugcguggccgacuacuccgugcuguacaacuccgccagcuucagcaccuucaagugcuacggcguguccccuaccaagcugaacgaccugugcuucacaaacguguacgccgacagcuucgugauccggggagaugaagugcggcagauugccccuggacagacaggcaagaucgccgacuacaacuacaagcugcccgacgacuucaccggcugugugauugccuggaacagcaacaaccuggacuccaaagucggcggcaacuacaauuaccuguuccggcuguuccggaaguccaaucugaagcccuucgagcgggacaucuccaccgagaucuaucaggccggcagcaccccuuguaacggcguggaaggcuucaacugcuacuucccacugcaguccuacggcuuucagcccacaaauggcgugggcuaucagcccuacagagugguggugcugagcuucgaacugcugcaugccccugccacagugugcggcccuaagaaaagcaccaaucucgugaagaacaaaugcgugaacuucaacuucaacggccugaccggcaccggcgugcugacagagagcaacaagaaguuccugccauuccagcaguuuggccgggauaucgccgauaccacagacgccguuagagauccccagacacuggaaauccuggacaucaccccuugcagcuucggcggagugucugugaucaccccuggcaccaacaccagcaaucagguggcagugcuguaccagggcgugaacuguaccgaagugcccguggccauucacgccgaucagcugacaccuacauggcggguguacuccaccggcagcaauguguuucagaccagagccggcugucugaucggagccgagcacgugaacaauagcuacgagugcgacauccccaucggcgcuggaaucugcgccagcuaccagacacagacaaacagcccucggagagccagaagcguggccagccagagcgugauugccuacacaaugucucugggcgccgagaacagcguggccuacuccaacaacucuaucgcuauccccaccaacuucaccaucagcgugaccacagagauccugccuguguccaugaccaagaccagcguggacugcaccauguacaucugcggcgauuccaccgagugcuccaaccugcugcugcaguacggcagcuucugcacccagcugaauagagcccugacagggaucgccguggaacaggacaagaacacccaagagguguucgcccaagugaagcagaucuacaagaccccuccuaucaaggacuucggcggcuucaauuucagccagauucugcccgauccuagcaagcccagcaagcggagcuucaucgaggaccugcuguucaacaaagugacacuggccgacgccggcuucaucaagcaguauggcgauugucugggcgacauugccgccagggaucugauuugcgcccagaaguuuaacggacugacagugcugccuccucugcugaccgaugagaugaucgcccaguacacaucugcccugcuggccggcacaaucacaagcggcuggacauuuggagcaggcgccgcucugcagauccccuuugcuaugcagauggccuaccgguucaacggcaucggagugacccagaaugugcuguacgagaaccagaagcugaucgccaaccaguucaacagcgccaucggcaagauccaggacagccugagcagcacagcaagcgcccugggaaagcugcaggacguggucaaccagaaugcccaggcacugaacacccuggucaagcagcuguccuccaacuucggcgccaucagcucugugcugaacgauauccugagcagacuggacccuccugaggccgaggugcagaucgacagacugaucacaggcagacugcagagccuccagacauacgugacccagcagcugaucagagccgccgagauuagagccucugccaaucuggccgccaccaagaugucugagugugugcugggccagagcaagagaguggacuuuugcggcaagggcuaccaccugaugagcuucccucagucugccccucacggcgugguguuucugcacgugacauaugugcccgcucaagagaagaauuucaccaccgcuccagccaucugccacgacggcaaagcccacuuuccuagagaaggcguguucguguccaacggcacccauugguucgugacacagcggaacuucuacgagccccagaucaucaccaccgacaacaccuucgugucuggcaacugcgacgucgugaucggcauugugaacaauaccguguacgacccucugcagcccgagcuggacagcuucaaagaggaacuggacaaguacuuuaagaaccacacaagccccgacguggaccugggcgauaucagcggaaucaaugccagcgucgugaacauccagaaagagaucgaccggcugaacgagguggccaagaaucugaacgagagccugaucgaccugcaagaacuggggaaguacgagcaguacaucaaguggcccugguacaucuggcugggcuuuaucgccggacugauugccaucgugaucgucacaaucaugcuguguugcaugaccagcugcuguagcugccugaagggcuguuguagcuguggcagcugcugcaaguucgacgaggacgauucugagcccgugcugaagggcgugaaacugcacuacacaugaggacuaguuauaagacugacuagcccgaugggccucccaacgggcccuccuccccuccuugcaccgagauuaauagaucucaaaggcucuuuucagagccaccaaaaaaaaaaaaaaaaaaaaaaaaaaaaaaaaaaaaaaaaaaaaaaaaaaaaaaaaaaaaaaaaaaaaaaaaaaaaaaaaaaaaaaaaaaaaaaaaaaaaa

SEQ ID NO: 24499 - RNA, 4032 nt, Artificial Sequence
  SARS-CoV-2/Wuhan/WIV05/2019__EPI_ISL_402128 spike protein mRNA gc mod (1-1273)(K986P_V987P_K986P_V987P_H69del_V70del_Y144del_N501Y_A570 D_D614G_P681H_T716I_S982A_D1118H)
aggagaaagcuuaccauguucguguuccuggugcugcugccucugguguccagccagugugugaaccugaccaccagaacacagcugccuccagccuacaccaacagcuuuaccagaggcguguacuaccccgacaagguguucagauccagcgugcugcacucuacccaggaccuguuccugccuuucuucagcaacgugaccugguuccacgccaucuccggcaccaauggcaccaagagauucgacaaccccgugcugcccuucaacgacgggguguacuuugccagcaccgagaaguccaacaucaucagaggcuggaucuucggcaccacacuggacagcaagacccagagccugcugaucgugaacaacgccaccaacguggucaucaaagugugcgaguuccaguucugcaacgaccccuuccugggcgucuaccacaagaacaacaagagcuggauggaaagcgaguuccggguguacagcagcgccaacaacugcaccuucgaguacgugucccagccuuuccugauggaccuggaaggcaagcagggcaacuucaagaaccugcgcgaguucguguuuaagaacaucgacggcuacuucaagaucuacagcaagcacaccccuaucaaccucgugcgggaucugccucagggcuucucugcucuggaaccccugguggaucugcccaucggcaucaacaucacccgguuucagacacugcuggcccugcacagaagcuaccugacaccuggcgauagcagcagcggauggacagcuggugccgccgcuuacuaugugggcuaccugcagccuagaaccuuccugcugaaguacaacgagaacggcaccaucaccgacgccguggauugugcucuggauccucugagcgagacaaagugcacccugaaguccuucaccguggaaaagggcaucuaccagaccagcaacuuccgggugcagcccaccgaauccaucgugcgguuccccaauaucaccaaucugugccccuucggcgagguguucaaugccaccagauucgccucuguguacgccuggaaccggaagcggaucagcaauugcguggccgacuacuccgugcuguacaacuccgccagcuucagcaccuucaagugcuacggcguguccccuaccaagcugaacgaccugugcuucacaaacguguacgccgacagcuucgugauccggggagaugaagugcggcagauugccccuggacagacaggcaagaucgccgacuacaacuacaagcugcccgacgacuucaccggcugugugauugccuggaacagcaacaaccuggacuccaaagucggcggcaacuacaauuaccuguaccggcuguuccggaaguccaaucugaagcccuucgagcgggacaucuccaccgagaucuaucaggccggcagcaccccuuguaacggcguggaaggcuucaacugcuacuucccacugcaguccuacggcuuucagcccacauacggcgugggcuaucagcccuacagagugguggugcugagcuucgaacugcugcaugccccugccacagugugcggcccuaagaaaagcaccaaucucgugaagaacaaaugcgugaacuucaacuucaacggccugaccggcaccggcgugcugacagagagcaacaagaaguuccugccauuccagcaguuuggccgggauaucgacgauaccacagacgccguuagagauccccagacacuggaaauccuggacaucaccccuugcagcuucggcggagugucugugaucaccccuggcaccaacaccagcaaucagguggcagugcuguaccagggcgugaacuguaccgaagugcccguggccauucacgccgaucagcugacaccuacauggcggguguacuccaccggcagcaauguguuucagaccagagccggcugucugaucggagccgagcacgugaacaauagcuacgagugcgacauccccaucggcgcuggaaucugcgccagcuaccagacacagacaaacagccaccggagagccagaagcguggccagccagagcaucauugccuacacaaugucucugggcgccgagaacagcguggccuacuccaacaacucuaucgcuauccccaucaacuucaccaucagcgugaccacagagauccugccuguguccaugaccaagaccagcguggacugcaccauguacaucugcggcgauuccaccgagugcuccaaccugcugcugcaguacggcagcuucugcacccagcugaauagagcccugacagggaucgccguggaacaggacaagaacacccaagagguguucgcccaagugaagcagaucuacaagaccccuccuaucaaggacuucggcggcuucaauuucagccagauucugcccgauccuagcaagcccagcaagcggagcuucaucgaggaccugcuguucaacaaagugacacuggccgacgccggcuucaucaagcaguauggcgauugucugggcgacauugccgccagggaucugauuugcgcccagaaguuuaacggacugacagugcugccuccucugcugaccgaugagaugaucgcccaguacacaucugcccugcuggccggcacaaucacaagcggcuggacauuuggagcaggcgccgcucugcagauccccuuugcuaugcagauggccuaccgguucaacggcaucggagugacccagaaugugcuguacgagaaccagaagcugaucgccaaccaguucaacagcgccaucggcaagauccaggacagccugagcagcacagcaagcgcccugggaaagcugcaggacguggucaaccagaaugcccaggcacugaacacccuggucaagcagcuguccuccaacuucggcgccaucagcucugugcugaacgauauccuggccagacuggacccuccugaggccgaggugcagaucgacagacugaucacaggcagacugcagagccuccagacauacgugacccagcagcugaucagagccgccgagauuagagccucugccaaucuggccgccaccaagaugucugagugugugcugggccagagcaagagaguggacuuuugcggcaagggcuaccaccugaugagcuucccucagucugccccucacggcgugguguuucugcacgugacauaugugcccgcucaagagaagaauuucaccaccgcuccagccaucugccacgacggcaaagcccacuuuccuagagaaggcguguucguguccaacggcacccauugguucgugacacagcggaacuucuacgagccccagaucaucaccacccacaacaccuucgugucuggcaacugcgacgucgugaucggcauugugaacaauaccguguacgacccucugcagcccgagcuggacagcuucaaagaggaacuggacaaguacuuuaagaaccacacaagccccgacguggaccugggcgauaucagcggaaucaaugccagcgucgugaacauccagaaagagaucgaccggcugaacgagguggccaagaaucugaacgagagccugaucgaccugcaagaacuggggaaguacgagcaguacaucaaguggcccugguacaucuggcugggcuuuaucgccggacugauugccaucgugauggucacaaucaugcuguguugcaugaccagcugcuguagcugccugaagggcuguuguagcuguggcagcugcugcaaguucgacgaggacgauucugagcccgugcugaagggcgugaaacugcacuacacaugaggacuaguuauaagacugacuagcccgaugggccucccaacgggcccuccuccccuccuugcaccgagauuaauagaucucaaaggcucuuuucagagccaccaaaaaaaaaaaaaaaaaaaaaaaaaaaaaaaaaaaaaaaaaaaaaaaaaaaaaaaaaaaaaaaaaaaaaaaaaaaaaaaaaaaaaaaaaaaaaaaaaaaaa

SEQ ID NO: 24500 - RNA, 4041 nt, Artificial Sequence
  SARS-CoV-2/Wuhan/WIV05/2019__EPI_ISL_402128 spike protein mRNA gc mod (1-1273)(K986P_V987P_K986P_V987P_K417N_E484K_N501Y_D614G)
aggagaaagcuuaccauguucguguuccuggugcugcugccucugguguccagccagugugugaaccugaccaccagaacacagcugccuccagccuacaccaacagcuuuaccagaggcguguacuaccccgacaagguguucagauccagcgugcugcacucuacccaggaccuguuccugccuuucuucagcaacgugaccugguuccacgccauccacguguccggcaccaauggcaccaagagauucgacaaccccgugcugcccuucaacgacgggguguacuuugccagcaccgagaaguccaacaucaucagaggcuggaucuucggcaccacacuggacagcaagacccagagccugcugaucgugaacaacgccaccaacguggucaucaaagugugcgaguuccaguucugcaacgaccccuuccugggcgucuacuaccacaagaacaacaagagcuggauggaaagcgaguuccggguguacagcagcgccaacaacugcaccuucgaguacgugucccagccuuuccugauggaccuggaaggcaagcagggcaacuucaagaaccugcgcgaguucguguuuaagaacaucgacggcuacuucaagaucuacagcaagcacaccccuaucaaccucgugcgggaucugccucagggcuucucugcucuggaaccccugguggaucugcccaucggcaucaacaucacccgguuucagacacugcuggcccugcacagaagcuaccugacaccuggcgauagcagcagcggauggacagcuggugccgccgcuuacuaugugggcuaccugcagccuagaaccuuccugcugaaguacaacgagaacggcaccaucaccgacgccguggauugugcucuggauccucugagcgagacaaagugcacccugaaguccuucaccguggaaaagggcaucuaccagaccagcaacuuccgggugcagcccaccgaauccaucgugcgguuccccaauaucaccaaucugugccccuucggcgagguguucaaugccaccagauucgccucuguguacgccuggaaccggaagcggaucagcaauugcguggccgacuacuccgugcuguacaacuccgccagcuucagcaccuucaagugcuacggcguguccccuaccaagcugaacgaccugugcuucacaaacguguacgccgacagcuucgugauccggggagaugaagugcggcagauugccccuggacagacaggcaacaucgccgacuacaacuacaagcugcccgacgacuucaccggcugugugauugccuggaacagcaacaaccuggacuccaaagucggcggcaacuacaauuaccuguaccggcuguuccggaaguccaaucugaagcccuucgagcgggacaucuccaccgagaucuaucaggccggcagcaccccuuguaacggcgugaagggcuucaacugcuacuucccacugcaguccuacggcuuucagcccacauacggcgugggcuaucagcccuacagagugguggugcugagcuucgaacugcugcaugccccugccacagugugcggcccuaagaaaagcaccaaucucgugaagaacaaaugcgugaacuucaacuucaacggccugaccggcaccggcgugcugacagagagcaacaagaaguuccugccauuccagcaguuuggccgggauaucgccgauaccacagacgccguuagagauccccagacacuggaaauccuggacaucaccccuugcagcuucggcggagugucugugaucaccccuggcaccaacaccagcaaucagguggcagugcuguaccagggcgugaacuguaccgaagugcccguggccauucacgccgaucagcugacaccuacauggcggguguacuccaccggcagcaauguguuucagaccagagccggcugucugaucggagccgagcacgugaacaauagcuacgagugcgacauccccaucggcgcuggaaucugcgccagcuaccagacacagacaaacagcccucggagagccagaagcguggccagccagagcaucauugccuacacaaugucucugggcgccgagaacagcguggccuacuccaacaacucuaucgcuauccccaccaacuucaccaucagcgugaccacagagauccugccuguguccaugaccaagaccagcguggacugcaccauguacaucugcggcgauuccaccgagugcuccaaccugcugcugcaguacggcagcuucugcacccagcugaauagagcccugacagggaucgccguggaacaggacaagaacacccaagagguguucgcccaagugaagcagaucuacaagaccccuccuaucaaggacuucggcggcuucaauuucagccagauucugcccgauccuagcaagcccagcaagcggagcuucaucgaggaccugcuguucaacaaagugacacuggccgacgccggcuucaucaagcaguauggcgauugucugggcgacauugccgccagggaucugauuugcgcccagaaguuuaacggacugacagugcugccuccucugcugaccgaugagaugaucgcccaguacacaucugcccugcuggccggcacaaucacaagcggcuggacauuuggagcaggcgccgcucugcagauccccuuugcuaugcagauggccuaccgguucaacggcaucggagugacccagaaugugcuguacgagaaccagaagcugaucgccaaccaguucaacagcgccaucggcaagauccaggacagccugagcagcacagcaagcgcccugggaaagcugcaggacguggucaaccagaaugcccaggcacugaacacccuggucaagcagcuguccuccaacuucggcgccaucagcucugugcugaacgauauccugagcagacuggacccuccugaggccgaggugcagaucgacagacugaucacaggcagacugcagagccuccagacauacgugacccagcagcugaucagagccgccgagauuagagccucugccaaucuggccgccaccaagaugucugagugugugcugggccagagcaagagaguggacuuuugcggcaagggcuaccaccugaugagcuucccucagucugccccucacggcgugguguuucugcacgugacauaugugcccgcucaagagaagaauuucaccaccgcuccagccaucugccacgacggcaaagcccacuuuccuagagaaggcguguucguguccaacggcacccauugguucgugacacagcggaacuucuacgagccccagaucaucaccaccgacaacaccuucgugucuggcaacugcgacgucgugaucggcauugugaacaauaccguguacgacccucugcagcccgagcuggacagcuucaaagaggaacuggacaaguacuuuaagaaccacacaagccccgacguggaccugggcgauaucagcggaaucaaugccagcgucgugaacauccagaaagagaucgaccggcugaacgagguggccaagaaucugaacgagagccugaucgaccugcaagaacuggggaaguacgagcaguacaucaaguggcccugguacaucuggcugggcuuuaucgccggacugauugccaucgugauggucacaaucaugcuguguugcaugaccagcugcuguagcugccugaagggcuguuguagcuguggcagcugcugcaaguucgacgaggacgauucugagcccgugcugaagggcgugaaacugcacuacacaugaggacuaguuauaagacugacuagcccgaugggccucccaacgggcccuccuccccuccuugcaccgagauuaauagaucucaaaggcucuuuucagagccaccaaaaaaaaaaaaaaaaaaaaaaaaaaaaaaaaaaaaaaaaaaaaaaaaaaaaaaaaaaaaaaaaaaaaaaaaaaaaaaaaaaaaaaaaaaaaaaaaaaaaa

SEQ ID NO: 24501 - RNA, 4032 nt, Artificial Sequence
  SARS-CoV-2/Wuhan/WIV05/2019__EPI_ISL_402128 spike protein mRNA gc mod (1-1273)(K986P_V987P_K986P_V987P_L18F_D80A_D215G_L242del_A243del_ L244del_R246I_K417N_E484K_N501Y_D614G_A701V)
aggagaaagcuuaccauguucguguuccuggugcugcugccucugguguccagccagugugugaacuucaccaccagaacacagcugccuccagccuacaccaacagcuuuaccagaggcguguacuaccccgacaagguguucagauccagcgugcugcacucuacccaggaccuguuccugccuuucuucagcaacgugaccugguuccacgccauccacguguccggcaccaauggcaccaagagauucgccaaccccgugcugcccuucaacgacgggguguacuuugccagcaccgagaaguccaacaucaucagaggcuggaucuucggcaccacacuggacagcaagacccagagccugcugaucgugaacaacgccaccaacguggucaucaaagugugcgaguuccaguucugcaacgaccccuuccugggcgucuacuaccacaagaacaacaagagcuggauggaaagcgaguuccggguguacagcagcgccaacaacugcaccuucgaguacgugucccagccuuuccugauggaccuggaaggcaagcagggcaacuucaagaaccugcgcgaguucguguuuaagaacaucgacggcuacuucaagaucuacagcaagcacaccccuaucaaccucgugcggggccugccucagggcuucucugcucuggaaccccugguggaucugcccaucggcaucaacaucacccgguuucagacacugcacaucagcuaccugacaccuggcgauagcagcagcggauggacagcuggugccgccgcuuacuaugugggcuaccugcagccuagaaccuuccugcugaaguacaacgagaacggcaccaucaccgacgccguggauugugcucuggauccucugagcgagacaaagugcacccugaaguccuucaccguggaaaagggcaucuaccagaccagcaacuuccgggugcagcccaccgaauccaucgugcgguuccccaauaucaccaaucugugccccuucggcgagguguucaaugccaccagauucgccucuguguacgccuggaaccggaagcggaucagcaauugcguggccgacuacuccgugcuguacaacuccgccagcuucagcaccuucaagugcuacggcguguccccuaccaagcugaacgaccugugcuucacaaacguguacgccgacagcuucgugauccggggagaugaagugcggcagauugccccuggacagacaggcaacaucgccgacuacaacuacaagcugcccgacgacuucaccggcugugugauugccuggaacagcaacaaccuggacuccaaagucggcggcaacuacaauuaccuguaccggcuguuccggaaguccaaucugaagcccuucgagcgggacaucuccaccgagaucuaucaggccggcagcaccccuuguaacggcgugaagggcuucaacugcuacuucccacugcaguccuacggcuuucagcccacauacggcgugggcuaucagcccuacagagugguggugcugagcuucgaacugcugcaugccccugccacagugugcggcccuaagaaaagcaccaaucucgugaagaacaaaugcgugaacuucaacuucaacggccugaccggcaccggcgugcugacagagagcaacaagaaguuccugccauuccagcaguuuggccgggauaucgccgauaccacagacgccguuagagauccccagacacuggaaauccuggacaucaccccuugcagcuucggcggagugucugugaucaccccuggcaccaacaccagcaaucagguggcagugcuguaccagggcgugaacuguaccgaagugcccguggccauucacgccgaucagcugacaccuacauggcggguguacuccaccggcagcaauguguuucagaccagagccggcugucugaucggagccgagcacgugaacaauagcuacgagugcgacauccccaucggcgcuggaaucugcgccagcuaccagacacagacaaacagcccucggagagccagaagcguggccagccagagcaucauugccuacacaaugucucugggcguggagaacagcguggccuacuccaacaacucuaucgcuauccccaccaacuucaccaucagcgugaccacagagauccugccuguguccaugaccaagaccagcguggacugcaccauguacaucugcggcgauuccaccgagugcuccaaccugcugcugcaguacggcagcuucugcacccagcugaauagagcccugacagggaucgccguggaacaggacaagaacacccaagagguguucgcccaagugaagcagaucuacaagaccccuccuaucaaggacuucggcggcuucaauuucagccagauucugcccgauccuagcaagcccagcaagcggagcuucaucgaggaccugcuguucaacaaagugacacuggccgacgccggcuucaucaagcaguauggcgauugucugggcgacauugccgccagggaucugauuugcgcccagaaguuuaacggacugacagugcugccuccucugcugaccgaugagaugaucgcccaguacacaucugcccugcuggccggcacaaucacaagcggcuggacauuuggagcaggcgccgcucugcagauccccuuugcuaugcagauggccuaccgguucaacggcaucggagugacccagaaugugcuguacgagaaccagaagcugaucgccaaccaguucaacagcgccaucggcaagauccaggacagccugagcagcacagcaagcgcccugggaaagcugcaggacguggucaaccagaaugcccaggcacugaacacccuggucaagcagcuguccuccaacuucggcgccaucagcucugugcugaacgauauccugagcagacuggacccuccugaggccgaggugcagaucgacagacugaucacaggcagacugcagagccuccagacauacgugacccagcagcugaucagagccgccgagauuagagccucugccaaucuggccgccaccaagaugucugagugugugcugggccagagcaagagaguggacuuuugcggcaagggcuaccaccugaugagcuucccucagucugccccucacggcgugguguuucugcacgugacauaugugcccgcucaagagaagaauuucaccaccgcuccagccaucugccacgacggcaaagcccacuuuccuagagaaggcguguucguguccaacggcacccauugguucgugacacagcggaacuucuacgagccccagaucaucaccaccgacaacaccuucgugucuggcaacugcgacgucgugaucggcauugugaacaauaccguguacgacccucugcagcccgagcuggacagcuucaaagaggaacuggacaaguacuuuaagaaccacacaagccccgacguggaccugggcgauaucagcggaaucaaugccagcgucgugaacauccagaaagagaucgaccggcugaacgagguggccaagaaucugaacgagagccugaucgaccugcaagaacuggggaaguacgagcaguacaucaaguggcccugguacaucuggcugggcuuuaucgccggacugauugccaucgugauggucacaaucaugcuguguugcaugaccagcugcuguagcugccugaagggcuguuguagcuguggcagcugcugcaaguucgacgaggacgauucugagcccgugcugaagggcgugaaacugcacuacacaugaggacuaguuauaagacugacuagcccgaugggccucccaacgggcccuccuccccuccuugcaccgagauuaauagaucucaaaggcucuuuucagagccaccaaaaaaaaaaaaaaaaaaaaaaaaaaaaaaaaaaaaaaaaaaaaaaaaaaaaaaaaaaaaaaaaaaaaaaaaaaaaaaaaaaaaaaaaaaaaaaaaaaaaa

SEQ ID NO: 24502 - RNA, 4041 nt, Artificial Sequence
  SARS-CoV-2/Wuhan/WIV05/2019__EPI_ISL_402128 spike protein mRNA gc mod (1-1273)(K986P_V987P_K986P_V987P_E484K_D614G)
aggagaaagcuuaccauguucguguuccuggugcugcugccucugguguccagccagugugugaaccugaccaccagaacacagcugccuccagccuacaccaacagcuuuaccagaggcguguacuaccccgacaagguguucagauccagcgugcugcacucuacccaggaccuguuccugccuuucuucagcaacgugaccugguuccacgccauccacguguccggcaccaauggcaccaagagauucgacaaccccgugcugcccuucaacgacgggguguacuuugccagcaccgagaaguccaacaucaucagaggcuggaucuucggcaccacacuggacagcaagacccagagccugcugaucgugaacaacgccaccaacguggucaucaaagugugcgaguuccaguucugcaacgaccccuuccugggcgucuacuaccacaagaacaacaagagcuggauggaaagcgaguuccggguguacagcagcgccaacaacugcaccuucgaguacgugucccagccuuuccugauggaccuggaaggcaagcagggcaacuucaagaaccugcgcgaguucguguuuaagaacaucgacggcuacuucaagaucuacagcaagcacaccccuaucaaccucgugcgggaucugccucagggcuucucugcucuggaaccccugguggaucugcccaucggcaucaacaucacccgguuucagacacugcuggcccugcacagaagcuaccugacaccuggcgauagcagcagcggauggacagcuggugccgccgcuuacuaugugggcuaccugcagccuagaaccuuccugcugaaguacaacgagaacggcaccaucaccgacgccguggauugugcucuggauccucugagcgagacaaagugcacccugaaguccuucaccguggaaaagggcaucuaccagaccagcaacuuccgggugcagcccaccgaauccaucgugcgguuccccaauaucaccaaucugugccccuucggcgagguguucaaugccaccagauucgccucuguguacgccuggaaccggaagcggaucagcaauugcguggccgacuacuccgugcuguacaacuccgccagcuucagcaccuucaagugcuacggcguguccccuaccaagcugaacgaccugugcuucacaaacguguacgccgacagcuucgugauccggggagaugaagugcggcagauugccccuggacagacaggcaagaucgccgacuacaacuacaagcugcccgacgacuucaccggcugugugauugccuggaacagcaacaaccuggacuccaaagucggcggcaacuacaauuaccuguaccggcuguuccggaaguccaaucugaagcccuucgagcgggacaucuccaccgagaucuaucaggccggcagcaccccuuguaacggcgugaagggcuucaacugcuacuucccacugcaguccuacggcuuucagcccacaaauggcgugggcuaucagcccuacagagugguggugcugagcuucgaacugcugcaugccccugccacagugugcggcccuaagaaaagcaccaaucucgugaagaacaaaugcgugaacuucaacuucaacggccugaccggcaccggcgugcugacagagagcaacaagaaguuccugccauuccagcaguuuggccgggauaucgccgauaccacagacgccguuagagauccccagacacuggaaauccuggacaucaccccuugcagcuucggcggagugucugugaucaccccuggcaccaacaccagcaaucagguggcagugcuguaccagggcgugaacuguaccgaagugcccguggccauucacgccgaucagcugacaccuacauggcggguguacuccaccggcagcaauguguuucagaccagagccggcugucugaucggagccgagcacgugaacaauagcuacgagugcgacauccccaucggcgcuggaaucugcgccagcuaccagacacagacaaacagcccucggagagccagaagcguggccagccagagcaucauugccuacacaaugucucugggcgccgagaacagcguggccuacuccaacaacucuaucgcuauccccaccaacuucaccaucagcgugaccacagagauccugccuguguccaugaccaagaccagcguggacugcaccauguacaucugcggcgauuccaccgagugcuccaaccugcugcugcaguacggcagcuucugcacccagcugaauagagcccugacagggaucgccguggaacaggacaagaacacccaagagguguucgcccaagugaagcagaucuacaagaccccuccuaucaaggacuucggcggcuucaauuucagccagauucugcccgauccuagcaagcccagcaagcggagcuucaucgaggaccugcuguucaacaaagugacacuggccgacgccggcuucaucaagcaguauggcgauugucugggcgacauugccgccagggaucugauuugcgcccagaaguuuaacggacugacagugcugccuccucugcugaccgaugagaugaucgcccaguacacaucugcccugcuggccggcacaaucacaagcggcuggacauuuggagcaggcgccgcucugcagauccccuuugcuaugcagauggccuaccgguucaacggcaucggagugacccagaaugugcuguacgagaaccagaagcugaucgccaaccaguucaacagcgccaucggcaagauccaggacagccugagcagcacagcaagcgcccugggaaagcugcaggacguggucaaccagaaugcccaggcacugaacacccuggucaagcagcuguccuccaacuucggcgccaucagcucugugcugaacgauauccugagcagacuggacccuccugaggccgaggugcagaucgacagacugaucacaggcagacugcagagccuccagacauacgugacccagcagcugaucagagccgccgagauuagagccucugccaaucuggccgccaccaagaugucugagugugugcugggccagagcaagagaguggacuuuugcggcaagggcuaccaccugaugagcuucccucagucugccccucacggcgugguguuucugcacgugacauaugugcccgcucaagagaagaauuucaccaccgcuccagccaucugccacgacggcaaagcccacuuuccuagagaaggcguguucguguccaacggcacccauugguucgugacacagcggaacuucuacgagccccagaucaucaccaccgacaacaccuucgugucuggcaacugcgacgucgugaucggcauugugaacaauaccguguacgacccucugcagcccgagcuggacagcuucaaagaggaacuggacaaguacuuuaagaaccacacaagccccgacguggaccugggcgauaucagcggaaucaaugccagcgucgugaacauccagaaagagaucgaccggcugaacgagguggccaagaaucugaacgagagccugaucgaccugcaagaacuggggaaguacgagcaguacaucaaguggcccugguacaucuggcugggcuuuaucgccggacugauugccaucgugauggucacaaucaugcuguguugcaugaccagcugcuguagcugccugaagggcuguuguagcuguggcagcugcugcaaguucgacgaggacgauucugagcccgugcugaagggcgugaaacugcacuacacaugaggacuaguuauaagacugacuagcccgaugggccucccaacgggcccuccuccccuccuugcaccgagauuaauagaucucaaaggcucuuuucagagccaccaaaaaaaaaaaaaaaaaaaaaaaaaaaaaaaaaaaaaaaaaaaaaaaaaaaaaaaaaaaaaaaaaaaaaaaaaaaaaaaaaaaaaaaaaaaaaaaaaaaaa

SEQ ID NO: 24503 - RNA, 4041 nt, Artificial Sequence
  SARS-CoV-2/Wuhan/WIV05/2019__EPI_ISL_402128 spike protein mRNA gc mod (1-1273)(K986P_V987P_K986P_V987P_L18F_T20N_P26S_D138Y_R190S_K417T _E484K_N501Y_D614G_H655Y_T1027I)
aggagaaagcuuaccauguucguguuccuggugcugcugccucugguguccagccagugugugaacuucaccaacagaacacagcugccuagcgccuacaccaacagcuuuaccagaggcguguacuaccccgacaagguguucagauccagcgugcugcacucuacccaggaccuguuccugccuuucuucagcaacgugaccugguuccacgccauccacguguccggcaccaauggcaccaagagauucgacaaccccgugcugcccuucaacgacgggguguacuuugccagcaccgagaaguccaacaucaucagaggcuggaucuucggcaccacacuggacagcaagacccagagccugcugaucgugaacaacgccaccaacguggucaucaaagugugcgaguuccaguucugcaacuaccccuuccugggcgucuacuaccacaagaacaacaagagcuggauggaaagcgaguuccggguguacagcagcgccaacaacugcaccuucgaguacgugucccagccuuuccugauggaccuggaaggcaagcagggcaacuucaagaaccugagcgaguucguguuuaagaacaucgacggcuacuucaagaucuacagcaagcacaccccuaucaaccucgugcgggaucugccucagggcuucucugcucuggaaccccugguggaucugcccaucggcaucaacaucacccgguuucagacacugcuggcccugcacagaagcuaccugacaccuggcgauagcagcagcggauggacagcuggugccgccgcuuacuaugugggcuaccugcagccuagaaccuuccugcugaaguacaacgagaacggcaccaucaccgacgccguggauugugcucuggauccucugagcgagacaaagugcacccugaaguccuucaccguggaaaagggcaucuaccagaccagcaacuuccgggugcagcccaccgaauccaucgugcgguuccccaauaucaccaaucugugccccuucggcgagguguucaaugccaccagauucgccucuguguacgccuggaaccggaagcggaucagcaauugcguggccgacuacuccgugcuguacaacuccgccagcuucagcaccuucaagugcuacggcguguccccuaccaagcugaacgaccugugcuucacaaacguguacgccgacagcuucgugauccggggagaugaagugcggcagauugccccuggacagacaggcaccaucgccgacuacaacuacaagcugcccgacgacuucaccggcugugugauugccuggaacagcaacaaccuggacuccaaagucggcggcaacuacaauuaccuguaccggcuguuccggaaguccaaucugaagcccuucgagcgggacaucuccaccgagaucuaucaggccggcagcaccccuuguaacggcgugaagggcuucaacugcuacuucccacugcaguccuacggcuuucagcccacauacggcgugggcuaucagcccuacagagugguggugcugagcuucgaacugcugcaugccccugccacagugugcggcccuaagaaaagcaccaaucucgugaagaacaaaugcgugaacuucaacuucaacggccugaccggcaccggcgugcugacagagagcaacaagaaguuccugccauuccagcaguuuggccgggauaucgccgauaccacagacgccguuagagauccccagacacuggaaauccuggacaucaccccuugcagcuucggcggagugucugugaucaccccuggcaccaacaccagcaaucagguggcagugcuguaccagggcgugaacuguaccgaagugcccguggccauucacgccgaucagcugacaccuacauggcggguguacuccaccggcagcaauguguuucagaccagagccggcugucugaucggagccgaguacgugaacaauagcuacgagugcgacauccccaucggcgcuggaaucugcgccagcuaccagacacagacaaacagcccucggagagccagaagcguggccagccagagcaucauugccuacacaaugucucugggcgccgagaacagcguggccuacuccaacaacucuaucgcuauccccaccaacuucaccaucagcgugaccacagagauccugccuguguccaugaccaagaccagcguggacugcaccauguacaucugcggcgauuccaccgagugcuccaaccugcugcugcaguacggcagcuucugcacccagcugaauagagcccugacagggaucgccguggaacaggacaagaacacccaagagguguucgcccaagugaagcagaucuacaagaccccuccuaucaaggacuucggcggcuucaauuucagccagauucugcccgauccuagcaagcccagcaagcggagcuucaucgaggaccugcuguucaacaaagugacacuggccgacgccggcuucaucaagcaguauggcgauugucugggcgacauugccgccagggaucugauuugcgcccagaaguuuaacggacugacagugcugccuccucugcugaccgaugagaugaucgcccaguacacaucugcccugcuggccggcacaaucacaagcggcuggacauuuggagcaggcgccgcucugcagauccccuuugcuaugcagauggccuaccgguucaacggcaucggagugacccagaaugugcuguacgagaaccagaagcugaucgccaaccaguucaacagcgccaucggcaagauccaggacagccugagcagcacagcaagcgcccugggaaagcugcaggacguggucaaccagaaugcccaggcacugaacacccuggucaagcagcuguccuccaacuucggcgccaucagcucugugcugaacgauauccugagcagacuggacccuccugaggccgaggugcagaucgacagacugaucacaggcagacugcagagccuccagacauacgugacccagcagcugaucagagccgccgagauuagagccucugccaaucuggccgccaucaagaugucugagugugugcugggccagagcaagagaguggacuuuugcggcaagggcuaccaccugaugagcuucccucagucugccccucacggcgugguguuucugcacgugacauaugugcccgcucaagagaagaauuucaccaccgcuccagccaucugccacgacggcaaagcccacuuuccuagagaaggcguguucguguccaacggcacccauugguucgugacacagcggaacuucuacgagccccagaucaucaccaccgacaacaccuucgugucuggcaacugcgacgucgugaucggcauugugaacaauaccguguacgacccucugcagcccgagcuggacagcuucaaagaggaacuggacaaguacuuuaagaaccacacaagccccgacguggaccugggcgauaucagcggaaucaaugccagcgucgugaacauccagaaagagaucgaccggcugaacgagguggccaagaaucugaacgagagccugaucgaccugcaagaacuggggaaguacgagcaguacaucaaguggcccugguacaucuggcugggcuuuaucgccggacugauugccaucgugauggucacaaucaugcuguguugcaugaccagcugcuguagcugccugaagggcuguuguagcuguggcagcugcugcaaguucgacgaggacgauucugagcccgugcugaagggcgugaaacugcacuacacaugaggacuaguuauaagacugacuagcccgaugggccucccaacgggcccuccuccccuccuugcaccgagauuaauagaucucaaaggcucuuuucagagccaccaaaaaaaaaaaaaaaaaaaaaaaaaaaaaaaaaaaaaaaaaaaaaaaaaaaaaaaaaaaaaaaaaaaaaaaaaaaaaaaaaaaaaaaaaaaaaaaaaaaaa

SEQ ID NO: 24504 - RNA, 4041 nt, Artificial Sequence
  SARS-CoV-2/Wuhan/WIV05/2019__EPI_ISL_402128 spike protein mRNA gc mod (1-1273)(K986P_V987P_K986P_V987P_S13I_W152C_L452R_D614G)
aggagaaagcuuaccauguucguguuccuggugcugcugccucugguguccauccagugugugaaccugaccaccagaacacagcugccuccagccuacaccaacagcuuuaccagaggcguguacuaccccgacaagguguucagauccagcgugcugcacucuacccaggaccuguuccugccuuucuucagcaacgugaccugguuccacgccauccacguguccggcaccaauggcaccaagagauucgacaaccccgugcugcccuucaacgacgggguguacuuugccagcaccgagaaguccaacaucaucagaggcuggaucuucggcaccacacuggacagcaagacccagagccugcugaucgugaacaacgccaccaacguggucaucaaagugugcgaguuccaguucugcaacgaccccuuccugggcgucuacuaccacaagaacaacaagagcugcauggaaagcgaguuccggguguacagcagcgccaacaacugcaccuucgaguacgugucccagccuuuccugauggaccuggaaggcaagcagggcaacuucaagaaccugcgcgaguucguguuuaagaacaucgacggcuacuucaagaucuacagcaagcacaccccuaucaaccucgugcgggaucugccucagggcuucucugcucuggaaccccugguggaucugcccaucggcaucaacaucacccgguuucagacacugcuggcccugcacagaagcuaccugacaccuggcgauagcagcagcggauggacagcuggugccgccgcuuacuaugugggcuaccugcagccuagaaccuuccugcugaaguacaacgagaacggcaccaucaccgacgccguggauugugcucuggauccucugagcgagacaaagugcacccugaaguccuucaccguggaaaagggcaucuaccagaccagcaacuuccgggugcagcccaccgaauccaucgugcgguuccccaauaucaccaaucugugccccuucggcgagguguucaaugccaccagauucgccucuguguacgccuggaaccggaagcggaucagcaauugcguggccgacuacuccgugcuguacaacuccgccagcuucagcaccuucaagugcuacggcguguccccuaccaagcugaacgaccugugcuucacaaacguguacgccgacagcuucgugauccggggagaugaagugcggcagauugccccuggacagacaggcaagaucgccgacuacaacuacaagcugcccgacgacuucaccggcugugugauugccuggaacagcaacaaccuggacuccaaagucggcggcaacuacaauuaccgcuaccggcuguuccggaaguccaaucugaagcccuucgagcgggacaucuccaccgagaucuaucaggccggcagcaccccuuguaacggcguggaaggcuucaacugcuacuucccacugcaguccuacggcuuucagcccacaaauggcgugggcuaucagcccuacagagugguggugcugagcuucgaacugcugcaugccccugccacagugugcggcccuaagaaaagcaccaaucucgugaagaacaaaugcgugaacuucaacuucaacggccugaccggcaccggcgugcugacagagagcaacaagaaguuccugccauuccagcaguuuggccgggauaucgccgauaccacagacgccguuagagauccccagacacuggaaauccuggacaucaccccuugcagcuucggcggagugucugugaucaccccuggcaccaacaccagcaaucagguggcagugcuguaccagggcgugaacuguaccgaagugcccguggccauucacgccgaucagcugacaccuacauggcggguguacuccaccggcagcaauguguuucagaccagagccggcugucugaucggagccgagcacgugaacaauagcuacgagugcgacauccccaucggcgcuggaaucugcgccagcuaccagacacagacaaacagcccucggagagccagaagcguggccagccagagcaucauugccuacacaaugucucugggcgccgagaacagcguggccuacuccaacaacucuaucgcuauccccaccaacuucaccaucagcgugaccacagagauccugccuguguccaugaccaagaccagcguggacugcaccauguacaucugcggcgauuccaccgagugcuccaaccugcugcugcaguacggcagcuucugcacccagcugaauagagcccugacagggaucgccguggaacaggacaagaacacccaagagguguucgcccaagugaagcagaucuacaagaccccuccuaucaaggacuucggcggcuucaauuucagccagauucugcccgauccuagcaagcccagcaagcggagcuucaucgaggaccugcuguucaacaaagugacacuggccgacgccggcuucaucaagcaguauggcgauugucugggcgacauugccgccagggaucugauuugcgcccagaaguuuaacggacugacagugcugccuccucugcugaccgaugagaugaucgcccaguacacaucugcccugcuggccggcacaaucacaagcggcuggacauuuggagcaggcgccgcucugcagauccccuuugcuaugcagauggccuaccgguucaacggcaucggagugacccagaaugugcuguacgagaaccagaagcugaucgccaaccaguucaacagcgccaucggcaagauccaggacagccugagcagcacagcaagcgcccugggaaagcugcaggacguggucaaccagaaugcccaggcacugaacacccuggucaagcagcuguccuccaacuucggcgccaucagcucugugcugaacgauauccugagcagacuggacccuccugaggccgaggugcagaucgacagacugaucacaggcagacugcagagccuccagacauacgugacccagcagcugaucagagccgccgagauuagagccucugccaaucuggccgccaccaagaugucugagugugugcugggccagagcaagagaguggacuuuugcggcaagggcuaccaccugaugagcuucccucagucugccccucacggcgugguguuucugcacgugacauaugugcccgcucaagagaagaauuucaccaccgcuccagccaucugccacgacggcaaagcccacuuuccuagagaaggcguguucguguccaacggcacccauugguucgugacacagcggaacuucuacgagccccagaucaucaccaccgacaacaccuucgugucuggcaacugcgacgucgugaucggcauugugaacaauaccguguacgacccucugcagcccgagcuggacagcuucaaagaggaacuggacaaguacuuuaagaaccacacaagccccgacguggaccugggcgauaucagcggaaucaaugccagcgucgugaacauccagaaagagaucgaccggcugaacgagguggccaagaaucugaacgagagccugaucgaccugcaagaacuggggaaguacgagcaguacaucaaguggcccugguacaucuggcugggcuuuaucgccggacugauugccaucgugauggucacaaucaugcuguguugcaugaccagcugcuguagcugccugaagggcuguuguagcuguggcagcugcugcaaguucgacgaggacgauucugagcccgugcugaagggcgugaaacugcacuacacaugaggacuaguuauaagacugacuagcccgaugggccucccaacgggcccuccuccccuccuugcaccgagauuaauagaucucaaaggcucuuuucagagccaccaaaaaaaaaaaaaaaaaaaaaaaaaaaaaaaaaaaaaaaaaaaaaaaaaaaaaaaaaaaaaaaaaaaaaaaaaaaaaaaaaaaaaaaaaaaaaaaaaaaaa

SEQ ID NO: 24505 - RNA, 1365 nt, Artificial Sequence
  SARS-CoV-2/Wuhan/WIV05/2019__EPI_ISL_402128 spike protein mRNA gc (1-15,334-528) Ferritin construct
aggagaaagcuuaccauguucguguuccugguccuccugccccuggugagcucccagugcaaccugugccccuucggcgagguguucaacgccacccgguucgccagcgucuacgccuggaaccgcaagcggaucuccaacugcguggcggacuacagcgugcuguacaacuccgccagcuucuccacguucaagugcuacggcgucagccccaccaagcucaacgaccugugcuucaccaacguguacgccgacuccuucgugauccgcggggacgagguccggcagaucgcccccggccagaccgggaagaucgccgacuacaacuacaagcugccggacgacuucacgggcugcgugaucgcguggaacagcaacaaccucgacuccaaggucgggggcaacuacaacuaccuguaccgccuguuccgcaagagcaaccucaagcccuucgagcgggacaucuccaccgagaucuaccaggccggcagcacccccugcaacgggguggagggcuucaacugcuacuucccccugcaguccuacggguuccagccgaccaacggcgugggguaccagcccuaccggguggucgugcugagcuucgagcuccugcacgcccccgccacggugugcggccccaagggcggggguggaagcggcggggguggaagugacaucaucaagcuccugaacgagcaggucaacaaggagaugcaguccagcaaccuguacauguccaugagcuccuggugcuacacccacagccucgacggcgccgggcuguuccuguucgaccacgccgcggaggaguacgagcacgccaagaagcucaucaucuuccugaacgagaacaacgugcccgugcagcugaccuccaucagcgccccggagcacaaguucgagggccucacgcagaucuuccagaaggccuacgagcacgagcagcacaucuccgagagcaucaacaacaucguggaccacgccaucaaguccaaggaccacgcgaccuucaacuuccugcagugguacgucgccgagcagcacgaggaggaggugcuguucaaggacauccucgacaagaucgagcugaucgggaacgagaaccacggccuguaccucgccgaccaguacgugaaggggaucgccaagagccgcaaguccugaggacuaguuauaagacugacuagcccgaugggccucccaacgggcccuccuccccuccuugcaccgagagaucucaaaggcucuuuucagagccaccaaaaaaaaaaaaaaaaaaaaaaaaaaaaaaaaaaaaaaaaaaaaaaaaaaaaaaaaaaaaaaaaaaaaaaaaaaaaaaaaaaaaaaaaaaaaaaaaaaaaa

SEQ ID NO: 24506 - RNA, 963 nt, Artificial Sequence
  SARS-CoV-2/Wuhan/WIV05/2019__EPI_ISL_402128 spike protein mRNA gc (334-528) Foldon construct
aggagaaagcuuaccaugcccaugggcagccugcagccgcucgccacccuguaccugcucgggaugcugguggccuccguccuggcgaaccugugccccuucggcgagguguucaacgccacccgguucgccagcgucuacgccuggaaccgcaagcggaucuccaacugcguggcggacuacagcgugcuguacaacuccgccagcuucuccacguucaagugcuacggcgucagccccaccaagcucaacgaccugugcuucaccaacguguacgccgacuccuucgugauccgcggggacgagguccggcagaucgcccccggccagaccgggaagaucgccgacuacaacuacaagcugccggacgacuucacgggcugcgugaucgcguggaacagcaacaaccucgacuccaaggucgggggcaacuacaacuaccuguaccgccuguuccgcaagagcaaccucaagcccuucgagcgggacaucuccaccgagaucuaccaggccggcagcacccccugcaacgggguggagggcuucaacugcuacuucccccugcaguccuacggguuccagccgaccaacggcgugggguaccagcccuaccggguggucgugcugagcuucgagcuccugcacgcccccgccacggugugcggccccaagggcagcggcggguacauccccgaggccccgcgcgacggccaggccuacgugcggaaggacggcgaguggguccugcugagcaccuuccucugaggacuaguuauaagacugacuagcccgaugggccucccaacgggcccuccuccccuccuugcaccgagagaucucaaaggcucuuuucagagccaccaaaaaaaaaaaaaaaaaaaaaaaaaaaaaaaaaaaaaaaaaaaaaaaaaaaaaaaaaaaaaaaaaaaaaaaaaaaaaaaaaaaaaaaaaaaaaaaaaaaaa

SEQ ID NO: 24507 - RNA, 1341 nt, Artificial Sequence
  SARS-CoV-2/Wuhan/WIV05/2019__EPI_ISL_402128 spike protein mRNA gc (1-15,334-528) LumSynth construct
aggagaaagcuuaccauguucguguuccugguccuccugccccuggugagcucccagugcaaccugugccccuucggcgagguguucaacgccacccgguucgccagcgucuacgccuggaaccgcaagcggaucuccaacugcguggcggacuacagcgugcuguacaacuccgccagcuucuccacguucaagugcuacggcgucagccccaccaagcucaacgaccugugcuucaccaacguguacgccgacuccuucgugauccgcggggacgagguccggcagaucgcccccggccagaccgggaagaucgccgacuacaacuacaagcugccggacgacuucacgggcugcgugaucgcguggaacagcaacaaccucgacuccaaggucgggggcaacuacaacuaccuguaccgccuguuccgcaagagcaaccucaagcccuucgagcgggacaucuccaccgagaucuaccaggccggcagcacccccugcaacgggguggagggcuucaacugcuacuucccccugcaguccuacggguuccagccgaccaacggcgugggguaccagcccuaccggguggucgugcugagcuucgagcuccugcacgcccccgccacggugugcggccccaagggcggcggcggcuccggaggcggagguagcgggggacagaucuacgagggcaagcugaccgccgaggggcuccgcuucggcaucguggccagccgguucaaccacgcgcuggucgaccgccugguggagggggccaucgacgccaucgugcggcacggcgggcgcgaggaggacaucacccucguccgggugcccggcuccugggagaucccgguggccgccggcgagcuggcccgcaaggaggacaucgacgcggucaucgccaucggggugcugauccggggcgccacgccccacuucgacuacaucgccagcgagguguccaaggggcucgcggaccugagccuggagcuccgcaagcccaucaccuucggcgucaucaccgccgacacccuggagcaggccaucgagcgggccgggacgaagcacggcaacaagggcugggaggccgcgcuguccgccaucgagauggccaaccucuucaagagccugcgcugaggacuaguuauaagacugacuagcccgaugggccucccaacgggcccuccuccccuccuugcaccgagagaucucaaaggcucuuuucagagccaccaaaaaaaaaaaaaaaaaaaaaaaaaaaaaaaaaaaaaaaaaaaaaaaaaaaaaaaaaaaaaaaaaaaaaaaaaaaaaaaaaaaaaaaaaaaaaaaaaaaaa

SEQ ID NO: 24508 - RNA, 1302 nt, Artificial Sequence
  SARS-CoV-2/Wuhan/WIV05/2019__EPI_ISL_402128 spike protein mRNA gc (334-528) LumSynth construct
aggagaaagcuuaccaugcagaucuacgagggcaagcugaccgccgaggggcuccgcuucggcaucguggccagccgguucaaccacgcgcuggucgaccgccugguggagggggccaucgacgccaucgugcggcacggcgggcgcgaggaggacaucacccucguccgggugcccggcuccugggagaucccgguggccgccggcgagcuggcccgcaaggaggacaucgacgcggucaucgccaucggggugcugauccggggcgccacgccccacuucgacuacaucgccagcgagguguccaaggggcucgcggaccugagccuggagcuccgcaagcccaucaccuucggcgucaucaccgccgacacccuggagcaggccaucgagcgggccgggacgaagcacggcaacaagggcugggaggccgcgcuguccgccaucgagauggccaaccucuucaagagccugcgcggcgggggcgggagcggcgggggcggcuccgggggcgggaaccugugccccuucggcgagguguucaacgccacccgguucgccagcgucuacgccuggaaccgcaagcggaucuccaacugcguggcggacuacagcgugcuguacaacuccgccagcuucuccacguucaagugcuacggcgucagccccaccaagcucaacgaccugugcuucaccaacguguacgccgacuccuucgugauccgcggggacgagguccggcagaucgcccccggccagaccgggaagaucgccgacuacaacuacaagcugccggacgacuucacgggcugcgugaucgcguggaacagcaacaaccucgacuccaaggucgggggcaacuacaacuaccuguaccgccuguuccgcaagagcaaccucaagcccuucgagcgggacaucuccaccgagaucuaccaggccggcagcacccccugcaacgggguggagggcuucaacugcuacuucccccugcaguccuacggguuccagccgaccaacggcgugggguaccagcccuaccggguggucgugcugagcuucgagcuccugcacgcccccgccacggugugcggccccaagugaggacuaguuauaagacugacuagcccgaugggccucccaacgggcccuccuccccuccuugcaccgagagaucucaaaggcucuuuucagagccaccaaaaaaaaaaaaaaaaaaaaaaaaaaaaaaaaaaaaaaaaaaaaaaaaaaaaaaaaaaaaaaaaaaaaaaaaaaaaaaaaaaaaaaaaaaaaaaaaaaaaa

SEQ ID NO: 24509 - RNA, 4035 nt, Artificial Sequence
  SARS-CoV-2/Wuhan/WIV05/2019__EPI_ISL_402128 spike protein mRNA gc (1-1273)
aggagaaagcuuaccauguucguguuccugguccuccugccccuggugagcucccagugcgugaaccucaccacccgcacgcagcugccgcccgccuacaccaacagcuucacccggggcgucuacuaccccgacaagguguuccgcuccagcgugcugcacuccacccaggaccucuuccugcccuucuucagcaacgucacgugguuccacgccauccacguguccgggaccaacggcaccaagcgguucgacaacccggugcugcccuucaacgacggggucuacuucgcgagcaccgagaaguccaacaucauccgcggcuggaucuucgggacgacccucgacagcaagacccagucccugcugaucgugaacaacgccaccaacguggucaucaaggugugcgaguuccaguucugcaacgaccccuuccucggcguguacuaccacaagaacaacaagagcuggauggaguccgaguuccgggucuacagcuccgccaacaacugcacguucgaguacgugagccagcccuuccugauggaccuggagggcaagcaggggaacuucaagaaccuccgcgaguucguguucaagaacaucgacggcuacuucaagaucuacuccaagcacaccccgaucaaccugguccgggaccugccccagggguucagcgcccucgagccccugguggaccugcccaucggcaucaacaucacccgcuuccagacccuccuggcccugcaccgguccuaccucacgccgggggacagcagcuccggcuggaccgcgggcgccgccgccuacuacgugggguaccugcagccccgcaccuuccugcucaaguacaacgagaacggcaccaucacggacgcggucgacugcgcccuggacccccugagcgagaccaagugcacccucaaguccuucaccguggagaaggggaucuaccagacgagcaacuuccgggugcagcccaccgaguccaucguccgcuucccgaacaucaccaaccugugccccuucggcgagguguucaacgccacccgguucgccagcgucuacgccuggaaccgcaagcggaucuccaacugcguggcggacuacagcgugcuguacaacuccgccagcuucuccacguucaagugcuacggcgucagccccaccaagcucaacgaccugugcuucaccaacguguacgccgacuccuucgugauccgcggggacgagguccggcagaucgcccccggccagaccgggaagaucgccgacuacaacuacaagcugccggacgacuucacgggcugcgugaucgcguggaacagcaacaaccucgacuccaaggucgggggcaacuacaacuaccuguaccgccuguuccgcaagagcaaccucaagcccuucgagcgggacaucuccaccgagaucuaccaggccggcagcacccccugcaacgggguggagggcuucaacugcuacuucccccugcaguccuacggguuccagccgaccaacggcgugggguaccagcccuaccggguggucgugcugagcuucgagcuccugcacgcccccgccacggugugcggccccaagaaguccaccaaccuggucaagaacaagugcgugaacuucaacuucaacggccucaccgggaccggcgugcugaccgagagcaacaagaaguuccugccguuccagcaguucgggcgcgacaucgccgacacgaccgacgcgguccgcgacccccagacccuggagauccucgacaucacccccugcagcuucggcgggguguccgugaucacgccgggcaccaacaccagcaaccaggucgccgugcuguaccaggacgugaacugcaccgagguccccguggccauccacgccgaccagcugacgcccaccuggcggguguacuccaccggcagcaacgucuuccagacccgcgccgggugccucaucggcgcggagcacgugaacaacuccuacgagugcgacauccccaucggggccggcaucugcgccagcuaccagacgcagaccaacuccccgcggcgcgcccggagcguggcgucccagagcaucaucgccuacaccaugucccugggcgccgagaacagcgucgccuacuccaacaacagcaucgccauccccaccaacuucacgaucuccgugaccaccgagauccugcccgugagcaugaccaagacgagcgucgacugcaccauguacaucugcggggacuccaccgagugcagcaaccuccugcugcaguacggcuccuucugcacccagcucaaccgcgcgcugacggggaucgccguggagcaggacaagaacacccaggagguguucgcccaggucaagcagaucuacaagacgcccccgaucaaggacuucggcggguucaacuucagccagauccugcccgaccccuccaagcccagcaagcgguccuucaucgaggaccuccuguucaacaaggugacccuggccgacgccggcuucaucaagcaguacggcgacugccucggggacaucgcggcccgcgaccugaucugcgcccagaaguucaacggccugaccgugcucccgccccugcugaccgacgagaugaucgcccaguacaccagcgcccuccuggcggggaccaucacguccggcuggaccuucggggccggcgccgcccugcagauccccuucgcgaugcagauggccuaccgguucaacggcaucggggucacccagaacgugcucuacgagaaccagaagcugaucgccaaccaguucaacagcgccaucggcaagauccaggacucccugagcuccaccgccagcgcgcucgggaagcugcaggacguggucaaccagaacgcccaggcccugaacacgcucgugaagcagcuguccagcaacuucggcgccaucuccagcgugcugaacgacauccucucccgccuggacaaggucgaggccgaggugcagaucgaccggcugaucaccgggcgccuccagagccugcagaccuacgugacccagcagcugauccgggcggccgagauccgcgccagcgccaaccucgccgcgaccaagauguccgagugcguccugggccagagcaagcggguggacuucugcggcaagggguaccaccugauguccuucccccagagcgccccgcacggcguggucuuccuccacgugacguacguccccgcccaggagaagaacuucaccaccgcccccgcgaucugccacgacgggaaggcccacuucccccgcgagggcguguucguguccaacgggacccacugguucgucacgcagcggaacuucuacgagccgcagaucaucaccaccgacaacaccuucgugagcggcaacugcgacguggucaucggcaucgugaacaacacgguguacgacccccugcagcccgagcuggacuccuucaaggaggagcucgacaaguacuucaagaaccacaccagccccgacgucgaccugggggacaucuccggcaucaacgccagcguggugaacauccagaaggagaucgaccgccugaacgaggucgccaagaaccucaacgagucccugaucgaccugcaggagcucgggaaguacgagcaguacaucaaguggccgugguacaucuggcugggcuucaucgccggccugaucgcgaucgugauggugaccaucaugcucugcugcaugaccagcugcugcuccugccugaaggggugcugcagcugcggcuccugcugcaaguucgacgaggacgacagcgagcccguccugaagggggugaagcuccacuacacgugaggacuaguuauaagacugacuagcccgaugggccucccaacgggcccuccuccccuccuugcaccgagagaucucaaaggcucuuuucagagccaccaaaaaaaaaaaaaaaaaaaaaaaaaaaaaaaaaaaaaaaaaaaaaaaaaaaaaaaaaaaaaaaaaaaaaaaaaaaaaaaaaaaaaaaaaaaaaaaaaaaaa

SEQ ID NO: 24510 - RNA, 4035 nt, Artificial Sequence
  SARS-CoV-2/Wuhan/WIV05/2019__EPI_ISL_402128 spike protein mRNA gc (1-1273)(D614G)
aggagaaagcuuaccauguucguguuccugguccuccugccccuggugagcucccagugcgugaaccucaccacccgcacgcagcugccgcccgccuacaccaacagcuucacccggggcgucuacuaccccgacaagguguuccgcuccagcgugcugcacuccacccaggaccucuuccugcccuucuucagcaacgucacgugguuccacgccauccacguguccgggaccaacggcaccaagcgguucgacaacccggugcugcccuucaacgacggggucuacuucgcgagcaccgagaaguccaacaucauccgcggcuggaucuucgggacgacccucgacagcaagacccagucccugcugaucgugaacaacgccaccaacguggucaucaaggugugcgaguuccaguucugcaacgaccccuuccucggcguguacuaccacaagaacaacaagagcuggauggaguccgaguuccgggucuacagcuccgccaacaacugcacguucgaguacgugagccagcccuuccugauggaccuggagggcaagcaggggaacuucaagaaccuccgcgaguucguguucaagaacaucgacggcuacuucaagaucuacuccaagcacaccccgaucaaccugguccgggaccugccccagggguucagcgcccucgagccccugguggaccugcccaucggcaucaacaucacccgcuuccagacccuccuggcccugcaccgguccuaccucacgccgggggacagcagcuccggcuggaccgcgggcgccgccgccuacuacgugggguaccugcagccccgcaccuuccugcucaaguacaacgagaacggcaccaucacggacgcggucgacugcgcccuggacccccugagcgagaccaagugcacccucaaguccuucaccguggagaaggggaucuaccagacgagcaacuuccgggugcagcccaccgaguccaucguccgcuucccgaacaucaccaaccugugccccuucggcgagguguucaacgccacccgguucgccagcgucuacgccuggaaccgcaagcggaucuccaacugcguggcggacuacagcgugcuguacaacuccgccagcuucuccacguucaagugcuacggcgucagccccaccaagcucaacgaccugugcuucaccaacguguacgccgacuccuucgugauccgcggggacgagguccggcagaucgcccccggccagaccgggaagaucgccgacuacaacuacaagcugccggacgacuucacgggcugcgugaucgcguggaacagcaacaaccucgacuccaaggucgggggcaacuacaacuaccuguaccgccuguuccgcaagagcaaccucaagcccuucgagcgggacaucuccaccgagaucuaccaggccggcagcacccccugcaacgggguggagggcuucaacugcuacuucccccugcaguccuacggguuccagccgaccaacggcgugggguaccagcccuaccggguggucgugcugagcuucgagcuccugcacgcccccgccacggugugcggccccaagaaguccaccaaccuggucaagaacaagugcgugaacuucaacuucaacggccucaccgggaccggcgugcugaccgagagcaacaagaaguuccugccguuccagcaguucgggcgcgacaucgccgacacgaccgacgcgguccgcgacccccagacccuggagauccucgacaucacccccugcagcuucggcgggguguccgugaucacgccgggcaccaacaccagcaaccaggucgccgugcuguaccagggcgugaacugcaccgagguccccguggccauccacgccgaccagcugacgcccaccuggcggguguacuccaccggcagcaacgucuuccagacccgcgccgggugccucaucggcgcggagcacgugaacaacuccuacgagugcgacauccccaucggggccggcaucugcgccagcuaccagacgcagaccaacuccccgcggcgcgcccggagcguggcgucccagagcaucaucgccuacaccaugucccugggcgccgagaacagcgucgccuacuccaacaacagcaucgccauccccaccaacuucacgaucuccgugaccaccgagauccugcccgugagcaugaccaagacgagcgucgacugcaccauguacaucugcggggacuccaccgagugcagcaaccuccugcugcaguacggcuccuucugcacccagcucaaccgcgcgcugacggggaucgccguggagcaggacaagaacacccaggagguguucgcccaggucaagcagaucuacaagacgcccccgaucaaggacuucggcggguucaacuucagccagauccugcccgaccccuccaagcccagcaagcgguccuucaucgaggaccuccuguucaacaaggugacccuggccgacgccggcuucaucaagcaguacggcgacugccucggggacaucgcggcccgcgaccugaucugcgcccagaaguucaacggccugaccgugcucccgccccugcugaccgacgagaugaucgcccaguacaccagcgcccuccuggcggggaccaucacguccggcuggaccuucggggccggcgccgcccugcagauccccuucgcgaugcagauggccuaccgguucaacggcaucggggucacccagaacgugcucuacgagaaccagaagcugaucgccaaccaguucaacagcgccaucggcaagauccaggacucccugagcuccaccgccagcgcgcucgggaagcugcaggacguggucaaccagaacgcccaggcccugaacacgcucgugaagcagcuguccagcaacuucggcgccaucuccagcgugcugaacgacauccucucccgccuggacaaggucgaggccgaggugcagaucgaccggcugaucaccgggcgccuccagagccugcagaccuacgugacccagcagcugauccgggcggccgagauccgcgccagcgccaaccucgccgcgaccaagauguccgagugcguccugggccagagcaagcggguggacuucugcggcaagggguaccaccugauguccuucccccagagcgccccgcacggcguggucuuccuccacgugacguacguccccgcccaggagaagaacuucaccaccgcccccgcgaucugccacgacgggaaggcccacuucccccgcgagggcguguucguguccaacgggacccacugguucgucacgcagcggaacuucuacgagccgcagaucaucaccaccgacaacaccuucgugagcggcaacugcgacguggucaucggcaucgugaacaacacgguguacgacccccugcagcccgagcuggacuccuucaaggaggagcucgacaaguacuucaagaaccacaccagccccgacgucgaccugggggacaucuccggcaucaacgccagcguggugaacauccagaaggagaucgaccgccugaacgaggucgccaagaaccucaacgagucccugaucgaccugcaggagcucgggaaguacgagcaguacaucaaguggccgugguacaucuggcugggcuucaucgccggccugaucgcgaucgugauggugaccaucaugcucugcugcaugaccagcugcugcuccugccugaaggggugcugcagcugcggcuccugcugcaaguucgacgaggacgacagcgagcccguccugaagggggugaagcuccacuacacgugaggacuaguuauaagacugacuagcccgaugggccucccaacgggcccuccuccccuccuugcaccgagagaucucaaaggcucuuuucagagccaccaaaaaaaaaaaaaaaaaaaaaaaaaaaaaaaaaaaaaaaaaaaaaaaaaaaaaaaaaaaaaaaaaaaaaaaaaaaaaaaaaaaaaaaaaaaaaaaaaaaaa

SEQ ID NO: 24511 - RNA, 4035 nt, Artificial Sequence
  SARS-CoV-2/Wuhan/WIV05/2019__EPI_ISL_402128 spike protein mRNA gc (1-1273)(A222V_D614G)
aggagaaagcuuaccauguucguguuccugguccuccugccccuggugagcucccagugcgugaaccucaccacccgcacgcagcugccgcccgccuacaccaacagcuucacccggggcgucuacuaccccgacaagguguuccgcuccagcgugcugcacuccacccaggaccucuuccugcccuucuucagcaacgucacgugguuccacgccauccacguguccgggaccaacggcaccaagcgguucgacaacccggugcugcccuucaacgacggggucuacuucgcgagcaccgagaaguccaacaucauccgcggcuggaucuucgggacgacccucgacagcaagacccagucccugcugaucgugaacaacgccaccaacguggucaucaaggugugcgaguuccaguucugcaacgaccccuuccucggcguguacuaccacaagaacaacaagagcuggauggaguccgaguuccgggucuacagcuccgccaacaacugcacguucgaguacgugagccagcccuuccugauggaccuggagggcaagcaggggaacuucaagaaccuccgcgaguucguguucaagaacaucgacggcuacuucaagaucuacuccaagcacaccccgaucaaccugguccgggaccugccccagggguucagcguccucgagccccugguggaccugcccaucggcaucaacaucacccgcuuccagacccuccuggcccugcaccgguccuaccucacgccgggggacagcagcuccggcuggaccgcgggcgccgccgccuacuacgugggguaccugcagccccgcaccuuccugcucaaguacaacgagaacggcaccaucacggacgcggucgacugcgcccuggacccccugagcgagaccaagugcacccucaaguccuucaccguggagaaggggaucuaccagacgagcaacuuccgggugcagcccaccgaguccaucguccgcuucccgaacaucaccaaccugugccccuucggcgagguguucaacgccacccgguucgccagcgucuacgccuggaaccgcaagcggaucuccaacugcguggcggacuacagcgugcuguacaacuccgccagcuucuccacguucaagugcuacggcgucagccccaccaagcucaacgaccugugcuucaccaacguguacgccgacuccuucgugauccgcggggacgagguccggcagaucgcccccggccagaccgggaagaucgccgacuacaacuacaagcugccggacgacuucacgggcugcgugaucgcguggaacagcaacaaccucgacuccaaggucgggggcaacuacaacuaccuguaccgccuguuccgcaagagcaaccucaagcccuucgagcgggacaucuccaccgagaucuaccaggccggcagcacccccugcaacgggguggagggcuucaacugcuacuucccccugcaguccuacggguuccagccgaccaacggcgugggguaccagcccuaccggguggucgugcugagcuucgagcuccugcacgcccccgccacggugugcggccccaagaaguccaccaaccuggucaagaacaagugcgugaacuucaacuucaacggccucaccgggaccggcgugcugaccgagagcaacaagaaguuccugccguuccagcaguucgggcgcgacaucgccgacacgaccgacgcgguccgcgacccccagacccuggagauccucgacaucacccccugcagcuucggcgggguguccgugaucacgccgggcaccaacaccagcaaccaggucgccgugcuguaccagggcgugaacugcaccgagguccccguggccauccacgccgaccagcugacgcccaccuggcggguguacuccaccggcagcaacgucuuccagacccgcgccgggugccucaucggcgcggagcacgugaacaacuccuacgagugcgacauccccaucggggccggcaucugcgccagcuaccagacgcagaccaacuccccgcggcgcgcccggagcguggcgucccagagcaucaucgccuacaccaugucccugggcgccgagaacagcgucgccuacuccaacaacagcaucgccauccccaccaacuucacgaucuccgugaccaccgagauccugcccgugagcaugaccaagacgagcgucgacugcaccauguacaucugcggggacuccaccgagugcagcaaccuccugcugcaguacggcuccuucugcacccagcucaaccgcgcgcugacggggaucgccguggagcaggacaagaacacccaggagguguucgcccaggucaagcagaucuacaagacgcccccgaucaaggacuucggcggguucaacuucagccagauccugcccgaccccuccaagcccagcaagcgguccuucaucgaggaccuccuguucaacaaggugacccuggccgacgccggcuucaucaagcaguacggcgacugccucggggacaucgcggcccgcgaccugaucugcgcccagaaguucaacggccugaccgugcucccgccccugcugaccgacgagaugaucgcccaguacaccagcgcccuccuggcggggaccaucacguccggcuggaccuucggggccggcgccgcccugcagauccccuucgcgaugcagauggccuaccgguucaacggcaucggggucacccagaacgugcucuacgagaaccagaagcugaucgccaaccaguucaacagcgccaucggcaagauccaggacucccugagcuccaccgccagcgcgcucgggaagcugcaggacguggucaaccagaacgcccaggcccugaacacgcucgugaagcagcuguccagcaacuucggcgccaucuccagcgugcugaacgacauccucucccgccuggacaaggucgaggccgaggugcagaucgaccggcugaucaccgggcgccuccagagccugcagaccuacgugacccagcagcugauccgggcggccgagauccgcgccagcgccaaccucgccgcgaccaagauguccgagugcguccugggccagagcaagcggguggacuucugcggcaagggguaccaccugauguccuucccccagagcgccccgcacggcguggucuuccuccacgugacguacguccccgcccaggagaagaacuucaccaccgcccccgcgaucugccacgacgggaaggcccacuucccccgcgagggcguguucguguccaacgggacccacugguucgucacgcagcggaacuucuacgagccgcagaucaucaccaccgacaacaccuucgugagcggcaacugcgacguggucaucggcaucgugaacaacacgguguacgacccccugcagcccgagcuggacuccuucaaggaggagcucgacaaguacuucaagaaccacaccagccccgacgucgaccugggggacaucuccggcaucaacgccagcguggugaacauccagaaggagaucgaccgccugaacgaggucgccaagaaccucaacgagucccugaucgaccugcaggagcucgggaaguacgagcaguacaucaaguggccgugguacaucuggcugggcuucaucgccggccugaucgcgaucgugauggugaccaucaugcucugcugcaugaccagcugcugcuccugccugaaggggugcugcagcugcggcuccugcugcaaguucgacgaggacgacagcgagcccguccugaagggggugaagcuccacuacacgugaggacuaguuauaagacugacuagcccgaugggccucccaacgggcccuccuccccuccuugcaccgagagaucucaaaggcucuuuucagagccaccaaaaaaaaaaaaaaaaaaaaaaaaaaaaaaaaaaaaaaaaaaaaaaaaaaaaaaaaaaaaaaaaaaaaaaaaaaaaaaaaaaaaaaaaaaaaaaaaaaaaa

SEQ ID NO: 24512 - RNA, 4035 nt, Artificial Sequence
  SARS-CoV-2/Wuhan/WIV05/2019__EPI_ISL_402128 spike protein mRNA gc (1-1273)(N439K_D614G)
aggagaaagcuuaccauguucguguuccugguccuccugccccuggugagcucccagugcgugaaccucaccacccgcacgcagcugccgcccgccuacaccaacagcuucacccggggcgucuacuaccccgacaagguguuccgcuccagcgugcugcacuccacccaggaccucuuccugcccuucuucagcaacgucacgugguuccacgccauccacguguccgggaccaacggcaccaagcgguucgacaacccggugcugcccuucaacgacggggucuacuucgcgagcaccgagaaguccaacaucauccgcggcuggaucuucgggacgacccucgacagcaagacccagucccugcugaucgugaacaacgccaccaacguggucaucaaggugugcgaguuccaguucugcaacgaccccuuccucggcguguacuaccacaagaacaacaagagcuggauggaguccgaguuccgggucuacagcuccgccaacaacugcacguucgaguacgugagccagcccuuccugauggaccuggagggcaagcaggggaacuucaagaaccuccgcgaguucguguucaagaacaucgacggcuacuucaagaucuacuccaagcacaccccgaucaaccugguccgggaccugccccagggguucagcgcccucgagccccugguggaccugcccaucggcaucaacaucacccgcuuccagacccuccuggcccugcaccgguccuaccucacgccgggggacagcagcuccggcuggaccgcgggcgccgccgccuacuacgugggguaccugcagccccgcaccuuccugcucaaguacaacgagaacggcaccaucacggacgcggucgacugcgcccuggacccccugagcgagaccaagugcacccucaaguccuucaccguggagaaggggaucuaccagacgagcaacuuccgggugcagcccaccgaguccaucguccgcuucccgaacaucaccaaccugugccccuucggcgagguguucaacgccacccgguucgccagcgucuacgccuggaaccgcaagcggaucuccaacugcguggcggacuacagcgugcuguacaacuccgccagcuucuccacguucaagugcuacggcgucagccccaccaagcucaacgaccugugcuucaccaacguguacgccgacuccuucgugauccgcggggacgagguccggcagaucgcccccggccagaccgggaagaucgccgacuacaacuacaagcugccggacgacuucacgggcugcgugaucgcguggaacagcaagaaccucgacuccaaggucgggggcaacuacaacuaccuguaccgccuguuccgcaagagcaaccucaagcccuucgagcgggacaucuccaccgagaucuaccaggccggcagcacccccugcaacgggguggagggcuucaacugcuacuucccccugcaguccuacggguuccagccgaccaacggcgugggguaccagcccuaccggguggucgugcugagcuucgagcuccugcacgcccccgccacggugugcggccccaagaaguccaccaaccuggucaagaacaagugcgugaacuucaacuucaacggccucaccgggaccggcgugcugaccgagagcaacaagaaguuccugccguuccagcaguucgggcgcgacaucgccgacacgaccgacgcgguccgcgacccccagacccuggagauccucgacaucacccccugcagcuucggcgggguguccgugaucacgccgggcaccaacaccagcaaccaggucgccgugcuguaccagggcgugaacugcaccgagguccccguggccauccacgccgaccagcugacgcccaccuggcggguguacuccaccggcagcaacgucuuccagacccgcgccgggugccucaucggcgcggagcacgugaacaacuccuacgagugcgacauccccaucggggccggcaucugcgccagcuaccagacgcagaccaacuccccgcggcgcgcccggagcguggcgucccagagcaucaucgccuacaccaugucccugggcgccgagaacagcgucgccuacuccaacaacagcaucgccauccccaccaacuucacgaucuccgugaccaccgagauccugcccgugagcaugaccaagacgagcgucgacugcaccauguacaucugcggggacuccaccgagugcagcaaccuccugcugcaguacggcuccuucugcacccagcucaaccgcgcgcugacggggaucgccguggagcaggacaagaacacccaggagguguucgcccaggucaagcagaucuacaagacgcccccgaucaaggacuucggcggguucaacuucagccagauccugcccgaccccuccaagcccagcaagcgguccuucaucgaggaccuccuguucaacaaggugacccuggccgacgccggcuucaucaagcaguacggcgacugccucggggacaucgcggcccgcgaccugaucugcgcccagaaguucaacggccugaccgugcucccgccccugcugaccgacgagaugaucgcccaguacaccagcgcccuccuggcggggaccaucacguccggcuggaccuucggggccggcgccgcccugcagauccccuucgcgaugcagauggccuaccgguucaacggcaucggggucacccagaacgugcucuacgagaaccagaagcugaucgccaaccaguucaacagcgccaucggcaagauccaggacucccugagcuccaccgccagcgcgcucgggaagcugcaggacguggucaaccagaacgcccaggcccugaacacgcucgugaagcagcuguccagcaacuucggcgccaucuccagcgugcugaacgacauccucucccgccuggacaaggucgaggccgaggugcagaucgaccggcugaucaccgggcgccuccagagccugcagaccuacgugacccagcagcugauccgggcggccgagauccgcgccagcgccaaccucgccgcgaccaagauguccgagugcguccugggccagagcaagcggguggacuucugcggcaagggguaccaccugauguccuucccccagagcgccccgcacggcguggucuuccuccacgugacguacguccccgcccaggagaagaacuucaccaccgcccccgcgaucugccacgacgggaaggcccacuucccccgcgagggcguguucguguccaacgggacccacugguucgucacgcagcggaacuucuacgagccgcagaucaucaccaccgacaacaccuucgugagcggcaacugcgacguggucaucggcaucgugaacaacacgguguacgacccccugcagcccgagcuggacuccuucaaggaggagcucgacaaguacuucaagaaccacaccagccccgacgucgaccugggggacaucuccggcaucaacgccagcguggugaacauccagaaggagaucgaccgccugaacgaggucgccaagaaccucaacgagucccugaucgaccugcaggagcucgggaaguacgagcaguacaucaaguggccgugguacaucuggcugggcuucaucgccggccugaucgcgaucgugauggugaccaucaugcucugcugcaugaccagcugcugcuccugccugaaggggugcugcagcugcggcuccugcugcaaguucgacgaggacgacagcgagcccguccugaagggggugaagcuccacuacacgugaggacuaguuauaagacugacuagcccgaugggccucccaacgggcccuccuccccuccuugcaccgagagaucucaaaggcucuuuucagagccaccaaaaaaaaaaaaaaaaaaaaaaaaaaaaaaaaaaaaaaaaaaaaaaaaaaaaaaaaaaaaaaaaaaaaaaaaaaaaaaaaaaaaaaaaaaaaaaaaaaaaa

SEQ ID NO: 24513 - RNA, 4035 nt, Artificial Sequence
  SARS-CoV-2/Wuhan/WIV05/2019__EPI_ISL_402128 spike protein mRNA gc (1-1273)(S477N_D614G)
aggagaaagcuuaccauguucguguuccugguccuccugccccuggugagcucccagugcgugaaccucaccacccgcacgcagcugccgcccgccuacaccaacagcuucacccggggcgucuacuaccccgacaagguguuccgcuccagcgugcugcacuccacccaggaccucuuccugcccuucuucagcaacgucacgugguuccacgccauccacguguccgggaccaacggcaccaagcgguucgacaacccggugcugcccuucaacgacggggucuacuucgcgagcaccgagaaguccaacaucauccgcggcuggaucuucgggacgacccucgacagcaagacccagucccugcugaucgugaacaacgccaccaacguggucaucaaggugugcgaguuccaguucugcaacgaccccuuccucggcguguacuaccacaagaacaacaagagcuggauggaguccgaguuccgggucuacagcuccgccaacaacugcacguucgaguacgugagccagcccuuccugauggaccuggagggcaagcaggggaacuucaagaaccuccgcgaguucguguucaagaacaucgacggcuacuucaagaucuacuccaagcacaccccgaucaaccugguccgggaccugccccagggguucagcgcccucgagccccugguggaccugcccaucggcaucaacaucacccgcuuccagacccuccuggcccugcaccgguccuaccucacgccgggggacagcagcuccggcuggaccgcgggcgccgccgccuacuacgugggguaccugcagccccgcaccuuccugcucaaguacaacgagaacggcaccaucacggacgcggucgacugcgcccuggacccccugagcgagaccaagugcacccucaaguccuucaccguggagaaggggaucuaccagacgagcaacuuccgggugcagcccaccgaguccaucguccgcuucccgaacaucaccaaccugugccccuucggcgagguguucaacgccacccgguucgccagcgucuacgccuggaaccgcaagcggaucuccaacugcguggcggacuacagcgugcuguacaacuccgccagcuucuccacguucaagugcuacggcgucagccccaccaagcucaacgaccugugcuucaccaacguguacgccgacuccuucgugauccgcggggacgagguccggcagaucgcccccggccagaccgggaagaucgccgacuacaacuacaagcugccggacgacuucacgggcugcgugaucgcguggaacagcaacaaccucgacuccaaggucgggggcaacuacaacuaccuguaccgccuguuccgcaagagcaaccucaagcccuucgagcgggacaucuccaccgagaucuaccaggccggcaacacccccugcaacgggguggagggcuucaacugcuacuucccccugcaguccuacggguuccagccgaccaacggcgugggguaccagcccuaccggguggucgugcugagcuucgagcuccugcacgcccccgccacggugugcggccccaagaaguccaccaaccuggucaagaacaagugcgugaacuucaacuucaacggccucaccgggaccggcgugcugaccgagagcaacaagaaguuccugccguuccagcaguucgggcgcgacaucgccgacacgaccgacgcgguccgcgacccccagacccuggagauccucgacaucacccccugcagcuucggcgggguguccgugaucacgccgggcaccaacaccagcaaccaggucgccgugcuguaccagggcgugaacugcaccgagguccccguggccauccacgccgaccagcugacgcccaccuggcggguguacuccaccggcagcaacgucuuccagacccgcgccgggugccucaucggcgcggagcacgugaacaacuccuacgagugcgacauccccaucggggccggcaucugcgccagcuaccagacgcagaccaacuccccgcggcgcgcccggagcguggcgucccagagcaucaucgccuacaccaugucccugggcgccgagaacagcgucgccuacuccaacaacagcaucgccauccccaccaacuucacgaucuccgugaccaccgagauccugcccgugagcaugaccaagacgagcgucgacugcaccauguacaucugcggggacuccaccgagugcagcaaccuccugcugcaguacggcuccuucugcacccagcucaaccgcgcgcugacggggaucgccguggagcaggacaagaacacccaggagguguucgcccaggucaagcagaucuacaagacgcccccgaucaaggacuucggcggguucaacuucagccagauccugcccgaccccuccaagcccagcaagcgguccuucaucgaggaccuccuguucaacaaggugacccuggccgacgccggcuucaucaagcaguacggcgacugccucggggacaucgcggcccgcgaccugaucugcgcccagaaguucaacggccugaccgugcucccgccccugcugaccgacgagaugaucgcccaguacaccagcgcccuccuggcggggaccaucacguccggcuggaccuucggggccggcgccgcccugcagauccccuucgcgaugcagauggccuaccgguucaacggcaucggggucacccagaacgugcucuacgagaaccagaagcugaucgccaaccaguucaacagcgccaucggcaagauccaggacucccugagcuccaccgccagcgcgcucgggaagcugcaggacguggucaaccagaacgcccaggcccugaacacgcucgugaagcagcuguccagcaacuucggcgccaucuccagcgugcugaacgacauccucucccgccuggacaaggucgaggccgaggugcagaucgaccggcugaucaccgggcgccuccagagccugcagaccuacgugacccagcagcugauccgggcggccgagauccgcgccagcgccaaccucgccgcgaccaagauguccgagugcguccugggccagagcaagcggguggacuucugcggcaagggguaccaccugauguccuucccccagagcgccccgcacggcguggucuuccuccacgugacguacguccccgcccaggagaagaacuucaccaccgcccccgcgaucugccacgacgggaaggcccacuucccccgcgagggcguguucguguccaacgggacccacugguucgucacgcagcggaacuucuacgagccgcagaucaucaccaccgacaacaccuucgugagcggcaacugcgacguggucaucggcaucgugaacaacacgguguacgacccccugcagcccgagcuggacuccuucaaggaggagcucgacaaguacuucaagaaccacaccagccccgacgucgaccugggggacaucuccggcaucaacgccagcguggugaacauccagaaggagaucgaccgccugaacgaggucgccaagaaccucaacgagucccugaucgaccugcaggagcucgggaaguacgagcaguacaucaaguggccgugguacaucuggcugggcuucaucgccggccugaucgcgaucgugauggugaccaucaugcucugcugcaugaccagcugcugcuccugccugaaggggugcugcagcugcggcuccugcugcaaguucgacgaggacgacagcgagcccguccugaagggggugaagcuccacuacacgugaggacuaguuauaagacugacuagcccgaugggccucccaacgggcccuccuccccuccuugcaccgagagaucucaaaggcucuuuucagagccaccaaaaaaaaaaaaaaaaaaaaaaaaaaaaaaaaaaaaaaaaaaaaaaaaaaaaaaaaaaaaaaaaaaaaaaaaaaaaaaaaaaaaaaaaaaaaaaaaaaaaa

SEQ ID NO: 24514 - RNA, 4035 nt, Artificial Sequence
  SARS-CoV-2/Wuhan/WIV05/2019__EPI_ISL_402128 spike protein mRNA gc (1-1273)(N501Y_D614G)
aggagaaagcuuaccauguucguguuccugguccuccugccccuggugagcucccagugcgugaaccucaccacccgcacgcagcugccgcccgccuacaccaacagcuucacccggggcgucuacuaccccgacaagguguuccgcuccagcgugcugcacuccacccaggaccucuuccugcccuucuucagcaacgucacgugguuccacgccauccacguguccgggaccaacggcaccaagcgguucgacaacccggugcugcccuucaacgacggggucuacuucgcgagcaccgagaaguccaacaucauccgcggcuggaucuucgggacgacccucgacagcaagacccagucccugcugaucgugaacaacgccaccaacguggucaucaaggugugcgaguuccaguucugcaacgaccccuuccucggcguguacuaccacaagaacaacaagagcuggauggaguccgaguuccgggucuacagcuccgccaacaacugcacguucgaguacgugagccagcccuuccugauggaccuggagggcaagcaggggaacuucaagaaccuccgcgaguucguguucaagaacaucgacggcuacuucaagaucuacuccaagcacaccccgaucaaccugguccgggaccugccccagggguucagcgcccucgagccccugguggaccugcccaucggcaucaacaucacccgcuuccagacccuccuggcccugcaccgguccuaccucacgccgggggacagcagcuccggcuggaccgcgggcgccgccgccuacuacgugggguaccugcagccccgcaccuuccugcucaaguacaacgagaacggcaccaucacggacgcggucgacugcgcccuggacccccugagcgagaccaagugcacccucaaguccuucaccguggagaaggggaucuaccagacgagcaacuuccgggugcagcccaccgaguccaucguccgcuucccgaacaucaccaaccugugccccuucggcgagguguucaacgccacccgguucgccagcgucuacgccuggaaccgcaagcggaucuccaacugcguggcggacuacagcgugcuguacaacuccgccagcuucuccacguucaagugcuacggcgucagccccaccaagcucaacgaccugugcuucaccaacguguacgccgacuccuucgugauccgcggggacgagguccggcagaucgcccccggccagaccgggaagaucgccgacuacaacuacaagcugccggacgacuucacgggcugcgugaucgcguggaacagcaacaaccucgacuccaaggucgggggcaacuacaacuaccuguaccgccuguuccgcaagagcaaccucaagcccuucgagcgggacaucuccaccgagaucuaccaggccggcagcacccccugcaacgggguggagggcuucaacugcuacuucccccugcaguccuacggguuccagccgaccuacggcgugggguaccagcccuaccggguggucgugcugagcuucgagcuccugcacgcccccgccacggugugcggccccaagaaguccaccaaccuggucaagaacaagugcgugaacuucaacuucaacggccucaccgggaccggcgugcugaccgagagcaacaagaaguuccugccguuccagcaguucgggcgcgacaucgccgacacgaccgacgcgguccgcgacccccagacccuggagauccucgacaucacccccugcagcuucggcgggguguccgugaucacgccgggcaccaacaccagcaaccaggucgccgugcuguaccagggcgugaacugcaccgagguccccguggccauccacgccgaccagcugacgcccaccuggcggguguacuccaccggcagcaacgucuuccagacccgcgccgggugccucaucggcgcggagcacgugaacaacuccuacgagugcgacauccccaucggggccggcaucugcgccagcuaccagacgcagaccaacuccccgcggcgcgcccggagcguggcgucccagagcaucaucgccuacaccaugucccugggcgccgagaacagcgucgccuacuccaacaacagcaucgccauccccaccaacuucacgaucuccgugaccaccgagauccugcccgugagcaugaccaagacgagcgucgacugcaccauguacaucugcggggacuccaccgagugcagcaaccuccugcugcaguacggcuccuucugcacccagcucaaccgcgcgcugacggggaucgccguggagcaggacaagaacacccaggagguguucgcccaggucaagcagaucuacaagacgcccccgaucaaggacuucggcggguucaacuucagccagauccugcccgaccccuccaagcccagcaagcgguccuucaucgaggaccuccuguucaacaaggugacccuggccgacgccggcuucaucaagcaguacggcgacugccucggggacaucgcggcccgcgaccugaucugcgcccagaaguucaacggccugaccgugcucccgccccugcugaccgacgagaugaucgcccaguacaccagcgcccuccuggcggggaccaucacguccggcuggaccuucggggccggcgccgcccugcagauccccuucgcgaugcagauggccuaccgguucaacggcaucggggucacccagaacgugcucuacgagaaccagaagcugaucgccaaccaguucaacagcgccaucggcaagauccaggacucccugagcuccaccgccagcgcgcucgggaagcugcaggacguggucaaccagaacgcccaggcccugaacacgcucgugaagcagcuguccagcaacuucggcgccaucuccagcgugcugaacgacauccucucccgccuggacaaggucgaggccgaggugcagaucgaccggcugaucaccgggcgccuccagagccugcagaccuacgugacccagcagcugauccgggcggccgagauccgcgccagcgccaaccucgccgcgaccaagauguccgagugcguccugggccagagcaagcggguggacuucugcggcaagggguaccaccugauguccuucccccagagcgccccgcacggcguggucuuccuccacgugacguacguccccgcccaggagaagaacuucaccaccgcccccgcgaucugccacgacgggaaggcccacuucccccgcgagggcguguucguguccaacgggacccacugguucgucacgcagcggaacuucuacgagccgcagaucaucaccaccgacaacaccuucgugagcggcaacugcgacguggucaucggcaucgugaacaacacgguguacgacccccugcagcccgagcuggacuccuucaaggaggagcucgacaaguacuucaagaaccacaccagccccgacgucgaccugggggacaucuccggcaucaacgccagcguggugaacauccagaaggagaucgaccgccugaacgaggucgccaagaaccucaacgagucccugaucgaccugcaggagcucgggaaguacgagcaguacaucaaguggccgugguacaucuggcugggcuucaucgccggccugaucgcgaucgugauggugaccaucaugcucugcugcaugaccagcugcugcuccugccugaaggggugcugcagcugcggcuccugcugcaaguucgacgaggacgacagcgagcccguccugaagggggugaagcuccacuacacgugaggacuaguuauaagacugacuagcccgaugggccucccaacgggcccuccuccccuccuugcaccgagagaucucaaaggcucuuuucagagccaccaaaaaaaaaaaaaaaaaaaaaaaaaaaaaaaaaaaaaaaaaaaaaaaaaaaaaaaaaaaaaaaaaaaaaaaaaaaaaaaaaaaaaaaaaaaaaaaaaaaaa

SEQ ID NO: 24515 - RNA, 4029 nt, Artificial Sequence
  SARS-CoV-2/Wuhan/WIV05/2019__EPI_ISL_402128 spike protein mRNA gc (1-1273)(H69del_V70del_D614G)
aggagaaagcuuaccauguucguguuccugguccuccugccccuggugagcucccagugcgugaaccucaccacccgcacgcagcugccgcccgccuacaccaacagcuucacccggggcgucuacuaccccgacaagguguuccgcuccagcgugcugcacuccacccaggaccucuuccugcccuucuucagcaacgucacgugguuccacgccaucuccgggaccaacggcaccaagcgguucgacaacccggugcugcccuucaacgacggggucuacuucgcgagcaccgagaaguccaacaucauccgcggcuggaucuucgggacgacccucgacagcaagacccagucccugcugaucgugaacaacgccaccaacguggucaucaaggugugcgaguuccaguucugcaacgaccccuuccucggcguguacuaccacaagaacaacaagagcuggauggaguccgaguuccgggucuacagcuccgccaacaacugcacguucgaguacgugagccagcccuuccugauggaccuggagggcaagcaggggaacuucaagaaccuccgcgaguucguguucaagaacaucgacggcuacuucaagaucuacuccaagcacaccccgaucaaccugguccgggaccugccccagggguucagcgcccucgagccccugguggaccugcccaucggcaucaacaucacccgcuuccagacccuccuggcccugcaccgguccuaccucacgccgggggacagcagcuccggcuggaccgcgggcgccgccgccuacuacgugggguaccugcagccccgcaccuuccugcucaaguacaacgagaacggcaccaucacggacgcggucgacugcgcccuggacccccugagcgagaccaagugcacccucaaguccuucaccguggagaaggggaucuaccagacgagcaacuuccgggugcagcccaccgaguccaucguccgcuucccgaacaucaccaaccugugccccuucggcgagguguucaacgccacccgguucgccagcgucuacgccuggaaccgcaagcggaucuccaacugcguggcggacuacagcgugcuguacaacuccgccagcuucuccacguucaagugcuacggcgucagccccaccaagcucaacgaccugugcuucaccaacguguacgccgacuccuucgugauccgcggggacgagguccggcagaucgcccccggccagaccgggaagaucgccgacuacaacuacaagcugccggacgacuucacgggcugcgugaucgcguggaacagcaacaaccucgacuccaaggucgggggcaacuacaacuaccuguaccgccuguuccgcaagagcaaccucaagcccuucgagcgggacaucuccaccgagaucuaccaggccggcagcacccccugcaacgggguggagggcuucaacugcuacuucccccugcaguccuacggguuccagccgaccaacggcgugggguaccagcccuaccggguggucgugcugagcuucgagcuccugcacgcccccgccacggugugcggccccaagaaguccaccaaccuggucaagaacaagugcgugaacuucaacuucaacggccucaccgggaccggcgugcugaccgagagcaacaagaaguuccugccguuccagcaguucgggcgcgacaucgccgacacgaccgacgcgguccgcgacccccagacccuggagauccucgacaucacccccugcagcuucggcgggguguccgugaucacgccgggcaccaacaccagcaaccaggucgccgugcuguaccagggcgugaacugcaccgagguccccguggccauccacgccgaccagcugacgcccaccuggcggguguacuccaccggcagcaacgucuuccagacccgcgccgggugccucaucggcgcggagcacgugaacaacuccuacgagugcgacauccccaucggggccggcaucugcgccagcuaccagacgcagaccaacuccccgcggcgcgcccggagcguggcgucccagagcaucaucgccuacaccaugucccugggcgccgagaacagcgucgccuacuccaacaacagcaucgccauccccaccaacuucacgaucuccgugaccaccgagauccugcccgugagcaugaccaagacgagcgucgacugcaccauguacaucugcggggacuccaccgagugcagcaaccuccugcugcaguacggcuccuucugcacccagcucaaccgcgcgcugacggggaucgccguggagcaggacaagaacacccaggagguguucgcccaggucaagcagaucuacaagacgcccccgaucaaggacuucggcggguucaacuucagccagauccugcccgaccccuccaagcccagcaagcgguccuucaucgaggaccuccuguucaacaaggugacccuggccgacgccggcuucaucaagcaguacggcgacugccucggggacaucgcggcccgcgaccugaucugcgcccagaaguucaacggccugaccgugcucccgccccugcugaccgacgagaugaucgcccaguacaccagcgcccuccuggcggggaccaucacguccggcuggaccuucggggccggcgccgcccugcagauccccuucgcgaugcagauggccuaccgguucaacggcaucggggucacccagaacgugcucuacgagaaccagaagcugaucgccaaccaguucaacagcgccaucggcaagauccaggacucccugagcuccaccgccagcgcgcucgggaagcugcaggacguggucaaccagaacgcccaggcccugaacacgcucgugaagcagcuguccagcaacuucggcgccaucuccagcgugcugaacgacauccucucccgccuggacaaggucgaggccgaggugcagaucgaccggcugaucaccgggcgccuccagagccugcagaccuacgugacccagcagcugauccgggcggccgagauccgcgccagcgccaaccucgccgcgaccaagauguccgagugcguccugggccagagcaagcggguggacuucugcggcaagggguaccaccugauguccuucccccagagcgccccgcacggcguggucuuccuccacgugacguacguccccgcccaggagaagaacuucaccaccgcccccgcgaucugccacgacgggaaggcccacuucccccgcgagggcguguucguguccaacgggacccacugguucgucacgcagcggaacuucuacgagccgcagaucaucaccaccgacaacaccuucgugagcggcaacugcgacguggucaucggcaucgugaacaacacgguguacgacccccugcagcccgagcuggacuccuucaaggaggagcucgacaaguacuucaagaaccacaccagccccgacgucgaccugggggacaucuccggcaucaacgccagcguggugaacauccagaaggagaucgaccgccugaacgaggucgccaagaaccucaacgagucccugaucgaccugcaggagcucgggaaguacgagcaguacaucaaguggccgugguacaucuggcugggcuucaucgccggccugaucgcgaucgugauggugaccaucaugcucugcugcaugaccagcugcugcuccugccugaaggggugcugcagcugcggcuccugcugcaaguucgacgaggacgacagcgagcccguccugaagggggugaagcuccacuacacgugaggacuaguuauaagacugacuagcccgaugggccucccaacgggcccuccuccccuccuugcaccgagagaucucaaaggcucuuuucagagccaccaaaaaaaaaaaaaaaaaaaaaaaaaaaaaaaaaaaaaaaaaaaaaaaaaaaaaaaaaaaaaaaaaaaaaaaaaaaaaaaaaaaaaaaaaaaaaaaaaaaaa

SEQ ID NO: 24516 - RNA, 4035 nt, Artificial Sequence
  SARS-CoV-2/Wuhan/WIV05/2019__EPI_ISL_402128 spike protein mRNA gc (1-1273)(Y453F_D614G)
aggagaaagcuuaccauguucguguuccugguccuccugccccuggugagcucccagugcgugaaccucaccacccgcacgcagcugccgcccgccuacaccaacagcuucacccggggcgucuacuaccccgacaagguguuccgcuccagcgugcugcacuccacccaggaccucuuccugcccuucuucagcaacgucacgugguuccacgccauccacguguccgggaccaacggcaccaagcgguucgacaacccggugcugcccuucaacgacggggucuacuucgcgagcaccgagaaguccaacaucauccgcggcuggaucuucgggacgacccucgacagcaagacccagucccugcugaucgugaacaacgccaccaacguggucaucaaggugugcgaguuccaguucugcaacgaccccuuccucggcguguacuaccacaagaacaacaagagcuggauggaguccgaguuccgggucuacagcuccgccaacaacugcacguucgaguacgugagccagcccuuccugauggaccuggagggcaagcaggggaacuucaagaaccuccgcgaguucguguucaagaacaucgacggcuacuucaagaucuacuccaagcacaccccgaucaaccugguccgggaccugccccagggguucagcgcccucgagccccugguggaccugcccaucggcaucaacaucacccgcuuccagacccuccuggcccugcaccgguccuaccucacgccgggggacagcagcuccggcuggaccgcgggcgccgccgccuacuacgugggguaccugcagccccgcaccuuccugcucaaguacaacgagaacggcaccaucacggacgcggucgacugcgcccuggacccccugagcgagaccaagugcacccucaaguccuucaccguggagaaggggaucuaccagacgagcaacuuccgggugcagcccaccgaguccaucguccgcuucccgaacaucaccaaccugugccccuucggcgagguguucaacgccacccgguucgccagcgucuacgccuggaaccgcaagcggaucuccaacugcguggcggacuacagcgugcuguacaacuccgccagcuucuccacguucaagugcuacggcgucagccccaccaagcucaacgaccugugcuucaccaacguguacgccgacuccuucgugauccgcggggacgagguccggcagaucgcccccggccagaccgggaagaucgccgacuacaacuacaagcugccggacgacuucacgggcugcgugaucgcguggaacagcaacaaccucgacuccaaggucgggggcaacuacaacuaccuguuccgccuguuccgcaagagcaaccucaagcccuucgagcgggacaucuccaccgagaucuaccaggccggcagcacccccugcaacgggguggagggcuucaacugcuacuucccccugcaguccuacggguuccagccgaccaacggcgugggguaccagcccuaccggguggucgugcugagcuucgagcuccugcacgcccccgccacggugugcggccccaagaaguccaccaaccuggucaagaacaagugcgugaacuucaacuucaacggccucaccgggaccggcgugcugaccgagagcaacaagaaguuccugccguuccagcaguucgggcgcgacaucgccgacacgaccgacgcgguccgcgacccccagacccuggagauccucgacaucacccccugcagcuucggcgggguguccgugaucacgccgggcaccaacaccagcaaccaggucgccgugcuguaccagggcgugaacugcaccgagguccccguggccauccacgccgaccagcugacgcccaccuggcggguguacuccaccggcagcaacgucuuccagacccgcgccgggugccucaucggcgcggagcacgugaacaacuccuacgagugcgacauccccaucggggccggcaucugcgccagcuaccagacgcagaccaacuccccgcggcgcgcccggagcguggcgucccagagcaucaucgccuacaccaugucccugggcgccgagaacagcgucgccuacuccaacaacagcaucgccauccccaccaacuucacgaucuccgugaccaccgagauccugcccgugagcaugaccaagacgagcgucgacugcaccauguacaucugcggggacuccaccgagugcagcaaccuccugcugcaguacggcuccuucugcacccagcucaaccgcgcgcugacggggaucgccguggagcaggacaagaacacccaggagguguucgcccaggucaagcagaucuacaagacgcccccgaucaaggacuucggcggguucaacuucagccagauccugcccgaccccuccaagcccagcaagcgguccuucaucgaggaccuccuguucaacaaggugacccuggccgacgccggcuucaucaagcaguacggcgacugccucggggacaucgcggcccgcgaccugaucugcgcccagaaguucaacggccugaccgugcucccgccccugcugaccgacgagaugaucgcccaguacaccagcgcccuccuggcggggaccaucacguccggcuggaccuucggggccggcgccgcccugcagauccccuucgcgaugcagauggccuaccgguucaacggcaucggggucacccagaacgugcucuacgagaaccagaagcugaucgccaaccaguucaacagcgccaucggcaagauccaggacucccugagcuccaccgccagcgcgcucgggaagcugcaggacguggucaaccagaacgcccaggcccugaacacgcucgugaagcagcuguccagcaacuucggcgccaucuccagcgugcugaacgacauccucucccgccuggacaaggucgaggccgaggugcagaucgaccggcugaucaccgggcgccuccagagccugcagaccuacgugacccagcagcugauccgggcggccgagauccgcgccagcgccaaccucgccgcgaccaagauguccgagugcguccugggccagagcaagcggguggacuucugcggcaagggguaccaccugauguccuucccccagagcgccccgcacggcguggucuuccuccacgugacguacguccccgcccaggagaagaacuucaccaccgcccccgcgaucugccacgacgggaaggcccacuucccccgcgagggcguguucguguccaacgggacccacugguucgucacgcagcggaacuucuacgagccgcagaucaucaccaccgacaacaccuucgugagcggcaacugcgacguggucaucggcaucgugaacaacacgguguacgacccccugcagcccgagcuggacuccuucaaggaggagcucgacaaguacuucaagaaccacaccagccccgacgucgaccugggggacaucuccggcaucaacgccagcguggugaacauccagaaggagaucgaccgccugaacgaggucgccaagaaccucaacgagucccugaucgaccugcaggagcucgggaaguacgagcaguacaucaaguggccgugguacaucuggcugggcuucaucgccggccugaucgcgaucgugauggugaccaucaugcucugcugcaugaccagcugcugcuccugccugaaggggugcugcagcugcggcuccugcugcaaguucgacgaggacgacagcgagcccguccugaagggggugaagcuccacuacacgugaggacuaguuauaagacugacuagcccgaugggccucccaacgggcccuccuccccuccuugcaccgagagaucucaaaggcucuuuucagagccaccaaaaaaaaaaaaaaaaaaaaaaaaaaaaaaaaaaaaaaaaaaaaaaaaaaaaaaaaaaaaaaaaaaaaaaaaaaaaaaaaaaaaaaaaaaaaaaaaaaaaa

SEQ ID NO: 24517 - RNA, 4035 nt, Artificial Sequence
  SARS-CoV-2/Wuhan/WIV05/2019__EPI_ISL_402128 spike protein mRNA gc (1-1273)(D614G_I692V)
aggagaaagcuuaccauguucguguuccugguccuccugccccuggugagcucccagugcgugaaccucaccacccgcacgcagcugccgcccgccuacaccaacagcuucacccggggcgucuacuaccccgacaagguguuccgcuccagcgugcugcacuccacccaggaccucuuccugcccuucuucagcaacgucacgugguuccacgccauccacguguccgggaccaacggcaccaagcgguucgacaacccggugcugcccuucaacgacggggucuacuucgcgagcaccgagaaguccaacaucauccgcggcuggaucuucgggacgacccucgacagcaagacccagucccugcugaucgugaacaacgccaccaacguggucaucaaggugugcgaguuccaguucugcaacgaccccuuccucggcguguacuaccacaagaacaacaagagcuggauggaguccgaguuccgggucuacagcuccgccaacaacugcacguucgaguacgugagccagcccuuccugauggaccuggagggcaagcaggggaacuucaagaaccuccgcgaguucguguucaagaacaucgacggcuacuucaagaucuacuccaagcacaccccgaucaaccugguccgggaccugccccagggguucagcgcccucgagccccugguggaccugcccaucggcaucaacaucacccgcuuccagacccuccuggcccugcaccgguccuaccucacgccgggggacagcagcuccggcuggaccgcgggcgccgccgccuacuacgugggguaccugcagccccgcaccuuccugcucaaguacaacgagaacggcaccaucacggacgcggucgacugcgcccuggacccccugagcgagaccaagugcacccucaaguccuucaccguggagaaggggaucuaccagacgagcaacuuccgggugcagcccaccgaguccaucguccgcuucccgaacaucaccaaccugugccccuucggcgagguguucaacgccacccgguucgccagcgucuacgccuggaaccgcaagcggaucuccaacugcguggcggacuacagcgugcuguacaacuccgccagcuucuccacguucaagugcuacggcgucagccccaccaagcucaacgaccugugcuucaccaacguguacgccgacuccuucgugauccgcggggacgagguccggcagaucgcccccggccagaccgggaagaucgccgacuacaacuacaagcugccggacgacuucacgggcugcgugaucgcguggaacagcaacaaccucgacuccaaggucgggggcaacuacaacuaccuguaccgccuguuccgcaagagcaaccucaagcccuucgagcgggacaucuccaccgagaucuaccaggccggcagcacccccugcaacgggguggagggcuucaacugcuacuucccccugcaguccuacggguuccagccgaccaacggcgugggguaccagcccuaccggguggucgugcugagcuucgagcuccugcacgcccccgccacggugugcggccccaagaaguccaccaaccuggucaagaacaagugcgugaacuucaacuucaacggccucaccgggaccggcgugcugaccgagagcaacaagaaguuccugccguuccagcaguucgggcgcgacaucgccgacacgaccgacgcgguccgcgacccccagacccuggagauccucgacaucacccccugcagcuucggcgggguguccgugaucacgccgggcaccaacaccagcaaccaggucgccgugcuguaccagggcgugaacugcaccgagguccccguggccauccacgccgaccagcugacgcccaccuggcggguguacuccaccggcagcaacgucuuccagacccgcgccgggugccucaucggcgcggagcacgugaacaacuccuacgagugcgacauccccaucggggccggcaucugcgccagcuaccagacgcagaccaacuccccgcggcgcgcccggagcguggcgucccagagcgucaucgccuacaccaugucccugggcgccgagaacagcgucgccuacuccaacaacagcaucgccauccccaccaacuucacgaucuccgugaccaccgagauccugcccgugagcaugaccaagacgagcgucgacugcaccauguacaucugcggggacuccaccgagugcagcaaccuccugcugcaguacggcuccuucugcacccagcucaaccgcgcgcugacggggaucgccguggagcaggacaagaacacccaggagguguucgcccaggucaagcagaucuacaagacgcccccgaucaaggacuucggcggguucaacuucagccagauccugcccgaccccuccaagcccagcaagcgguccuucaucgaggaccuccuguucaacaaggugacccuggccgacgccggcuucaucaagcaguacggcgacugccucggggacaucgcggcccgcgaccugaucugcgcccagaaguucaacggccugaccgugcucccgccccugcugaccgacgagaugaucgcccaguacaccagcgcccuccuggcggggaccaucacguccggcuggaccuucggggccggcgccgcccugcagauccccuucgcgaugcagauggccuaccgguucaacggcaucggggucacccagaacgugcucuacgagaaccagaagcugaucgccaaccaguucaacagcgccaucggcaagauccaggacucccugagcuccaccgccagcgcgcucgggaagcugcaggacguggucaaccagaacgcccaggcccugaacacgcucgugaagcagcuguccagcaacuucggcgccaucuccagcgugcugaacgacauccucucccgccuggacaaggucgaggccgaggugcagaucgaccggcugaucaccgggcgccuccagagccugcagaccuacgugacccagcagcugauccgggcggccgagauccgcgccagcgccaaccucgccgcgaccaagauguccgagugcguccugggccagagcaagcggguggacuucugcggcaagggguaccaccugauguccuucccccagagcgccccgcacggcguggucuuccuccacgugacguacguccccgcccaggagaagaacuucaccaccgcccccgcgaucugccacgacgggaaggcccacuucccccgcgagggcguguucguguccaacgggacccacugguucgucacgcagcggaacuucuacgagccgcagaucaucaccaccgacaacaccuucgugagcggcaacugcgacguggucaucggcaucgugaacaacacgguguacgacccccugcagcccgagcuggacuccuucaaggaggagcucgacaaguacuucaagaaccacaccagccccgacgucgaccugggggacaucuccggcaucaacgccagcguggugaacauccagaaggagaucgaccgccugaacgaggucgccaagaaccucaacgagucccugaucgaccugcaggagcucgggaaguacgagcaguacaucaaguggccgugguacaucuggcugggcuucaucgccggccugaucgcgaucgugauggugaccaucaugcucugcugcaugaccagcugcugcuccugccugaaggggugcugcagcugcggcuccugcugcaaguucgacgaggacgacagcgagcccguccugaagggggugaagcuccacuacacgugaggacuaguuauaagacugacuagcccgaugggccucccaacgggcccuccuccccuccuugcaccgagagaucucaaaggcucuuuucagagccaccaaaaaaaaaaaaaaaaaaaaaaaaaaaaaaaaaaaaaaaaaaaaaaaaaaaaaaaaaaaaaaaaaaaaaaaaaaaaaaaaaaaaaaaaaaaaaaaaaaaaa

SEQ ID NO: 24518 - RNA, 4035 nt, Artificial Sequence
  SARS-CoV-2/Wuhan/WIV05/2019__EPI_ISL_402128 spike protein mRNA gc (1-1273)(D614G_M1229I)
aggagaaagcuuaccauguucguguuccugguccuccugccccuggugagcucccagugcgugaaccucaccacccgcacgcagcugccgcccgccuacaccaacagcuucacccggggcgucuacuaccccgacaagguguuccgcuccagcgugcugcacuccacccaggaccucuuccugcccuucuucagcaacgucacgugguuccacgccauccacguguccgggaccaacggcaccaagcgguucgacaacccggugcugcccuucaacgacggggucuacuucgcgagcaccgagaaguccaacaucauccgcggcuggaucuucgggacgacccucgacagcaagacccagucccugcugaucgugaacaacgccaccaacguggucaucaaggugugcgaguuccaguucugcaacgaccccuuccucggcguguacuaccacaagaacaacaagagcuggauggaguccgaguuccgggucuacagcuccgccaacaacugcacguucgaguacgugagccagcccuuccugauggaccuggagggcaagcaggggaacuucaagaaccuccgcgaguucguguucaagaacaucgacggcuacuucaagaucuacuccaagcacaccccgaucaaccugguccgggaccugccccagggguucagcgcccucgagccccugguggaccugcccaucggcaucaacaucacccgcuuccagacccuccuggcccugcaccgguccuaccucacgccgggggacagcagcuccggcuggaccgcgggcgccgccgccuacuacgugggguaccugcagccccgcaccuuccugcucaaguacaacgagaacggcaccaucacggacgcggucgacugcgcccuggacccccugagcgagaccaagugcacccucaaguccuucaccguggagaaggggaucuaccagacgagcaacuuccgggugcagcccaccgaguccaucguccgcuucccgaacaucaccaaccugugccccuucggcgagguguucaacgccacccgguucgccagcgucuacgccuggaaccgcaagcggaucuccaacugcguggcggacuacagcgugcuguacaacuccgccagcuucuccacguucaagugcuacggcgucagccccaccaagcucaacgaccugugcuucaccaacguguacgccgacuccuucgugauccgcggggacgagguccggcagaucgcccccggccagaccgggaagaucgccgacuacaacuacaagcugccggacgacuucacgggcugcgugaucgcguggaacagcaacaaccucgacuccaaggucgggggcaacuacaacuaccuguaccgccuguuccgcaagagcaaccucaagcccuucgagcgggacaucuccaccgagaucuaccaggccggcagcacccccugcaacgggguggagggcuucaacugcuacuucccccugcaguccuacggguuccagccgaccaacggcgugggguaccagcccuaccggguggucgugcugagcuucgagcuccugcacgcccccgccacggugugcggccccaagaaguccaccaaccuggucaagaacaagugcgugaacuucaacuucaacggccucaccgggaccggcgugcugaccgagagcaacaagaaguuccugccguuccagcaguucgggcgcgacaucgccgacacgaccgacgcgguccgcgacccccagacccuggagauccucgacaucacccccugcagcuucggcgggguguccgugaucacgccgggcaccaacaccagcaaccaggucgccgugcuguaccagggcgugaacugcaccgagguccccguggccauccacgccgaccagcugacgcccaccuggcggguguacuccaccggcagcaacgucuuccagacccgcgccgggugccucaucggcgcggagcacgugaacaacuccuacgagugcgacauccccaucggggccggcaucugcgccagcuaccagacgcagaccaacuccccgcggcgcgcccggagcguggcgucccagagcaucaucgccuacaccaugucccugggcgccgagaacagcgucgccuacuccaacaacagcaucgccauccccaccaacuucacgaucuccgugaccaccgagauccugcccgugagcaugaccaagacgagcgucgacugcaccauguacaucugcggggacuccaccgagugcagcaaccuccugcugcaguacggcuccuucugcacccagcucaaccgcgcgcugacggggaucgccguggagcaggacaagaacacccaggagguguucgcccaggucaagcagaucuacaagacgcccccgaucaaggacuucggcggguucaacuucagccagauccugcccgaccccuccaagcccagcaagcgguccuucaucgaggaccuccuguucaacaaggugacccuggccgacgccggcuucaucaagcaguacggcgacugccucggggacaucgcggcccgcgaccugaucugcgcccagaaguucaacggccugaccgugcucccgccccugcugaccgacgagaugaucgcccaguacaccagcgcccuccuggcggggaccaucacguccggcuggaccuucggggccggcgccgcccugcagauccccuucgcgaugcagauggccuaccgguucaacggcaucggggucacccagaacgugcucuacgagaaccagaagcugaucgccaaccaguucaacagcgccaucggcaagauccaggacucccugagcuccaccgccagcgcgcucgggaagcugcaggacguggucaaccagaacgcccaggcccugaacacgcucgugaagcagcuguccagcaacuucggcgccaucuccagcgugcugaacgacauccucucccgccuggacaaggucgaggccgaggugcagaucgaccggcugaucaccgggcgccuccagagccugcagaccuacgugacccagcagcugauccgggcggccgagauccgcgccagcgccaaccucgccgcgaccaagauguccgagugcguccugggccagagcaagcggguggacuucugcggcaagggguaccaccugauguccuucccccagagcgccccgcacggcguggucuuccuccacgugacguacguccccgcccaggagaagaacuucaccaccgcccccgcgaucugccacgacgggaaggcccacuucccccgcgagggcguguucguguccaacgggacccacugguucgucacgcagcggaacuucuacgagccgcagaucaucaccaccgacaacaccuucgugagcggcaacugcgacguggucaucggcaucgugaacaacacgguguacgacccccugcagcccgagcuggacuccuucaaggaggagcucgacaaguacuucaagaaccacaccagccccgacgucgaccugggggacaucuccggcaucaacgccagcguggugaacauccagaaggagaucgaccgccugaacgaggucgccaagaaccucaacgagucccugaucgaccugcaggagcucgggaaguacgagcaguacaucaaguggccgugguacaucuggcugggcuucaucgccggccugaucgcgaucgugaucgugaccaucaugcucugcugcaugaccagcugcugcuccugccugaaggggugcugcagcugcggcuccugcugcaaguucgacgaggacgacagcgagcccguccugaagggggugaagcuccacuacacgugaggacuaguuauaagacugacuagcccgaugggccucccaacgggcccuccuccccuccuugcaccgagagaucucaaaggcucuuuucagagccaccaaaaaaaaaaaaaaaaaaaaaaaaaaaaaaaaaaaaaaaaaaaaaaaaaaaaaaaaaaaaaaaaaaaaaaaaaaaaaaaaaaaaaaaaaaaaaaaaaaaaa

SEQ ID NO: 24519 - RNA, 4029 nt, Artificial Sequence
  SARS-CoV-2/Wuhan/WIV05/2019__EPI_ISL_402128 spike protein mRNA gc (1-1273)(H69del_V70del_A222V_Y453F_S477N_D614G_I692V)
aggagaaagcuuaccauguucguguuccugguccuccugccccuggugagcucccagugcgugaaccucaccacccgcacgcagcugccgcccgccuacaccaacagcuucacccggggcgucuacuaccccgacaagguguuccgcuccagcgugcugcacuccacccaggaccucuuccugcccuucuucagcaacgucacgugguuccacgccaucuccgggaccaacggcaccaagcgguucgacaacccggugcugcccuucaacgacggggucuacuucgcgagcaccgagaaguccaacaucauccgcggcuggaucuucgggacgacccucgacagcaagacccagucccugcugaucgugaacaacgccaccaacguggucaucaaggugugcgaguuccaguucugcaacgaccccuuccucggcguguacuaccacaagaacaacaagagcuggauggaguccgaguuccgggucuacagcuccgccaacaacugcacguucgaguacgugagccagcccuuccugauggaccuggagggcaagcaggggaacuucaagaaccuccgcgaguucguguucaagaacaucgacggcuacuucaagaucuacuccaagcacaccccgaucaaccugguccgggaccugccccagggguucagcguccucgagccccugguggaccugcccaucggcaucaacaucacccgcuuccagacccuccuggcccugcaccgguccuaccucacgccgggggacagcagcuccggcuggaccgcgggcgccgccgccuacuacgugggguaccugcagccccgcaccuuccugcucaaguacaacgagaacggcaccaucacggacgcggucgacugcgcccuggacccccugagcgagaccaagugcacccucaaguccuucaccguggagaaggggaucuaccagacgagcaacuuccgggugcagcccaccgaguccaucguccgcuucccgaacaucaccaaccugugccccuucggcgagguguucaacgccacccgguucgccagcgucuacgccuggaaccgcaagcggaucuccaacugcguggcggacuacagcgugcuguacaacuccgccagcuucuccacguucaagugcuacggcgucagccccaccaagcucaacgaccugugcuucaccaacguguacgccgacuccuucgugauccgcggggacgagguccggcagaucgcccccggccagaccgggaagaucgccgacuacaacuacaagcugccggacgacuucacgggcugcgugaucgcguggaacagcaacaaccucgacuccaaggucgggggcaacuacaacuaccuguuccgccuguuccgcaagagcaaccucaagcccuucgagcgggacaucuccaccgagaucuaccaggccggcaacacccccugcaacgggguggagggcuucaacugcuacuucccccugcaguccuacggguuccagccgaccaacggcgugggguaccagcccuaccggguggucgugcugagcuucgagcuccugcacgcccccgccacggugugcggccccaagaaguccaccaaccuggucaagaacaagugcgugaacuucaacuucaacggccucaccgggaccggcgugcugaccgagagcaacaagaaguuccugccguuccagcaguucgggcgcgacaucgccgacacgaccgacgcgguccgcgacccccagacccuggagauccucgacaucacccccugcagcuucggcgggguguccgugaucacgccgggcaccaacaccagcaaccaggucgccgugcuguaccagggcgugaacugcaccgagguccccguggccauccacgccgaccagcugacgcccaccuggcggguguacuccaccggcagcaacgucuuccagacccgcgccgggugccucaucggcgcggagcacgugaacaacuccuacgagugcgacauccccaucggggccggcaucugcgccagcuaccagacgcagaccaacuccccgcggcgcgcccggagcguggcgucccagagcgucaucgccuacaccaugucccugggcgccgagaacagcgucgccuacuccaacaacagcaucgccauccccaccaacuucacgaucuccgugaccaccgagauccugcccgugagcaugaccaagacgagcgucgacugcaccauguacaucugcggggacuccaccgagugcagcaaccuccugcugcaguacggcuccuucugcacccagcucaaccgcgcgcugacggggaucgccguggagcaggacaagaacacccaggagguguucgcccaggucaagcagaucuacaagacgcccccgaucaaggacuucggcggguucaacuucagccagauccugcccgaccccuccaagcccagcaagcgguccuucaucgaggaccuccuguucaacaaggugacccuggccgacgccggcuucaucaagcaguacggcgacugccucggggacaucgcggcccgcgaccugaucugcgcccagaaguucaacggccugaccgugcucccgccccugcugaccgacgagaugaucgcccaguacaccagcgcccuccuggcggggaccaucacguccggcuggaccuucggggccggcgccgcccugcagauccccuucgcgaugcagauggccuaccgguucaacggcaucggggucacccagaacgugcucuacgagaaccagaagcugaucgccaaccaguucaacagcgccaucggcaagauccaggacucccugagcuccaccgccagcgcgcucgggaagcugcaggacguggucaaccagaacgcccaggcccugaacacgcucgugaagcagcuguccagcaacuucggcgccaucuccagcgugcugaacgacauccucucccgccuggacaaggucgaggccgaggugcagaucgaccggcugaucaccgggcgccuccagagccugcagaccuacgugacccagcagcugauccgggcggccgagauccgcgccagcgccaaccucgccgcgaccaagauguccgagugcguccugggccagagcaagcggguggacuucugcggcaagggguaccaccugauguccuucccccagagcgccccgcacggcguggucuuccuccacgugacguacguccccgcccaggagaagaacuucaccaccgcccccgcgaucugccacgacgggaaggcccacuucccccgcgagggcguguucguguccaacgggacccacugguucgucacgcagcggaacuucuacgagccgcagaucaucaccaccgacaacaccuucgugagcggcaacugcgacguggucaucggcaucgugaacaacacgguguacgacccccugcagcccgagcuggacuccuucaaggaggagcucgacaaguacuucaagaaccacaccagccccgacgucgaccugggggacaucuccggcaucaacgccagcguggugaacauccagaaggagaucgaccgccugaacgaggucgccaagaaccucaacgagucccugaucgaccugcaggagcucgggaaguacgagcaguacaucaaguggccgugguacaucuggcugggcuucaucgccggccugaucgcgaucgugauggugaccaucaugcucugcugcaugaccagcugcugcuccugccugaaggggugcugcagcugcggcuccugcugcaaguucgacgaggacgacagcgagcccguccugaagggggugaagcuccacuacacgugaggacuaguuauaagacugacuagcccgaugggccucccaacgggcccuccuccccuccuugcaccgagagaucucaaaggcucuuuucagagccaccaaaaaaaaaaaaaaaaaaaaaaaaaaaaaaaaaaaaaaaaaaaaaaaaaaaaaaaaaaaaaaaaaaaaaaaaaaaaaaaaaaaaaaaaaaaaaaaaaaaaa

SEQ ID NO: 24520 - RNA, 4029 nt, Artificial Sequence
  SARS-CoV-2/Wuhan/WIV05/2019__EPI_ISL_402128 spike protein mRNA gc (1-1273)(H69del_V70del_Y453F_D614G_I692V_M1229I)
aggagaaagcuuaccauguucguguuccugguccuccugccccuggugagcucccagugcgugaaccucaccacccgcacgcagcugccgcccgccuacaccaacagcuucacccggggcgucuacuaccccgacaagguguuccgcuccagcgugcugcacuccacccaggaccucuuccugcccuucuucagcaacgucacgugguuccacgccaucuccgggaccaacggcaccaagcgguucgacaacccggugcugcccuucaacgacggggucuacuucgcgagcaccgagaaguccaacaucauccgcggcuggaucuucgggacgacccucgacagcaagacccagucccugcugaucgugaacaacgccaccaacguggucaucaaggugugcgaguuccaguucugcaacgaccccuuccucggcguguacuaccacaagaacaacaagagcuggauggaguccgaguuccgggucuacagcuccgccaacaacugcacguucgaguacgugagccagcccuuccugauggaccuggagggcaagcaggggaacuucaagaaccuccgcgaguucguguucaagaacaucgacggcuacuucaagaucuacuccaagcacaccccgaucaaccugguccgggaccugccccagggguucagcgcccucgagccccugguggaccugcccaucggcaucaacaucacccgcuuccagacccuccuggcccugcaccgguccuaccucacgccgggggacagcagcuccggcuggaccgcgggcgccgccgccuacuacgugggguaccugcagccccgcaccuuccugcucaaguacaacgagaacggcaccaucacggacgcggucgacugcgcccuggacccccugagcgagaccaagugcacccucaaguccuucaccguggagaaggggaucuaccagacgagcaacuuccgggugcagcccaccgaguccaucguccgcuucccgaacaucaccaaccugugccccuucggcgagguguucaacgccacccgguucgccagcgucuacgccuggaaccgcaagcggaucuccaacugcguggcggacuacagcgugcuguacaacuccgccagcuucuccacguucaagugcuacggcgucagccccaccaagcucaacgaccugugcuucaccaacguguacgccgacuccuucgugauccgcggggacgagguccggcagaucgcccccggccagaccgggaagaucgccgacuacaacuacaagcugccggacgacuucacgggcugcgugaucgcguggaacagcaacaaccucgacuccaaggucgggggcaacuacaacuaccuguuccgccuguuccgcaagagcaaccucaagcccuucgagcgggacaucuccaccgagaucuaccaggccggcagcacccccugcaacgggguggagggcuucaacugcuacuucccccugcaguccuacggguuccagccgaccaacggcgugggguaccagcccuaccggguggucgugcugagcuucgagcuccugcacgcccccgccacggugugcggccccaagaaguccaccaaccuggucaagaacaagugcgugaacuucaacuucaacggccucaccgggaccggcgugcugaccgagagcaacaagaaguuccugccguuccagcaguucgggcgcgacaucgccgacacgaccgacgcgguccgcgacccccagacccuggagauccucgacaucacccccugcagcuucggcgggguguccgugaucacgccgggcaccaacaccagcaaccaggucgccgugcuguaccagggcgugaacugcaccgagguccccguggccauccacgccgaccagcugacgcccaccuggcggguguacuccaccggcagcaacgucuuccagacccgcgccgggugccucaucggcgcggagcacgugaacaacuccuacgagugcgacauccccaucggggccggcaucugcgccagcuaccagacgcagaccaacuccccgcggcgcgcccggagcguggcgucccagagcgugaucgccuacaccaugucccugggcgccgagaacagcgucgccuacuccaacaacagcaucgccauccccaccaacuucacgaucuccgugaccaccgagauccugcccgugagcaugaccaagacgagcgucgacugcaccauguacaucugcggggacuccaccgagugcagcaaccuccugcugcaguacggcuccuucugcacccagcucaaccgcgcgcugacggggaucgccguggagcaggacaagaacacccaggagguguucgcccaggucaagcagaucuacaagacgcccccgaucaaggacuucggcggguucaacuucagccagauccugcccgaccccuccaagcccagcaagcgguccuucaucgaggaccuccuguucaacaaggugacccuggccgacgccggcuucaucaagcaguacggcgacugccucggggacaucgcggcccgcgaccugaucugcgcccagaaguucaacggccugaccgugcucccgccccugcugaccgacgagaugaucgcccaguacaccagcgcccuccuggcggggaccaucacguccggcuggaccuucggggccggcgccgcccugcagauccccuucgcgaugcagauggccuaccgguucaacggcaucggggucacccagaacgugcucuacgagaaccagaagcugaucgccaaccaguucaacagcgccaucggcaagauccaggacucccugagcuccaccgccagcgcgcucgggaagcugcaggacguggucaaccagaacgcccaggcccugaacacgcucgugaagcagcuguccagcaacuucggcgccaucuccagcgugcugaacgacauccucucccgccuggacaaggucgaggccgaggugcagaucgaccggcugaucaccgggcgccuccagagccugcagaccuacgugacccagcagcugauccgggcggccgagauccgcgccagcgccaaccucgccgcgaccaagauguccgagugcguccugggccagagcaagcggguggacuucugcggcaagggguaccaccugauguccuucccccagagcgccccgcacggcguggucuuccuccacgugacguacguccccgcccaggagaagaacuucaccaccgcccccgcgaucugccacgacgggaaggcccacuucccccgcgagggcguguucguguccaacgggacccacugguucgucacgcagcggaacuucuacgagccgcagaucaucaccaccgacaacaccuucgugagcggcaacugcgacguggucaucggcaucgugaacaacacgguguacgacccccugcagcccgagcuggacuccuucaaggaggagcucgacaaguacuucaagaaccacaccagccccgacgucgaccugggggacaucuccggcaucaacgccagcguggugaacauccagaaggagaucgaccgccugaacgaggucgccaagaaccucaacgagucccugaucgaccugcaggagcucgggaaguacgagcaguacaucaaguggccgugguacaucuggcugggcuucaucgccggccugaucgcgaucgugaucgugaccaucaugcucugcugcaugaccagcugcugcuccugccugaaggggugcugcagcugcggcuccugcugcaaguucgacgaggacgacagcgagcccguccugaagggggugaagcuccacuacacgugaggacuaguuauaagacugacuagcccgaugggccucccaacgggcccuccuccccuccuugcaccgagagaucucaaaggcucuuuucagagccaccaaaaaaaaaaaaaaaaaaaaaaaaaaaaaaaaaaaaaaaaaaaaaaaaaaaaaaaaaaaaaaaaaaaaaaaaaaaaaaaaaaaaaaaaaaaaaaaaaaaaa

SEQ ID NO: 24521 - RNA, 4026 nt, Artificial Sequence
  SARS-CoV-2/Wuhan/WIV05/2019__EPI_ISL_402128 spike protein mRNA gc (1-1273)(H69del_V70del_Y144del_N501Y_A570D_D614G_P681H_T716I_S982 A_D1118H)
aggagaaagcuuaccauguucguguuccugguccuccugccccuggugagcucccagugcgugaaccucaccacccgcacgcagcugccgcccgccuacaccaacagcuucacccggggcgucuacuaccccgacaagguguuccgcuccagcgugcugcacuccacccaggaccucuuccugcccuucuucagcaacgucacgugguuccacgccaucuccgggaccaacggcaccaagcgguucgacaacccggugcugcccuucaacgacggggucuacuucgcgagcaccgagaaguccaacaucauccgcggcuggaucuucgggacgacccucgacagcaagacccagucccugcugaucgugaacaacgccaccaacguggucaucaaggugugcgaguuccaguucugcaacgaccccuuccucggcguguaccacaagaacaacaagagcuggauggaguccgaguuccgggucuacagcuccgccaacaacugcacguucgaguacgugagccagcccuuccugauggaccuggagggcaagcaggggaacuucaagaaccuccgcgaguucguguucaagaacaucgacggcuacuucaagaucuacuccaagcacaccccgaucaaccugguccgggaccugccccagggguucagcgcccucgagccccugguggaccugcccaucggcaucaacaucacccgcuuccagacccuccuggcccugcaccgguccuaccucacgccgggggacagcagcuccggcuggaccgcgggcgccgccgccuacuacgugggguaccugcagccccgcaccuuccugcucaaguacaacgagaacggcaccaucacggacgcggucgacugcgcccuggacccccugagcgagaccaagugcacccucaaguccuucaccguggagaaggggaucuaccagacgagcaacuuccgggugcagcccaccgaguccaucguccgcuucccgaacaucaccaaccugugccccuucggcgagguguucaacgccacccgguucgccagcgucuacgccuggaaccgcaagcggaucuccaacugcguggcggacuacagcgugcuguacaacuccgccagcuucuccacguucaagugcuacggcgucagccccaccaagcucaacgaccugugcuucaccaacguguacgccgacuccuucgugauccgcggggacgagguccggcagaucgcccccggccagaccgggaagaucgccgacuacaacuacaagcugccggacgacuucacgggcugcgugaucgcguggaacagcaacaaccucgacuccaaggucgggggcaacuacaacuaccuguaccgccuguuccgcaagagcaaccucaagcccuucgagcgggacaucuccaccgagaucuaccaggccggcagcacccccugcaacgggguggagggcuucaacugcuacuucccccugcaguccuacggguuccagccgaccuacggcgugggguaccagcccuaccggguggucgugcugagcuucgagcuccugcacgcccccgccacggugugcggccccaagaaguccaccaaccuggucaagaacaagugcgugaacuucaacuucaacggccucaccgggaccggcgugcugaccgagagcaacaagaaguuccugccguuccagcaguucgggcgcgacaucgacgacacgaccgacgcgguccgcgacccccagacccuggagauccucgacaucacccccugcagcuucggcgggguguccgugaucacgccgggcaccaacaccagcaaccaggucgccgugcuguaccagggcgugaacugcaccgagguccccguggccauccacgccgaccagcugacgcccaccuggcggguguacuccaccggcagcaacgucuuccagacccgcgccgggugccucaucggcgcggagcacgugaacaacuccuacgagugcgacauccccaucggggccggcaucugcgccagcuaccagacgcagaccaacucccaccggcgcgcccggagcguggcgucccagagcaucaucgccuacaccaugucccugggcgccgagaacagcgucgccuacuccaacaacagcaucgccauccccaucaacuucacgaucuccgugaccaccgagauccugcccgugagcaugaccaagacgagcgucgacugcaccauguacaucugcggggacuccaccgagugcagcaaccuccugcugcaguacggcuccuucugcacccagcucaaccgcgcgcugacggggaucgccguggagcaggacaagaacacccaggagguguucgcccaggucaagcagaucuacaagacgcccccgaucaaggacuucggcggguucaacuucagccagauccugcccgaccccuccaagcccagcaagcgguccuucaucgaggaccuccuguucaacaaggugacccuggccgacgccggcuucaucaagcaguacggcgacugccucggggacaucgcggcccgcgaccugaucugcgcccagaaguucaacggccugaccgugcucccgccccugcugaccgacgagaugaucgcccaguacaccagcgcccuccuggcggggaccaucacguccggcuggaccuucggggccggcgccgcccugcagauccccuucgcgaugcagauggccuaccgguucaacggcaucggggucacccagaacgugcucuacgagaaccagaagcugaucgccaaccaguucaacagcgccaucggcaagauccaggacucccugagcuccaccgccagcgcgcucgggaagcugcaggacguggucaaccagaacgcccaggcccugaacacgcucgugaagcagcuguccagcaacuucggcgccaucuccagcgugcugaacgacauccucgcccgccuggacaaggucgaggccgaggugcagaucgaccggcugaucaccgggcgccuccagagccugcagaccuacgugacccagcagcugauccgggcggccgagauccgcgccagcgccaaccucgccgcgaccaagauguccgagugcguccugggccagagcaagcggguggacuucugcggcaagggguaccaccugauguccuucccccagagcgccccgcacggcguggucuuccuccacgugacguacguccccgcccaggagaagaacuucaccaccgcccccgcgaucugccacgacgggaaggcccacuucccccgcgagggcguguucguguccaacgggacccacugguucgucacgcagcggaacuucuacgagccgcagaucaucaccacccacaacaccuucgugagcggcaacugcgacguggucaucggcaucgugaacaacacgguguacgacccccugcagcccgagcuggacuccuucaaggaggagcucgacaaguacuucaagaaccacaccagccccgacgucgaccugggggacaucuccggcaucaacgccagcguggugaacauccagaaggagaucgaccgccugaacgaggucgccaagaaccucaacgagucccugaucgaccugcaggagcucgggaaguacgagcaguacaucaaguggccgugguacaucuggcugggcuucaucgccggccugaucgcgaucgugauggugaccaucaugcucugcugcaugaccagcugcugcuccugccugaaggggugcugcagcugcggcuccugcugcaaguucgacgaggacgacagcgagcccguccugaagggggugaagcuccacuacacgugaggacuaguuauaagacugacuagcccgaugggccucccaacgggcccuccuccccuccuugcaccgagagaucucaaaggcucuuuucagagccaccaaaaaaaaaaaaaaaaaaaaaaaaaaaaaaaaaaaaaaaaaaaaaaaaaaaaaaaaaaaaaaaaaaaaaaaaaaaaaaaaaaaaaaaaaaaaaaaaaaaaa

SEQ ID NO: 24522 - RNA, 4035 nt, Artificial Sequence
  SARS-CoV-2/Wuhan/WIV05/2019__EPI_ISL_402128 spike protein mRNA gc (1-1273)(K417N_E484K_N501Y_D614G)
aggagaaagcuuaccauguucguguuccugguccuccugccccuggugagcucccagugcgugaaccucaccacccgcacgcagcugccgcccgccuacaccaacagcuucacccggggcgucuacuaccccgacaagguguuccgcuccagcgugcugcacuccacccaggaccucuuccugcccuucuucagcaacgucacgugguuccacgccauccacguguccgggaccaacggcaccaagcgguucgacaacccggugcugcccuucaacgacggggucuacuucgcgagcaccgagaaguccaacaucauccgcggcuggaucuucgggacgacccucgacagcaagacccagucccugcugaucgugaacaacgccaccaacguggucaucaaggugugcgaguuccaguucugcaacgaccccuuccucggcguguacuaccacaagaacaacaagagcuggauggaguccgaguuccgggucuacagcuccgccaacaacugcacguucgaguacgugagccagcccuuccugauggaccuggagggcaagcaggggaacuucaagaaccuccgcgaguucguguucaagaacaucgacggcuacuucaagaucuacuccaagcacaccccgaucaaccugguccgggaccugccccagggguucagcgcccucgagccccugguggaccugcccaucggcaucaacaucacccgcuuccagacccuccuggcccugcaccgguccuaccucacgccgggggacagcagcuccggcuggaccgcgggcgccgccgccuacuacgugggguaccugcagccccgcaccuuccugcucaaguacaacgagaacggcaccaucacggacgcggucgacugcgcccuggacccccugagcgagaccaagugcacccucaaguccuucaccguggagaaggggaucuaccagacgagcaacuuccgggugcagcccaccgaguccaucguccgcuucccgaacaucaccaaccugugccccuucggcgagguguucaacgccacccgguucgccagcgucuacgccuggaaccgcaagcggaucuccaacugcguggcggacuacagcgugcuguacaacuccgccagcuucuccacguucaagugcuacggcgucagccccaccaagcucaacgaccugugcuucaccaacguguacgccgacuccuucgugauccgcggggacgagguccggcagaucgcccccggccagaccgggaacaucgccgacuacaacuacaagcugccggacgacuucacgggcugcgugaucgcguggaacagcaacaaccucgacuccaaggucgggggcaacuacaacuaccuguaccgccuguuccgcaagagcaaccucaagcccuucgagcgggacaucuccaccgagaucuaccaggccggcagcacccccugcaacggggugaagggcuucaacugcuacuucccccugcaguccuacggguuccagccgaccuacggcgugggguaccagcccuaccggguggucgugcugagcuucgagcuccugcacgcccccgccacggugugcggccccaagaaguccaccaaccuggucaagaacaagugcgugaacuucaacuucaacggccucaccgggaccggcgugcugaccgagagcaacaagaaguuccugccguuccagcaguucgggcgcgacaucgccgacacgaccgacgcgguccgcgacccccagacccuggagauccucgacaucacccccugcagcuucggcgggguguccgugaucacgccgggcaccaacaccagcaaccaggucgccgugcuguaccagggcgugaacugcaccgagguccccguggccauccacgccgaccagcugacgcccaccuggcggguguacuccaccggcagcaacgucuuccagacccgcgccgggugccucaucggcgcggagcacgugaacaacuccuacgagugcgacauccccaucggggccggcaucugcgccagcuaccagacgcagaccaacuccccgcggcgcgcccggagcguggcgucccagagcaucaucgccuacaccaugucccugggcgccgagaacagcgucgccuacuccaacaacagcaucgccauccccaccaacuucacgaucuccgugaccaccgagauccugcccgugagcaugaccaagacgagcgucgacugcaccauguacaucugcggggacuccaccgagugcagcaaccuccugcugcaguacggcuccuucugcacccagcucaaccgcgcgcugacggggaucgccguggagcaggacaagaacacccaggagguguucgcccaggucaagcagaucuacaagacgcccccgaucaaggacuucggcggguucaacuucagccagauccugcccgaccccuccaagcccagcaagcgguccuucaucgaggaccuccuguucaacaaggugacccuggccgacgccggcuucaucaagcaguacggcgacugccucggggacaucgcggcccgcgaccugaucugcgcccagaaguucaacggccugaccgugcucccgccccugcugaccgacgagaugaucgcccaguacaccagcgcccuccuggcggggaccaucacguccggcuggaccuucggggccggcgccgcccugcagauccccuucgcgaugcagauggccuaccgguucaacggcaucggggucacccagaacgugcucuacgagaaccagaagcugaucgccaaccaguucaacagcgccaucggcaagauccaggacucccugagcuccaccgccagcgcgcucgggaagcugcaggacguggucaaccagaacgcccaggcccugaacacgcucgugaagcagcuguccagcaacuucggcgccaucuccagcgugcugaacgacauccucucccgccuggacaaggucgaggccgaggugcagaucgaccggcugaucaccgggcgccuccagagccugcagaccuacgugacccagcagcugauccgggcggccgagauccgcgccagcgccaaccucgccgcgaccaagauguccgagugcguccugggccagagcaagcggguggacuucugcggcaagggguaccaccugauguccuucccccagagcgccccgcacggcguggucuuccuccacgugacguacguccccgcccaggagaagaacuucaccaccgcccccgcgaucugccacgacgggaaggcccacuucccccgcgagggcguguucguguccaacgggacccacugguucgucacgcagcggaacuucuacgagccgcagaucaucaccaccgacaacaccuucgugagcggcaacugcgacguggucaucggcaucgugaacaacacgguguacgacccccugcagcccgagcuggacuccuucaaggaggagcucgacaaguacuucaagaaccacaccagccccgacgucgaccugggggacaucuccggcaucaacgccagcguggugaacauccagaaggagaucgaccgccugaacgaggucgccaagaaccucaacgagucccugaucgaccugcaggagcucgggaaguacgagcaguacaucaaguggccgugguacaucuggcugggcuucaucgccggccugaucgcgaucgugauggugaccaucaugcucugcugcaugaccagcugcugcuccugccugaaggggugcugcagcugcggcuccugcugcaaguucgacgaggacgacagcgagcccguccugaagggggugaagcuccacuacacgugaggacuaguuauaagacugacuagcccgaugggccucccaacgggcccuccuccccuccuugcaccgagagaucucaaaggcucuuuucagagccaccaaaaaaaaaaaaaaaaaaaaaaaaaaaaaaaaaaaaaaaaaaaaaaaaaaaaaaaaaaaaaaaaaaaaaaaaaaaaaaaaaaaaaaaaaaaaaaaaaaaaa

SEQ ID NO: 24523 - RNA, 4026 nt, Artificial Sequence
  SARS-CoV-2/Wuhan/WIV05/2019__EPI_ISL_402128 spike protein mRNA gc (1-1273)(L18F_D80A_D215G_L242del_A243del_L244del_R246I_K417N_E484 K_N501Y_D614G_A701V)
aggagaaagcuuaccauguucguguuccugguccuccugccccuggugagcucccagugcgugaacuucaccacccgcacgcagcugccgcccgccuacaccaacagcuucacccggggcgucuacuaccccgacaagguguuccgcuccagcgugcugcacuccacccaggaccucuuccugcccuucuucagcaacgucacgugguuccacgccauccacguguccgggaccaacggcaccaagcgguucgccaacccggugcugcccuucaacgacggggucuacuucgcgagcaccgagaaguccaacaucauccgcggcuggaucuucgggacgacccucgacagcaagacccagucccugcugaucgugaacaacgccaccaacguggucaucaaggugugcgaguuccaguucugcaacgaccccuuccucggcguguacuaccacaagaacaacaagagcuggauggaguccgaguuccgggucuacagcuccgccaacaacugcacguucgaguacgugagccagcccuuccugauggaccuggagggcaagcaggggaacuucaagaaccuccgcgaguucguguucaagaacaucgacggcuacuucaagaucuacuccaagcacaccccgaucaaccugguccggggccugccccagggguucagcgcccucgagccccugguggaccugcccaucggcaucaacaucacccgcuuccagacccuccacaucuccuaccucacgccgggggacagcagcuccggcuggaccgcgggcgccgccgccuacuacgugggguaccugcagccccgcaccuuccugcucaaguacaacgagaacggcaccaucacggacgcggucgacugcgcccuggacccccugagcgagaccaagugcacccucaaguccuucaccguggagaaggggaucuaccagacgagcaacuuccgggugcagcccaccgaguccaucguccgcuucccgaacaucaccaaccugugccccuucggcgagguguucaacgccacccgguucgccagcgucuacgccuggaaccgcaagcggaucuccaacugcguggcggacuacagcgugcuguacaacuccgccagcuucuccacguucaagugcuacggcgucagccccaccaagcucaacgaccugugcuucaccaacguguacgccgacuccuucgugauccgcggggacgagguccggcagaucgcccccggccagaccgggaacaucgccgacuacaacuacaagcugccggacgacuucacgggcugcgugaucgcguggaacagcaacaaccucgacuccaaggucgggggcaacuacaacuaccuguaccgccuguuccgcaagagcaaccucaagcccuucgagcgggacaucuccaccgagaucuaccaggccggcagcacccccugcaacggggugaagggcuucaacugcuacuucccccugcaguccuacggguuccagccgaccuacggcgugggguaccagcccuaccggguggucgugcugagcuucgagcuccugcacgcccccgccacggugugcggccccaagaaguccaccaaccuggucaagaacaagugcgugaacuucaacuucaacggccucaccgggaccggcgugcugaccgagagcaacaagaaguuccugccguuccagcaguucgggcgcgacaucgccgacacgaccgacgcgguccgcgacccccagacccuggagauccucgacaucacccccugcagcuucggcgggguguccgugaucacgccgggcaccaacaccagcaaccaggucgccgugcuguaccagggcgugaacugcaccgagguccccguggccauccacgccgaccagcugacgcccaccuggcggguguacuccaccggcagcaacgucuuccagacccgcgccgggugccucaucggcgcggagcacgugaacaacuccuacgagugcgacauccccaucggggccggcaucugcgccagcuaccagacgcagaccaacuccccgcggcgcgcccggagcguggcgucccagagcaucaucgccuacaccaugucccugggcguggagaacagcgucgccuacuccaacaacagcaucgccauccccaccaacuucacgaucuccgugaccaccgagauccugcccgugagcaugaccaagacgagcgucgacugcaccauguacaucugcggggacuccaccgagugcagcaaccuccugcugcaguacggcuccuucugcacccagcucaaccgcgcgcugacggggaucgccguggagcaggacaagaacacccaggagguguucgcccaggucaagcagaucuacaagacgcccccgaucaaggacuucggcggguucaacuucagccagauccugcccgaccccuccaagcccagcaagcgguccuucaucgaggaccuccuguucaacaaggugacccuggccgacgccggcuucaucaagcaguacggcgacugccucggggacaucgcggcccgcgaccugaucugcgcccagaaguucaacggccugaccgugcucccgccccugcugaccgacgagaugaucgcccaguacaccagcgcccuccuggcggggaccaucacguccggcuggaccuucggggccggcgccgcccugcagauccccuucgcgaugcagauggccuaccgguucaacggcaucggggucacccagaacgugcucuacgagaaccagaagcugaucgccaaccaguucaacagcgccaucggcaagauccaggacucccugagcuccaccgccagcgcgcucgggaagcugcaggacguggucaaccagaacgcccaggcccugaacacgcucgugaagcagcuguccagcaacuucggcgccaucuccagcgugcugaacgacauccucucccgccuggacaaggucgaggccgaggugcagaucgaccggcugaucaccgggcgccuccagagccugcagaccuacgugacccagcagcugauccgggcggccgagauccgcgccagcgccaaccucgccgcgaccaagauguccgagugcguccugggccagagcaagcggguggacuucugcggcaagggguaccaccugauguccuucccccagagcgccccgcacggcguggucuuccuccacgugacguacguccccgcccaggagaagaacuucaccaccgcccccgcgaucugccacgacgggaaggcccacuucccccgcgagggcguguucguguccaacgggacccacugguucgucacgcagcggaacuucuacgagccgcagaucaucaccaccgacaacaccuucgugagcggcaacugcgacguggucaucggcaucgugaacaacacgguguacgacccccugcagcccgagcuggacuccuucaaggaggagcucgacaaguacuucaagaaccacaccagccccgacgucgaccugggggacaucuccggcaucaacgccagcguggugaacauccagaaggagaucgaccgccugaacgaggucgccaagaaccucaacgagucccugaucgaccugcaggagcucgggaaguacgagcaguacaucaaguggccgugguacaucuggcugggcuucaucgccggccugaucgcgaucgugauggugaccaucaugcucugcugcaugaccagcugcugcuccugccugaaggggugcugcagcugcggcuccugcugcaaguucgacgaggacgacagcgagcccguccugaagggggugaagcuccacuacacgugaggacuaguuauaagacugacuagcccgaugggccucccaacgggcccuccuccccuccuugcaccgagagaucucaaaggcucuuuucagagccaccaaaaaaaaaaaaaaaaaaaaaaaaaaaaaaaaaaaaaaaaaaaaaaaaaaaaaaaaaaaaaaaaaaaaaaaaaaaaaaaaaaaaaaaaaaaaaaaaaaaaa

SEQ ID NO: 24524 - RNA, 4035 nt, Artificial Sequence
  SARS-CoV-2/Wuhan/WIV05/2019__EPI_ISL_402128 spike protein mRNA gc (1-1273)(E484K_D614G)
aggagaaagcuuaccauguucguguuccugguccuccugccccuggugagcucccagugcgugaaccucaccacccgcacgcagcugccgcccgccuacaccaacagcuucacccggggcgucuacuaccccgacaagguguuccgcuccagcgugcugcacuccacccaggaccucuuccugcccuucuucagcaacgucacgugguuccacgccauccacguguccgggaccaacggcaccaagcgguucgacaacccggugcugcccuucaacgacggggucuacuucgcgagcaccgagaaguccaacaucauccgcggcuggaucuucgggacgacccucgacagcaagacccagucccugcugaucgugaacaacgccaccaacguggucaucaaggugugcgaguuccaguucugcaacgaccccuuccucggcguguacuaccacaagaacaacaagagcuggauggaguccgaguuccgggucuacagcuccgccaacaacugcacguucgaguacgugagccagcccuuccugauggaccuggagggcaagcaggggaacuucaagaaccuccgcgaguucguguucaagaacaucgacggcuacuucaagaucuacuccaagcacaccccgaucaaccugguccgggaccugccccagggguucagcgcccucgagccccugguggaccugcccaucggcaucaacaucacccgcuuccagacccuccuggcccugcaccgguccuaccucacgccgggggacagcagcuccggcuggaccgcgggcgccgccgccuacuacgugggguaccugcagccccgcaccuuccugcucaaguacaacgagaacggcaccaucacggacgcggucgacugcgcccuggacccccugagcgagaccaagugcacccucaaguccuucaccguggagaaggggaucuaccagacgagcaacuuccgggugcagcccaccgaguccaucguccgcuucccgaacaucaccaaccugugccccuucggcgagguguucaacgccacccgguucgccagcgucuacgccuggaaccgcaagcggaucuccaacugcguggcggacuacagcgugcuguacaacuccgccagcuucuccacguucaagugcuacggcgucagccccaccaagcucaacgaccugugcuucaccaacguguacgccgacuccuucgugauccgcggggacgagguccggcagaucgcccccggccagaccgggaagaucgccgacuacaacuacaagcugccggacgacuucacgggcugcgugaucgcguggaacagcaacaaccucgacuccaaggucgggggcaacuacaacuaccuguaccgccuguuccgcaagagcaaccucaagcccuucgagcgggacaucuccaccgagaucuaccaggccggcagcacccccugcaacggggugaagggcuucaacugcuacuucccccugcaguccuacggguuccagccgaccaacggcgugggguaccagcccuaccggguggucgugcugagcuucgagcuccugcacgcccccgccacggugugcggccccaagaaguccaccaaccuggucaagaacaagugcgugaacuucaacuucaacggccucaccgggaccggcgugcugaccgagagcaacaagaaguuccugccguuccagcaguucgggcgcgacaucgccgacacgaccgacgcgguccgcgacccccagacccuggagauccucgacaucacccccugcagcuucggcgggguguccgugaucacgccgggcaccaacaccagcaaccaggucgccgugcuguaccagggcgugaacugcaccgagguccccguggccauccacgccgaccagcugacgcccaccuggcggguguacuccaccggcagcaacgucuuccagacccgcgccgggugccucaucggcgcggagcacgugaacaacuccuacgagugcgacauccccaucggggccggcaucugcgccagcuaccagacgcagaccaacuccccgcggcgcgcccggagcguggcgucccagagcaucaucgccuacaccaugucccugggcgccgagaacagcgucgccuacuccaacaacagcaucgccauccccaccaacuucacgaucuccgugaccaccgagauccugcccgugagcaugaccaagacgagcgucgacugcaccauguacaucugcggggacuccaccgagugcagcaaccuccugcugcaguacggcuccuucugcacccagcucaaccgcgcgcugacggggaucgccguggagcaggacaagaacacccaggagguguucgcccaggucaagcagaucuacaagacgcccccgaucaaggacuucggcggguucaacuucagccagauccugcccgaccccuccaagcccagcaagcgguccuucaucgaggaccuccuguucaacaaggugacccuggccgacgccggcuucaucaagcaguacggcgacugccucggggacaucgcggcccgcgaccugaucugcgcccagaaguucaacggccugaccgugcucccgccccugcugaccgacgagaugaucgcccaguacaccagcgcccuccuggcggggaccaucacguccggcuggaccuucggggccggcgccgcccugcagauccccuucgcgaugcagauggccuaccgguucaacggcaucggggucacccagaacgugcucuacgagaaccagaagcugaucgccaaccaguucaacagcgccaucggcaagauccaggacucccugagcuccaccgccagcgcgcucgggaagcugcaggacguggucaaccagaacgcccaggcccugaacacgcucgugaagcagcuguccagcaacuucggcgccaucuccagcgugcugaacgacauccucucccgccuggacaaggucgaggccgaggugcagaucgaccggcugaucaccgggcgccuccagagccugcagaccuacgugacccagcagcugauccgggcggccgagauccgcgccagcgccaaccucgccgcgaccaagauguccgagugcguccugggccagagcaagcggguggacuucugcggcaagggguaccaccugauguccuucccccagagcgccccgcacggcguggucuuccuccacgugacguacguccccgcccaggagaagaacuucaccaccgcccccgcgaucugccacgacgggaaggcccacuucccccgcgagggcguguucguguccaacgggacccacugguucgucacgcagcggaacuucuacgagccgcagaucaucaccaccgacaacaccuucgugagcggcaacugcgacguggucaucggcaucgugaacaacacgguguacgacccccugcagcccgagcuggacuccuucaaggaggagcucgacaaguacuucaagaaccacaccagccccgacgucgaccugggggacaucuccggcaucaacgccagcguggugaacauccagaaggagaucgaccgccugaacgaggucgccaagaaccucaacgagucccugaucgaccugcaggagcucgggaaguacgagcaguacaucaaguggccgugguacaucuggcugggcuucaucgccggccugaucgcgaucgugauggugaccaucaugcucugcugcaugaccagcugcugcuccugccugaaggggugcugcagcugcggcuccugcugcaaguucgacgaggacgacagcgagcccguccugaagggggugaagcuccacuacacgugaggacuaguuauaagacugacuagcccgaugggccucccaacgggcccuccuccccuccuugcaccgagagaucucaaaggcucuuuucagagccaccaaaaaaaaaaaaaaaaaaaaaaaaaaaaaaaaaaaaaaaaaaaaaaaaaaaaaaaaaaaaaaaaaaaaaaaaaaaaaaaaaaaaaaaaaaaaaaaaaaaaa

SEQ ID NO: 24525 - RNA, 4035 nt, Artificial Sequence
  SARS-CoV-2/Wuhan/WIV05/2019__EPI_ISL_402128 spike protein mRNA gc (1-1273)(L18F_T20N_P26S_D138Y_R190S_K417T_E484K_N501Y_D614G_H655Y _T1027I)
aggagaaagcuuaccauguucguguuccugguccuccugccccuggugagcucccagugcgugaacuucaccaaccgcacgcagcugccgagcgccuacaccaacagcuucacccggggcgucuacuaccccgacaagguguuccgcuccagcgugcugcacuccacccaggaccucuuccugcccuucuucagcaacgucacgugguuccacgccauccacguguccgggaccaacggcaccaagcgguucgacaacccggugcugcccuucaacgacggggucuacuucgcgagcaccgagaaguccaacaucauccgcggcuggaucuucgggacgacccucgacagcaagacccagucccugcugaucgugaacaacgccaccaacguggucaucaaggugugcgaguuccaguucugcaacuaccccuuccucggcguguacuaccacaagaacaacaagagcuggauggaguccgaguuccgggucuacagcuccgccaacaacugcacguucgaguacgugagccagcccuuccugauggaccuggagggcaagcaggggaacuucaagaaccucagcgaguucguguucaagaacaucgacggcuacuucaagaucuacuccaagcacaccccgaucaaccugguccgggaccugccccagggguucagcgcccucgagccccugguggaccugcccaucggcaucaacaucacccgcuuccagacccuccuggcccugcaccgguccuaccucacgccgggggacagcagcuccggcuggaccgcgggcgccgccgccuacuacgugggguaccugcagccccgcaccuuccugcucaaguacaacgagaacggcaccaucacggacgcggucgacugcgcccuggacccccugagcgagaccaagugcacccucaaguccuucaccguggagaaggggaucuaccagacgagcaacuuccgggugcagcccaccgaguccaucguccgcuucccgaacaucaccaaccugugccccuucggcgagguguucaacgccacccgguucgccagcgucuacgccuggaaccgcaagcggaucuccaacugcguggcggacuacagcgugcuguacaacuccgccagcuucuccacguucaagugcuacggcgucagccccaccaagcucaacgaccugugcuucaccaacguguacgccgacuccuucgugauccgcggggacgagguccggcagaucgcccccggccagaccgggaccaucgccgacuacaacuacaagcugccggacgacuucacgggcugcgugaucgcguggaacagcaacaaccucgacuccaaggucgggggcaacuacaacuaccuguaccgccuguuccgcaagagcaaccucaagcccuucgagcgggacaucuccaccgagaucuaccaggccggcagcacccccugcaacggggugaagggcuucaacugcuacuucccccugcaguccuacggguuccagccgaccuacggcgugggguaccagcccuaccggguggucgugcugagcuucgagcuccugcacgcccccgccacggugugcggccccaagaaguccaccaaccuggucaagaacaagugcgugaacuucaacuucaacggccucaccgggaccggcgugcugaccgagagcaacaagaaguuccugccguuccagcaguucgggcgcgacaucgccgacacgaccgacgcgguccgcgacccccagacccuggagauccucgacaucacccccugcagcuucggcgggguguccgugaucacgccgggcaccaacaccagcaaccaggucgccgugcuguaccagggcgugaacugcaccgagguccccguggccauccacgccgaccagcugacgcccaccuggcggguguacuccaccggcagcaacgucuuccagacccgcgccgggugccucaucggcgcggaguacgugaacaacuccuacgagugcgacauccccaucggggccggcaucugcgccagcuaccagacgcagaccaacuccccgcggcgcgcccggagcguggcgucccagagcaucaucgccuacaccaugucccugggcgccgagaacagcgucgccuacuccaacaacagcaucgccauccccaccaacuucacgaucuccgugaccaccgagauccugcccgugagcaugaccaagacgagcgucgacugcaccauguacaucugcggggacuccaccgagugcagcaaccuccugcugcaguacggcuccuucugcacccagcucaaccgcgcgcugacggggaucgccguggagcaggacaagaacacccaggagguguucgcccaggucaagcagaucuacaagacgcccccgaucaaggacuucggcggguucaacuucagccagauccugcccgaccccuccaagcccagcaagcgguccuucaucgaggaccuccuguucaacaaggugacccuggccgacgccggcuucaucaagcaguacggcgacugccucggggacaucgcggcccgcgaccugaucugcgcccagaaguucaacggccugaccgugcucccgccccugcugaccgacgagaugaucgcccaguacaccagcgcccuccuggcggggaccaucacguccggcuggaccuucggggccggcgccgcccugcagauccccuucgcgaugcagauggccuaccgguucaacggcaucggggucacccagaacgugcucuacgagaaccagaagcugaucgccaaccaguucaacagcgccaucggcaagauccaggacucccugagcuccaccgccagcgcgcucgggaagcugcaggacguggucaaccagaacgcccaggcccugaacacgcucgugaagcagcuguccagcaacuucggcgccaucuccagcgugcugaacgacauccucucccgccuggacaaggucgaggccgaggugcagaucgaccggcugaucaccgggcgccuccagagccugcagaccuacgugacccagcagcugauccgggcggccgagauccgcgccagcgccaaccucgccgcgaucaagauguccgagugcguccugggccagagcaagcggguggacuucugcggcaagggguaccaccugauguccuucccccagagcgccccgcacggcguggucuuccuccacgugacguacguccccgcccaggagaagaacuucaccaccgcccccgcgaucugccacgacgggaaggcccacuucccccgcgagggcguguucguguccaacgggacccacugguucgucacgcagcggaacuucuacgagccgcagaucaucaccaccgacaacaccuucgugagcggcaacugcgacguggucaucggcaucgugaacaacacgguguacgacccccugcagcccgagcuggacuccuucaaggaggagcucgacaaguacuucaagaaccacaccagccccgacgucgaccugggggacaucuccggcaucaacgccagcguggugaacauccagaaggagaucgaccgccugaacgaggucgccaagaaccucaacgagucccugaucgaccugcaggagcucgggaaguacgagcaguacaucaaguggccgugguacaucuggcugggcuucaucgccggccugaucgcgaucgugauggugaccaucaugcucugcugcaugaccagcugcugcuccugccugaaggggugcugcagcugcggcuccugcugcaaguucgacgaggacgacagcgagcccguccugaagggggugaagcuccacuacacgugaggacuaguuauaagacugacuagcccgaugggccucccaacgggcccuccuccccuccuugcaccgagagaucucaaaggcucuuuucagagccaccaaaaaaaaaaaaaaaaaaaaaaaaaaaaaaaaaaaaaaaaaaaaaaaaaaaaaaaaaaaaaaaaaaaaaaaaaaaaaaaaaaaaaaaaaaaaaaaaaaaaa

SEQ ID NO: 24526 - RNA, 4035 nt, Artificial Sequence
  SARS-CoV-2/Wuhan/WIV05/2019__EPI_ISL_402128 spike protein mRNA gc (1-1273)(S13I_W152C_L452R_D614G)
aggagaaagcuuaccauguucguguuccugguccuccugccccuggugagcauccagugcgugaaccucaccacccgcacgcagcugccgcccgccuacaccaacagcuucacccggggcgucuacuaccccgacaagguguuccgcuccagcgugcugcacuccacccaggaccucuuccugcccuucuucagcaacgucacgugguuccacgccauccacguguccgggaccaacggcaccaagcgguucgacaacccggugcugcccuucaacgacggggucuacuucgcgagcaccgagaaguccaacaucauccgcggcuggaucuucgggacgacccucgacagcaagacccagucccugcugaucgugaacaacgccaccaacguggucaucaaggugugcgaguuccaguucugcaacgaccccuuccucggcguguacuaccacaagaacaacaagagcugcauggaguccgaguuccgggucuacagcuccgccaacaacugcacguucgaguacgugagccagcccuuccugauggaccuggagggcaagcaggggaacuucaagaaccuccgcgaguucguguucaagaacaucgacggcuacuucaagaucuacuccaagcacaccccgaucaaccugguccgggaccugccccagggguucagcgcccucgagccccugguggaccugcccaucggcaucaacaucacccgcuuccagacccuccuggcccugcaccgguccuaccucacgccgggggacagcagcuccggcuggaccgcgggcgccgccgccuacuacgugggguaccugcagccccgcaccuuccugcucaaguacaacgagaacggcaccaucacggacgcggucgacugcgcccuggacccccugagcgagaccaagugcacccucaaguccuucaccguggagaaggggaucuaccagacgagcaacuuccgggugcagcccaccgaguccaucguccgcuucccgaacaucaccaaccugugccccuucggcgagguguucaacgccacccgguucgccagcgucuacgccuggaaccgcaagcggaucuccaacugcguggcggacuacagcgugcuguacaacuccgccagcuucuccacguucaagugcuacggcgucagccccaccaagcucaacgaccugugcuucaccaacguguacgccgacuccuucgugauccgcggggacgagguccggcagaucgcccccggccagaccgggaagaucgccgacuacaacuacaagcugccggacgacuucacgggcugcgugaucgcguggaacagcaacaaccucgacuccaaggucgggggcaacuacaacuaccgcuaccgccuguuccgcaagagcaaccucaagcccuucgagcgggacaucuccaccgagaucuaccaggccggcagcacccccugcaacgggguggagggcuucaacugcuacuucccccugcaguccuacggguuccagccgaccaacggcgugggguaccagcccuaccggguggucgugcugagcuucgagcuccugcacgcccccgccacggugugcggccccaagaaguccaccaaccuggucaagaacaagugcgugaacuucaacuucaacggccucaccgggaccggcgugcugaccgagagcaacaagaaguuccugccguuccagcaguucgggcgcgacaucgccgacacgaccgacgcgguccgcgacccccagacccuggagauccucgacaucacccccugcagcuucggcgggguguccgugaucacgccgggcaccaacaccagcaaccaggucgccgugcuguaccagggcgugaacugcaccgagguccccguggccauccacgccgaccagcugacgcccaccuggcggguguacuccaccggcagcaacgucuuccagacccgcgccgggugccucaucggcgcggagcacgugaacaacuccuacgagugcgacauccccaucggggccggcaucugcgccagcuaccagacgcagaccaacuccccgcggcgcgcccggagcguggcgucccagagcaucaucgccuacaccaugucccugggcgccgagaacagcgucgccuacuccaacaacagcaucgccauccccaccaacuucacgaucuccgugaccaccgagauccugcccgugagcaugaccaagacgagcgucgacugcaccauguacaucugcggggacuccaccgagugcagcaaccuccugcugcaguacggcuccuucugcacccagcucaaccgcgcgcugacggggaucgccguggagcaggacaagaacacccaggagguguucgcccaggucaagcagaucuacaagacgcccccgaucaaggacuucggcggguucaacuucagccagauccugcccgaccccuccaagcccagcaagcgguccuucaucgaggaccuccuguucaacaaggugacccuggccgacgccggcuucaucaagcaguacggcgacugccucggggacaucgcggcccgcgaccugaucugcgcccagaaguucaacggccugaccgugcucccgccccugcugaccgacgagaugaucgcccaguacaccagcgcccuccuggcggggaccaucacguccggcuggaccuucggggccggcgccgcccugcagauccccuucgcgaugcagauggccuaccgguucaacggcaucggggucacccagaacgugcucuacgagaaccagaagcugaucgccaaccaguucaacagcgccaucggcaagauccaggacucccugagcuccaccgccagcgcgcucgggaagcugcaggacguggucaaccagaacgcccaggcccugaacacgcucgugaagcagcuguccagcaacuucggcgccaucuccagcgugcugaacgacauccucucccgccuggacaaggucgaggccgaggugcagaucgaccggcugaucaccgggcgccuccagagccugcagaccuacgugacccagcagcugauccgggcggccgagauccgcgccagcgccaaccucgccgcgaccaagauguccgagugcguccugggccagagcaagcggguggacuucugcggcaagggguaccaccugauguccuucccccagagcgccccgcacggcguggucuuccuccacgugacguacguccccgcccaggagaagaacuucaccaccgcccccgcgaucugccacgacgggaaggcccacuucccccgcgagggcguguucguguccaacgggacccacugguucgucacgcagcggaacuucuacgagccgcagaucaucaccaccgacaacaccuucgugagcggcaacugcgacguggucaucggcaucgugaacaacacgguguacgacccccugcagcccgagcuggacuccuucaaggaggagcucgacaaguacuucaagaaccacaccagccccgacgucgaccugggggacaucuccggcaucaacgccagcguggugaacauccagaaggagaucgaccgccugaacgaggucgccaagaaccucaacgagucccugaucgaccugcaggagcucgggaaguacgagcaguacaucaaguggccgugguacaucuggcugggcuucaucgccggccugaucgcgaucgugauggugaccaucaugcucugcugcaugaccagcugcugcuccugccugaaggggugcugcagcugcggcuccugcugcaaguucgacgaggacgacagcgagcccguccugaagggggugaagcuccacuacacgugaggacuaguuauaagacugacuagcccgaugggccucccaacgggcccuccuccccuccuugcaccgagagaucucaaaggcucuuuucagagccaccaaaaaaaaaaaaaaaaaaaaaaaaaaaaaaaaaaaaaaaaaaaaaaaaaaaaaaaaaaaaaaaaaaaaaaaaaaaaaaaaaaaaaaaaaaaaaaaaaaaaa

SEQ ID NO: 24527 - RNA, 4035 nt, Artificial Sequence; identical to SEQ ID NO: 24509
  SARS-CoV-2/Wuhan/WIV05/2019__EPI_ISL_402128 spike protein mRNA gc (1-1273)

SEQ ID NO: 24528 - RNA, 4035 nt, Artificial Sequence
  SARS-CoV-2/Wuhan/WIV05/2019__EPI_ISL_402128 spike protein mRNA gc (1-1273)(D614G)
aggagaaagcuuaccauguucguguuccugguccuccugccccuggugagcucccagugcgugaaccucaccacccgcacgcagcugccgcccgccuacaccaacagcuucacccggggcgucuacuaccccgacaagguguuccgcuccagcgugcugcacuccacccaggaccucuuccugcccuucuucagcaacgucacgugguuccacgccauccacguguccgggaccaacggcaccaagcgguucgacaacccggugcugcccuucaacgacggggucuacuucgcgagcaccgagaaguccaacaucauccgcggcuggaucuucgggacgacccucgacagcaagacccagucccugcugaucgugaacaacgccaccaacguggucaucaaggugugcgaguuccaguucugcaacgaccccuuccucggcguguacuaccacaagaacaacaagagcuggauggaguccgaguuccgggucuacagcuccgccaacaacugcacguucgaguacgugagccagcccuuccugauggaccuggagggcaagcaggggaacuucaagaaccuccgcgaguucguguucaagaacaucgacggcuacuucaagaucuacuccaagcacaccccgaucaaccugguccgggaccugccccagggguucagcgcccucgagccccugguggaccugcccaucggcaucaacaucacccgcuuccagacccuccuggcccugcaccgguccuaccucacgccgggggacagcagcuccggcuggaccgcgggcgccgccgccuacuacgugggguaccugcagccccgcaccuuccugcucaaguacaacgagaacggcaccaucacggacgcggucgacugcgcccuggacccccugagcgagaccaagugcacccucaaguccuucaccguggagaaggggaucuaccagacgagcaacuuccgggugcagcccaccgaguccaucguccgcuucccgaacaucaccaaccugugccccuucggcgagguguucaacgccacccgguucgccagcgucuacgccuggaaccgcaagcggaucuccaacugcguggcggacuacagcgugcuguacaacuccgccagcuucuccacguucaagugcuacggcgucagccccaccaagcucaacgaccugugcuucaccaacguguacgccgacuccuucgugauccgcggggacgagguccggcagaucgcccccggccagaccgggaagaucgccgacuacaacuacaagcugccggacgacuucacgggcugcgugaucgcguggaacagcaacaaccucgacuccaaggucgggggcaacuacaacuaccuguaccgccuguuccgcaagagcaaccucaagcccuucgagcgggacaucuccaccgagaucuaccaggccggcagcacccccugcaacgggguggagggcuucaacugcuacuucccccugcaguccuacggguuccagccgaccaacggcgugggguaccagcccuaccggguggucgugcugagcuucgagcuccugcacgcccccgccacggugugcggccccaagaaguccaccaaccuggucaagaacaagugcgugaacuucaacuucaacggccucaccgggaccggcgugcugaccgagagcaacaagaaguuccugccguuccagcaguucgggcgcgacaucgccgacacgaccgacgcgguccgcgacccccagacccuggagauccucgacaucacccccugcagcuucggcgggguguccgugaucacgccgggcaccaacaccagcaaccaggucgccgugcuguaccagggcgugaacugcaccgagguccccguggccauccacgccgaccagcugacgcccaccuggcggguguacuccaccgggagcaacgucuuccagacccgcgccggcugccucaucggggcggagcacgugaacaacuccuacgagugcgacauccccaucggcgccggcaucugcgccagcuaccagacgcagaccaacuccccgcggcgcgcccggagcguggcgucccagagcaucaucgccuacaccaugucccugggggccgagaacagcgucgccuacuccaacaacagcaucgccauccccaccaacuucacgaucuccgugaccaccgagauccugcccgugagcaugaccaagacgagcgucgacugcaccauguacaucugcggcgacuccaccgagugcagcaaccuccugcugcaguacggguccuucugcacccagcucaaccgcgcgcugacgggcaucgccguggagcaggacaagaacacccaggagguguucgcccaggucaagcagaucuacaagacgcccccgaucaaggacuucgggggcuucaacuucagccagauccugcccgaccccuccaagcccagcaagcgguccuucaucgaggaccuccuguucaacaaggugacccuggccgacgccggcuucaucaagcaguacggggacugccucggcgacaucgcggcccgcgaccugaucugcgcccagaaguucaacgggcugaccgugcucccgccccugcugaccgacgagaugaucgcccaguacaccagcgcccuccuggcgggcaccaucacguccggguggaccuucggcgccggcgccgcccugcagauccccuucgcgaugcagauggccuaccgguucaacgggaucggcgucacccagaacgugcucuacgagaaccagaagcugaucgccaaccaguucaacagcgccaucgggaagauccaggacucccugagcuccaccgccagcgcgcucggcaagcugcaggacguggucaaccagaacgcccaggcccugaacacgcucgugaagcagcuguccagcaacuucggggccaucuccagcgugcugaacgacauccucucccgccuggacaaggucgaggccgaggugcagaucgaccggcugaucaccggccgccuccagagccugcagaccuacgugacccagcagcugauccgggcggccgagauccgcgccagcgccaaccucgccgcgaccaagauguccgagugcguccugggccagagcaagcggguggacuucugcgggaagggcuaccaccugauguccuucccccagagcgccccgcacgggguggucuuccuccacgugacguacguccccgcccaggagaagaacuucaccaccgcccccgcgaucugccacgacggcaaggcccacuucccccgcgaggggguguucguguccaacggcacccacugguucgucacgcagcggaacuucuacgagccgcagaucaucaccaccgacaacaccuucgugagcggcaacugcgacguggucaucgggaucgugaacaacacgguguacgacccccugcagcccgagcuggacuccuucaaggaggagcucgacaaguacuucaagaaccacaccagccccgacgucgaccugggcgacaucuccgggaucaacgccagcguggugaacauccagaaggagaucgaccgccugaacgaggucgccaagaaccucaacgagucccugaucgaccugcaggagcucggcaaguacgagcaguacaucaaguggccgugguacaucuggcugggcuucaucgccgggcugaucgcgaucgugauggugaccaucaugcucugcugcaugaccagcugcugcuccugccugaagggcugcugcagcugcggguccugcugcaaguucgacgaggacgacagcgagcccguccugaagggcgugaagcuccacuacacgugaggacuaguuauaagacugacuagcccgaugggccucccaacgggcccuccuccccuccuugcaccgagagaucucaaaggcucuuuucagagccaccaaaaaaaaaaaaaaaaaaaaaaaaaaaaaaaaaaaaaaaaaaaaaaaaaaaaaaaaaaaaaaaaaaaaaaaaaaaaaaaaaaaaaaaaaaaaaaaaaaaaa

SEQ ID NO: 24529 - RNA, 4035 nt, Artificial Sequence
  SARS-CoV-2/Wuhan/WIV05/2019__EPI_ISL_402128 spike protein mRNA gc (1-1273)(A222V_D614G)
aggagaaagcuuaccauguucguguuccugguccuccugccccuggugagcucccagugcgugaaccucaccacccgcacgcagcugccgcccgccuacaccaacagcuucacccggggcgucuacuaccccgacaagguguuccgcuccagcgugcugcacuccacccaggaccucuuccugcccuucuucagcaacgucacgugguuccacgccauccacguguccgggaccaacggcaccaagcgguucgacaacccggugcugcccuucaacgacggggucuacuucgcgagcaccgagaaguccaacaucauccgcggcuggaucuucgggacgacccucgacagcaagacccagucccugcugaucgugaacaacgccaccaacguggucaucaaggugugcgaguuccaguucugcaacgaccccuuccucggcguguacuaccacaagaacaacaagagcuggauggaguccgaguuccgggucuacagcuccgccaacaacugcacguucgaguacgugagccagcccuuccugauggaccuggagggcaagcaggggaacuucaagaaccuccgcgaguucguguucaagaacaucgacggcuacuucaagaucuacuccaagcacaccccgaucaaccugguccgggaccugccccagggguucagcgugcucgagccccugguggaccugcccaucggcaucaacaucacccgcuuccagacccuccuggcccugcaccgguccuaccucacgccgggggacagcagcuccggcuggaccgccggcgcggccgccuacuacgucggguaccugcagccccgcaccuuccugcucaaguacaacgagaacggcaccaucacggacgccguggacugcgcgcuggacccccugagcgagaccaagugcacccucaaguccuucaccguggagaaggggaucuaccagacgagcaacuuccggguccagcccaccgaguccaucgugcgcuucccgaacaucaccaaccugugccccuucggcgaggucuucaacgccacccgguucgccagcguguacgccuggaaccgcaagcggaucuccaacugcguggccgacuacagcguccuguacaacuccgcgagcuucuccacguucaagugcuacggcgugagccccaccaagcucaacgaccugugcuucaccaacguguacgccgacuccuucgucauccgcggggacgaggugcggcagaucgcccccggccagaccgggaagaucgccgacuacaacuacaagcugccggacgacuucacgggcugcgugaucgccuggaacagcaacaaccucgacuccaaggucgggggcaacuacaacuaccuguaccgccuguuccgcaagagcaaccucaagcccuucgagcgggacaucuccaccgagaucuaccaggcgggcagcacccccugcaacgggguggagggcuucaacugcuacuucccccugcaguccuacggguuccagccgaccaacggcgugggguaccagcccuaccgggucguggugcugagcuucgagcuccugcacgcccccgccacggucugcggccccaagaaguccaccaaccuggugaagaacaagugcgugaacuucaacuucaacggccucaccgggaccggcguccugaccgagagcaacaagaaguuccugccguuccagcaguucgggcgcgacaucgccgacacgaccgacgccgugcgcgacccccagacccuggagauccucgacaucacccccugcagcuucggcgggguguccgucaucacgccgggcaccaacaccagcaaccagguggcggugcuguaccagggcgucaacugcaccgaggugcccguggccauccacgccgaccagcugacgcccaccuggcgggucuacuccaccgggagcaacguguuccagacccgcgccggcugccucaucggggccgagcacgugaacaacuccuacgagugcgacauccccaucggcgcgggcaucugcgccagcuaccagacgcagaccaacuccccgcggcgcgcccggagcgucgccucccagagcaucaucgcguacaccaugucccugggggccgagaacagcguggccuacuccaacaacagcaucgccauccccaccaacuucacgaucuccgugaccaccgagauccugcccgucagcaugaccaagacgagcguggacugcaccauguacaucugcggcgacuccaccgagugcagcaaccuccugcugcaguacggguccuucugcacccagcucaaccgcgcccugacgggcaucgcgguggagcaggacaagaacacccaggaggucuucgcccaggugaagcagaucuacaagacgcccccgaucaaggacuucgggggcuucaacuucagccagauccugcccgaccccuccaagcccagcaagcgguccuucaucgaggaccuccuguucaacaaggugacccuggccgacgccggcuucaucaagcaguacggggacugccucggcgacaucgccgcgcgcgaccugaucugcgcccagaaguucaacgggcugaccguccucccgccccugcugaccgacgagaugaucgcccaguacaccagcgcccuccuggccggcaccaucacguccggguggaccuucggcgcgggcgccgcccugcagauccccuucgccaugcagauggcguaccgguucaacgggaucggcgugacccagaacgugcucuacgagaaccagaagcugaucgccaaccaguucaacagcgccaucgggaagauccaggacucccugagcuccaccgccagcgcccucggcaagcugcaggacgucgugaaccagaacgcgcaggcccugaacacgcucgugaagcagcuguccagcaacuucggggccaucuccagcguccugaacgacauccucucccgccuggacaagguggaggccgaggugcagaucgaccggcugaucaccggccgccuccagagccugcagaccuacgucacccagcagcugauccgggccgcggagauccgcgccagcgccaaccucgccgccaccaagauguccgagugcgugcugggccagagcaagcggguggacuucugcgggaagggcuaccaccugauguccuucccccagagcgcgccgcacggggucguguuccuccacgucacguacgugcccgcccaggagaagaacuucaccaccgcccccgccaucugccacgacggcaaggcgcacuucccccgcgaggggguguucgucuccaacggcacccacugguucgugacgcagcggaacuucuacgagccgcagaucaucaccaccgacaacaccuucgugagcggcaacugcgacgucgugaucgggaucgugaacaacacggucuacgacccccugcagcccgagcuggacuccuucaaggaggagcucgacaaguacuucaagaaccacaccagccccgacguggaccugggcgacaucuccgggaucaacgccagcguggucaacauccagaaggagaucgaccgccugaacgagguggccaagaaccucaacgagucccugaucgaccugcaggagcucggcaaguacgagcaguacaucaaguggccgugguacaucuggcugggcuucaucgccgggcugaucgccaucgugauggucaccaucaugcucugcugcaugaccagcugcugcuccugccugaagggcugcugcagcugcggguccugcugcaaguucgacgaggacgacagcgagcccgugcugaagggcgugaagcuccacuacacgugaggacuaguuauaagacugacuagcccgaugggccucccaacgggcccuccuccccuccuugcaccgagagaucucaaaggcucuuuucagagccaccaaaaaaaaaaaaaaaaaaaaaaaaaaaaaaaaaaaaaaaaaaaaaaaaaaaaaaaaaaaaaaaaaaaaaaaaaaaaaaaaaaaaaaaaaaaaaaaaaaaaa

SEQ ID NO: 24530 - RNA, 4035 nt, Artificial Sequence
  SARS-CoV-2/Wuhan/WIV05/2019__EPI_ISL_402128 spike protein mRNA gc (1-1273)(N439K_D614G)
aggagaaagcuuaccauguucguguuccugguccuccugccccuggugagcucccagugcgugaaccucaccacccgcacgcagcugccgcccgccuacaccaacagcuucacccggggcgucuacuaccccgacaagguguuccgcuccagcgugcugcacuccacccaggaccucuuccugcccuucuucagcaacgucacgugguuccacgccauccacguguccgggaccaacggcaccaagcgguucgacaacccggugcugcccuucaacgacggggucuacuucgcgagcaccgagaaguccaacaucauccgcggcuggaucuucgggacgacccucgacagcaagacccagucccugcugaucgugaacaacgccaccaacguggucaucaaggugugcgaguuccaguucugcaacgaccccuuccucggcguguacuaccacaagaacaacaagagcuggauggaguccgaguuccgggucuacagcuccgccaacaacugcacguucgaguacgugagccagcccuuccugauggaccuggagggcaagcaggggaacuucaagaaccuccgcgaguucguguucaagaacaucgacggcuacuucaagaucuacuccaagcacaccccgaucaaccugguccgggaccugccccagggguucagcgcccucgagccccugguggaccugcccaucggcaucaacaucacccgcuuccagacccuccuggcccugcaccgguccuaccucacgccgggggacagcagcuccggcuggaccgcgggcgccgccgccuacuacgugggguaccugcagccccgcaccuuccugcucaaguacaacgagaacggcaccaucacggacgcggucgacugcgcccuggacccccugagcgagaccaagugcacccucaaguccuucaccguggagaaggggaucuaccagacgagcaacuuccgggugcagcccaccgaguccaucguccgcuucccgaacaucaccaaccugugccccuucggcgagguguucaacgccacccgguucgccagcgucuacgccuggaaccgcaagcggaucuccaacugcguggcggacuacagcgugcuguacaacuccgccagcuucuccacguucaagugcuacggcgucagccccaccaagcucaacgaccugugcuucaccaacguguacgccgacuccuucgugauccgcggggacgagguccggcagaucgcccccggccagaccgggaagaucgccgacuacaacuacaagcugccggacgacuucacgggcugcgugaucgcguggaacagcaagaaccucgacuccaaggucgggggcaacuacaacuaccuguaccgccuguuccgcaagagcaaccucaagcccuucgagcgggacaucuccaccgagaucuaccaggccggcagcacccccugcaacgggguggagggcuucaacugcuacuucccccugcaguccuacggguuccagccgaccaacggcgugggguaccagcccuaccggguggucgugcugagcuucgagcuccugcacgcccccgccacggugugcggccccaagaaguccaccaaccuggucaagaacaagugcgugaacuucaacuucaacggccucaccgggaccggcgugcugaccgagagcaacaagaaguuccugccguuccagcaguucgggcgcgacaucgccgacacgaccgacgcgguccgcgacccccagacccuggagauccucgacaucacccccugcagcuucggcgggguguccgugaucacgccgggcaccaacaccagcaaccaggucgccgugcuguaccagggcgugaacugcaccgagguccccguggccauccacgccgaccagcugacgcccaccuggcggguguacuccaccgggagcaacgucuuccagacccgcgccggcugccucaucggggcggagcacgugaacaacuccuacgagugcgacauccccaucggcgccggcaucugcgccagcuaccagacgcagaccaacuccccgcggcgcgcccggagcguggcgucccagagcaucaucgccuacaccaugucccugggggccgagaacagcgucgccuacuccaacaacagcaucgccauccccaccaacuucacgaucuccgugaccaccgagauccugcccgugagcaugaccaagacgagcgucgacugcaccauguacaucugcggcgacuccaccgagugcagcaaccuccugcugcaguacggguccuucugcacccagcucaaccgcgcgcugacgggcaucgccguggagcaggacaagaacacccaggagguguucgcccaggucaagcagaucuacaagacgcccccgaucaaggacuucgggggcuucaacuucagccagauccugcccgaccccuccaagcccagcaagcgguccuucaucgaggaccuccuguucaacaaggugacccuggccgacgccggcuucaucaagcaguacggggacugccucggcgacaucgcggcccgcgaccugaucugcgcccagaaguucaacgggcugaccgugcucccgccccugcugaccgacgagaugaucgcccaguacaccagcgcccuccuggcgggcaccaucacguccggguggaccuucggcgccggcgccgcccugcagauccccuucgcgaugcagauggccuaccgguucaacgggaucggcgucacccagaacgugcucuacgagaaccagaagcugaucgccaaccaguucaacagcgccaucgggaagauccaggacucccugagcuccaccgccagcgcgcucggcaagcugcaggacguggucaaccagaacgcccaggcccugaacacgcucgugaagcagcuguccagcaacuucggggccaucuccagcgugcugaacgacauccucucccgccuggacaaggucgaggccgaggugcagaucgaccggcugaucaccggccgccuccagagccugcagaccuacgugacccagcagcugauccgggcggccgagauccgcgccagcgccaaccucgccgcgaccaagauguccgagugcguccugggccagagcaagcggguggacuucugcgggaagggcuaccaccugauguccuucccccagagcgccccgcacgggguggucuuccuccacgugacguacguccccgcccaggagaagaacuucaccaccgcccccgcgaucugccacgacggcaaggcccacuucccccgcgaggggguguucguguccaacggcacccacugguucgucacgcagcggaacuucuacgagccgcagaucaucaccaccgacaacaccuucgugagcggcaacugcgacguggucaucgggaucgugaacaacacgguguacgacccccugcagcccgagcuggacuccuucaaggaggagcucgacaaguacuucaagaaccacaccagccccgacgucgaccugggcgacaucuccgggaucaacgccagcguggugaacauccagaaggagaucgaccgccugaacgaggucgccaagaaccucaacgagucccugaucgaccugcaggagcucggcaaguacgagcaguacaucaaguggccgugguacaucuggcugggcuucaucgccgggcugaucgcgaucgugauggugaccaucaugcucugcugcaugaccagcugcugcuccugccugaagggcugcugcagcugcggguccugcugcaaguucgacgaggacgacagcgagcccguccugaagggcgugaagcuccacuacacgugaggacuaguuauaagacugacuagcccgaugggccucccaacgggcccuccuccccuccuugcaccgagagaucucaaaggcucuuuucagagccaccaaaaaaaaaaaaaaaaaaaaaaaaaaaaaaaaaaaaaaaaaaaaaaaaaaaaaaaaaaaaaaaaaaaaaaaaaaaaaaaaaaaaaaaaaaaaaaaaaaaaa

SEQ ID NO: 24531 - RNA, 4035 nt, Artificial Sequence
  SARS-CoV-2/Wuhan/WIV05/2019__EPI_ISL_402128 spike protein mRNA gc (1-1273)(S477N_D614G)
aggagaaagcuuaccauguucguguuccugguccuccugccccuggugagcucccagugcgugaaccucaccacccgcacgcagcugccgcccgccuacaccaacagcuucacccggggcgucuacuaccccgacaagguguuccgcuccagcgugcugcacuccacccaggaccucuuccugcccuucuucagcaacgucacgugguuccacgccauccacguguccgggaccaacggcaccaagcgguucgacaacccggugcugcccuucaacgacggggucuacuucgcgagcaccgagaaguccaacaucauccgcggcuggaucuucgggacgacccucgacagcaagacccagucccugcugaucgugaacaacgccaccaacguggucaucaaggugugcgaguuccaguucugcaacgaccccuuccucggcguguacuaccacaagaacaacaagagcuggauggaguccgaguuccgggucuacagcuccgccaacaacugcacguucgaguacgugagccagcccuuccugauggaccuggagggcaagcaggggaacuucaagaaccuccgcgaguucguguucaagaacaucgacggcuacuucaagaucuacuccaagcacaccccgaucaaccugguccgggaccugccccagggguucagcgcccucgagccccugguggaccugcccaucggcaucaacaucacccgcuuccagacccuccuggcccugcaccgguccuaccucacgccgggggacagcagcuccggcuggaccgcgggcgccgccgccuacuacgugggguaccugcagccccgcaccuuccugcucaaguacaacgagaacggcaccaucacggacgcggucgacugcgcccuggacccccugagcgagaccaagugcacccucaaguccuucaccguggagaaggggaucuaccagacgagcaacuuccgggugcagcccaccgaguccaucguccgcuucccgaacaucaccaaccugugccccuucggcgagguguucaacgccacccgguucgccagcgucuacgccuggaaccgcaagcggaucuccaacugcguggcggacuacagcgugcuguacaacuccgccagcuucuccacguucaagugcuacggcgucagccccaccaagcucaacgaccugugcuucaccaacguguacgccgacuccuucgugauccgcggggacgagguccggcagaucgcccccggccagaccgggaagaucgccgacuacaacuacaagcugccggacgacuucacgggcugcgugaucgcguggaacagcaacaaccucgacuccaaggucgggggcaacuacaacuaccuguaccgccuguuccgcaagagcaaccucaagcccuucgagcgggacaucuccaccgagaucuaccaggccggcaacacccccugcaacgggguggagggcuucaacugcuacuucccccugcagagcuacggguuccagccgaccaacggcgugggguaccagcccuaccggguggucgugcuguccuucgagcuccugcacgcccccgccacggugugcggccccaagaaguccaccaaccuggucaagaacaagugcgugaacuucaacuucaacggccucaccgggaccggcgugcugaccgagagcaacaagaaguuccugccguuccagcaguucgggcgcgacaucgccgacacgaccgacgcgguccgcgacccccagacccuggagauccucgacaucacccccugcagcuucggcggggugagcgugaucacgccgggcaccaacaccuccaaccaggucgccgugcuguaccagggcgugaacugcaccgagguccccguggccauccacgccgaccagcugacgcccaccuggcggguguacagcaccggguccaacgucuuccagacccgcgccggcugccucaucggggcggagcacgugaacaacagcuacgagugcgacauccccaucggcgccggcaucugcgccuccuaccagacgcagaccaacagcccgcggcgcgcccgguccguggcgagccaguccaucaucgccuacaccaugagccugggggccgagaacuccgucgccuacagcaacaacuccaucgccauccccaccaacuucacgaucagcgugaccaccgagauccugcccguguccaugaccaagacgagcgucgacugcaccauguacaucugcggcgacagcaccgagugcuccaaccuccugcugcaguacgggagcuucugcacccagcucaaccgcgcgcugacgggcaucgccguggagcaggacaagaacacccaggagguguucgcccaggucaagcagaucuacaagacgcccccgaucaaggacuucgggggcuucaacuucucccagauccugcccgaccccagcaagcccuccaagcggagcuucaucgaggaccuccuguucaacaaggugacccuggccgacgccggcuucaucaagcaguacggggacugccucggcgacaucgcggcccgcgaccugaucugcgcccagaaguucaacgggcugaccgugcucccgccccugcugaccgacgagaugaucgcccaguacaccuccgcccuccuggcgggcaccaucacgagcggguggaccuucggcgccggcgccgcccugcagauccccuucgcgaugcagauggccuaccgguucaacgggaucggcgucacccagaacgugcucuacgagaaccagaagcugaucgccaaccaguucaacuccgccaucgggaagauccaggacagccuguccagcaccgccuccgcgcucggcaagcugcaggacguggucaaccagaacgcccaggcccugaacacgcucgugaagcagcugagcuccaacuucggggccaucagcuccgugcugaacgacauccucagccgccuggacaaggucgaggccgaggugcagaucgaccggcugaucaccggccgccuccagucccugcagaccuacgugacccagcagcugauccgggcggccgagauccgcgccagcgccaaccucgccgcgaccaagaugagcgagugcguccugggccaguccaagcggguggacuucugcgggaagggcuaccaccugaugagcuucccccaguccgccccgcacgggguggucuuccuccacgugacguacguccccgcccaggagaagaacuucaccaccgcccccgcgaucugccacgacggcaaggcccacuucccccgcgaggggguguucgugagcaacggcacccacugguucgucacgcagcggaacuucuacgagccgcagaucaucaccaccgacaacaccuucguguccggcaacugcgacguggucaucgggaucgugaacaacacgguguacgacccccugcagcccgagcuggacagcuucaaggaggagcucgacaaguacuucaagaaccacaccucccccgacgucgaccugggcgacaucagcgggaucaacgccuccguggugaacauccagaaggagaucgaccgccugaacgaggucgccaagaaccucaacgagagccugaucgaccugcaggagcucggcaaguacgagcaguacaucaaguggccgugguacaucuggcugggcuucaucgccgggcugaucgcgaucgugauggugaccaucaugcucugcugcaugaccuccugcugcagcugccugaagggcugcugcuccugcgggagcugcugcaaguucgacgaggacgacuccgagcccguccugaagggcgugaagcuccacuacacgugaggacuaguuauaagacugacuagcccgaugggccucccaacgggcccuccuccccuccuugcaccgagagaucucaaaggcucuuuucagagccaccaaaaaaaaaaaaaaaaaaaaaaaaaaaaaaaaaaaaaaaaaaaaaaaaaaaaaaaaaaaaaaaaaaaaaaaaaaaaaaaaaaaaaaaaaaaaaaaaaaaaa

SEQ ID NO: 24532 - RNA, 4035 nt, Artificial Sequence
  SARS-CoV-2/Wuhan/WIV05/2019__EPI_ISL_402128 spike protein mRNA gc (1-1273)(N501Y_D614G)
aggagaaagcuuaccauguucguguuccugguccuccugccccuggugagcucccagugcgugaaccucaccacccgcacgcagcugccgcccgccuacaccaacagcuucacccggggcgucuacuaccccgacaagguguuccgcuccagcgugcugcacuccacccaggaccucuuccugcccuucuucagcaacgucacgugguuccacgccauccacguguccgggaccaacggcaccaagcgguucgacaacccggugcugcccuucaacgacggggucuacuucgcgagcaccgagaaguccaacaucauccgcggcuggaucuucgggacgacccucgacagcaagacccagucccugcugaucgugaacaacgccaccaacguggucaucaaggugugcgaguuccaguucugcaacgaccccuuccucggcguguacuaccacaagaacaacaagagcuggauggaguccgaguuccgggucuacagcuccgccaacaacugcacguucgaguacgugagccagcccuuccugauggaccuggagggcaagcaggggaacuucaagaaccuccgcgaguucguguucaagaacaucgacggcuacuucaagaucuacuccaagcacaccccgaucaaccugguccgggaccugccccagggguucagcgcccucgagccccugguggaccugcccaucggcaucaacaucacccgcuuccagacccuccuggcccugcaccgguccuaccucacgccgggggacagcagcuccggcuggaccgcgggcgccgccgccuacuacgugggguaccugcagccccgcaccuuccugcucaaguacaacgagaacggcaccaucacggacgcggucgacugcgcccuggacccccugagcgagaccaagugcacccucaaguccuucaccguggagaaggggaucuaccagacgagcaacuuccgggugcagcccaccgaguccaucguccgcuucccgaacaucaccaaccugugccccuucggcgagguguucaacgccacccgguucgccagcgucuacgccuggaaccgcaagcggaucuccaacugcguggcggacuacagcgugcuguacaacuccgccagcuucuccacguucaagugcuacggcgucagccccaccaagcucaacgaccugugcuucaccaacguguacgccgacuccuucgugauccgcggggacgagguccggcagaucgcccccggccagaccgggaagaucgccgacuacaacuacaagcugccggacgacuucacgggcugcgugaucgcguggaacagcaacaaccucgacuccaaggucgggggcaacuacaacuaccuguaccgccuguuccgcaagagcaaccucaagcccuucgagcgggacaucuccaccgagaucuaccaggccggcagcacccccugcaacgggguggagggcuucaacugcuacuucccccugcaguccuacggguuccagccgaccuacggcgugggguaccagcccuaccggguggucgugcugagcuucgagcuccugcacgcccccgccacggugugcggccccaagaaguccaccaaccuggucaagaacaagugcgugaacuucaacuucaacggccucaccgggaccggcgugcugaccgagagcaacaagaaguuccugccguuccagcaguucgggcgcgacaucgccgacacgaccgacgcgguccgcgacccccagacccuggagauccucgacaucacccccugcagcuucggcgggguguccgugaucacgccgggcaccaacaccagcaaccaggucgccgugcuguaccagggcgugaacugcaccgagguccccguggccauccacgccgaccagcugacgcccaccuggcggguguacuccaccgggagcaacgucuuccagacccgcgccggcugccucaucggggcggagcacgugaacaacuccuacgagugcgacauccccaucggcgccggcaucugcgccagcuaccagacgcagaccaacuccccgcggcgcgcccggagcguggcgucccagagcaucaucgccuacaccaugucccugggggccgagaacagcgucgccuacuccaacaacagcaucgccauccccaccaacuucacgaucuccgugaccaccgagauccugcccgugagcaugaccaagacgagcgucgacugcaccauguacaucugcggcgacuccaccgagugcagcaaccuccugcugcaguacggguccuucugcacccagcucaaccgcgcgcugacgggcaucgccguggagcaggacaagaacacccaggagguguucgcccaggucaagcagaucuacaagacgcccccgaucaaggacuucgggggcuucaacuucagccagauccugcccgaccccuccaagcccagcaagcgguccuucaucgaggaccuccuguucaacaaggugacccuggccgacgccggcuucaucaagcaguacggggacugccucggcgacaucgcggcccgcgaccugaucugcgcccagaaguucaacgggcugaccgugcucccgccccugcugaccgacgagaugaucgcccaguacaccagcgcccuccuggcgggcaccaucacguccggguggaccuucggcgccggcgccgcccugcagauccccuucgcgaugcagauggccuaccgguucaacgggaucggcgucacccagaacgugcucuacgagaaccagaagcugaucgccaaccaguucaacagcgccaucgggaagauccaggacucccugagcuccaccgccagcgcgcucggcaagcugcaggacguggucaaccagaacgcccaggcccugaacacgcucgugaagcagcuguccagcaacuucggggccaucuccagcgugcugaacgacauccucucccgccuggacaaggucgaggccgaggugcagaucgaccggcugaucaccggccgccuccagagccugcagaccuacgugacccagcagcugauccgggcggccgagauccgcgccagcgccaaccucgccgcgaccaagauguccgagugcguccugggccagagcaagcggguggacuucugcgggaagggcuaccaccugauguccuucccccagagcgccccgcacgggguggucuuccuccacgugacguacguccccgcccaggagaagaacuucaccaccgcccccgcgaucugccacgacggcaaggcccacuucccccgcgaggggguguucguguccaacggcacccacugguucgucacgcagcggaacuucuacgagccgcagaucaucaccaccgacaacaccuucgugagcggcaacugcgacguggucaucgggaucgugaacaacacgguguacgacccccugcagcccgagcuggacuccuucaaggaggagcucgacaaguacuucaagaaccacaccagccccgacgucgaccugggcgacaucuccgggaucaacgccagcguggugaacauccagaaggagaucgaccgccugaacgaggucgccaagaaccucaacgagucccugaucgaccugcaggagcucggcaaguacgagcaguacaucaaguggccgugguacaucuggcugggcuucaucgccgggcugaucgcgaucgugauggugaccaucaugcucugcugcaugaccagcugcugcuccugccugaagggcugcugcagcugcggguccugcugcaaguucgacgaggacgacagcgagcccguccugaagggcgugaagcuccacuacacgugaggacuaguuauaagacugacuagcccgaugggccucccaacgggcccuccuccccuccuugcaccgagagaucucaaaggcucuuuucagagccaccaaaaaaaaaaaaaaaaaaaaaaaaaaaaaaaaaaaaaaaaaaaaaaaaaaaaaaaaaaaaaaaaaaaaaaaaaaaaaaaaaaaaaaaaaaaaaaaaaaaaa

SEQ ID NO: 24533 - RNA, 4029 nt, Artificial Sequence
  SARS-CoV-2/Wuhan/WIV05/2019__EPI_ISL_402128 spike protein mRNA gc (1-1273)(H69del_V70del_D614G)
aggagaaagcuuaccauguucguguuccugguccuccugccccuggugagcucccagugcgugaaccucaccacccgcacgcagcugccgcccgccuacaccaacagcuucacccggggcgucuacuaccccgacaagguguuccgcuccagcgugcugcacuccacccaggaccucuuccugcccuucuucagcaacgucacgugguuccacgccaucuccgggaccaacggcaccaagcgguucgacaacccggugcugcccuucaacgacgggguguacuucgcgagcaccgagaaguccaacaucauccgcggcuggaucuucgggacgacccucgacagcaagacccagucccugcugaucgucaacaacgccaccaacguggugaucaaggucugcgaguuccaguucugcaacgaccccuuccucggcguguacuaccacaagaacaacaagagcuggauggaguccgaguuccggguguacagcuccgccaacaacugcacguucgaguacgucagccagcccuuccugauggaccuggagggcaagcaggggaacuucaagaaccuccgcgaguucguguucaagaacaucgacggcuacuucaagaucuacuccaagcacaccccgaucaaccuggugcgggaccugccccagggguucagcgcccucgagccccuggucgaccugcccaucggcaucaacaucacccgcuuccagacccuccuggcccugcaccgguccuaccucacgccgggggacagcagcuccggcuggaccgcgggcgccgccgccuacuacgugggguaccugcagccccgcaccuuccugcucaaguacaacgagaacggcaccaucacggacgcgguggacugcgcccuggacccccugagcgagaccaagugcacccucaaguccuucaccgucgagaaggggaucuaccagacgagcaacuuccgggugcagcccaccgaguccaucgugcgcuucccgaacaucaccaaccugugccccuucggcgaggucuucaacgccacccgguucgccagcguguacgccuggaaccgcaagcggaucuccaacugcgucgcggacuacagcgugcuguacaacuccgccagcuucuccacguucaagugcuacggcgugagccccaccaagcucaacgaccugugcuucaccaacgucuacgccgacuccuucgugauccgcggggacgaggugcggcagaucgcccccggccagaccgggaagaucgccgacuacaacuacaagcugccggacgacuucacgggcugcgucaucgcguggaacagcaacaaccucgacuccaaggucgggggcaacuacaacuaccuguaccgccuguuccgcaagagcaaccucaagcccuucgagcgggacaucuccaccgagaucuaccaggccggcagcacccccugcaacgggguggagggcuucaacugcuacuucccccugcaguccuacggguuccagccgaccaacggcgugggguaccagcccuaccggguggugguccugagcuucgagcuccugcacgcccccgccacggugugcggccccaagaaguccaccaaccuggugaagaacaagugcgucaacuucaacuucaacggccucaccgggaccggcgugcugaccgagagcaacaagaaguuccugccguuccagcaguucgggcgcgacaucgccgacacgaccgacgcggugcgcgacccccagacccuggagauccucgacaucacccccugcagcuucggcggggucuccgugaucacgccgggcaccaacaccagcaaccagguggccguccuguaccagggcgugaacugcaccgaggugcccgucgccauccacgccgaccagcugacgcccaccuggcggguguacuccaccgggagcaacguguuccagacccgcgccggcugccucaucggggcggagcacgucaacaacuccuacgagugcgacauccccaucggcgccggcaucugcgccagcuaccagacgcagaccaacuccccgcggcgcgcccggagcguggcgucccagagcaucaucgccuacaccaugucccugggggccgagaacagcguggccuacuccaacaacagcaucgccauccccaccaacuucacgaucuccgucaccaccgagauccugcccgugagcaugaccaagacgagcguggacugcaccauguacaucugcggcgacuccaccgagugcagcaaccuccugcugcaguacggguccuucugcacccagcucaaccgcgcgcugacgggcaucgccgucgagcaggacaagaacacccaggagguguucgcccaggugaagcagaucuacaagacgcccccgaucaaggacuucgggggcuucaacuucagccagauccugcccgaccccuccaagcccagcaagcgguccuucaucgaggaccuccuguucaacaaggucacccuggccgacgccggcuucaucaagcaguacggggacugccucggcgacaucgcggcccgcgaccugaucugcgcccagaaguucaacgggcugaccgugcucccgccccugcugaccgacgagaugaucgcccaguacaccagcgcccuccuggcgggcaccaucacguccggguggaccuucggcgccggcgccgcccugcagauccccuucgcgaugcagauggccuaccgguucaacgggaucggcgugacccagaacguccucuacgagaaccagaagcugaucgccaaccaguucaacagcgccaucgggaagauccaggacucccugagcuccaccgccagcgcgcucggcaagcugcaggacguggugaaccagaacgcccaggcccugaacacgcucgucaagcagcuguccagcaacuucggggccaucuccagcgugcugaacgacauccucucccgccuggacaagguggaggccgagguccagaucgaccggcugaucaccggccgccuccagagccugcagaccuacgugacccagcagcugauccgggcggccgagauccgcgccagcgccaaccucgccgcgaccaagauguccgagugcgugcugggccagagcaagcgggucgacuucugcgggaagggcuaccaccugauguccuucccccagagcgccccgcacggggugguguuccuccacgucacguacgugcccgcccaggagaagaacuucaccaccgcccccgcgaucugccacgacggcaaggcccacuucccccgcgagggggucuucguguccaacggcacccacugguucgugacgcagcggaacuucuacgagccgcagaucaucaccaccgacaacaccuucgucagcggcaacugcgacguggugaucgggaucgucaacaacacgguguacgacccccugcagcccgagcuggacuccuucaaggaggagcucgacaaguacuucaagaaccacaccagccccgacguggaccugggcgacaucuccgggaucaacgccagcgucgugaacauccagaaggagaucgaccgccugaacgagguggccaagaaccucaacgagucccugaucgaccugcaggagcucggcaaguacgagcaguacaucaaguggccgugguacaucuggcugggcuucaucgccgggcugaucgcgaucgucauggugaccaucaugcucugcugcaugaccagcugcugcuccugccugaagggcugcugcagcugcggguccugcugcaaguucgacgaggacgacagcgagcccgugcugaagggcgucaagcuccacuacacgugaggacuaguuauaagacugacuagcccgaugggccucccaacgggcccuccuccccuccuugcaccgagagaucucaaaggcucuuuucagagccaccaaaaaaaaaaaaaaaaaaaaaaaaaaaaaaaaaaaaaaaaaaaaaaaaaaaaaaaaaaaaaaaaaaaaaaaaaaaaaaaaaaaaaaaaaaaaaaaaaaaaa

SEQ ID NO: 24534 - RNA, 4035 nt, Artificial Sequence
  SARS-CoV-2/Wuhan/WIV05/2019__EPI_ISL_402128 spike protein mRNA gc (1-1273)(Y453F_D614G)
aggagaaagcuuaccauguucguguuccugguccuccugccccuggugagcucccagugcgugaaccucaccacccgcacgcagcugccgcccgccuacaccaacagcuucacccggggcgucuacuaccccgacaagguguuccgcuccagcgugcugcacuccacccaggaccucuuccugcccuucuucagcaacgucacgugguuccacgccauccacguguccgggaccaacggcaccaagcgguucgacaacccggugcugcccuucaacgacggggucuacuucgcgagcaccgagaaguccaacaucauccgcggcuggaucuucgggacgacccucgacagcaagacccagucccugcugaucgugaacaacgccaccaacguggucaucaaggugugcgaguuccaguucugcaacgaccccuuccucggcguguacuaccacaagaacaacaagagcuggauggaguccgaguuccgggucuacagcuccgccaacaacugcacguucgaguacgugagccagcccuuccugauggaccuggagggcaagcaggggaacuucaagaaccuccgcgaguucguguucaagaacaucgacggcuacuucaagaucuacuccaagcacaccccgaucaaccugguccgggaccugccccagggguucagcgcccucgagccccugguggaccugcccaucggcaucaacaucacccgcuuccagacccuccuggcccugcaccgguccuaccucacgccgggggacagcagcuccggcuggaccgcgggcgccgccgccuacuacgugggguaccugcagccccgcaccuuccugcucaaguacaacgagaacggcaccaucacggacgcggucgacugcgcccuggacccccugagcgagaccaagugcacccucaaguccuucaccguggagaaggggaucuaccagacgagcaacuuccgggugcagcccaccgaguccaucguccgcuucccgaacaucaccaaccugugccccuucggcgagguguucaacgccacccgguucgccagcgucuacgccuggaaccgcaagcggaucuccaacugcguggcggacuacagcgugcuguacaacuccgccagcuucuccacguucaagugcuacggcgucagccccaccaagcucaacgaccugugcuucaccaacguguacgccgacuccuucgugauccgcggggacgagguccggcagaucgcccccggccagaccgggaagaucgccgacuacaacuacaagcugccggacgacuucacgggcugcgugaucgcguggaacagcaacaaccucgacuccaaggucgggggcaacuacaacuaccuguuccgccuguuccgcaagagcaaccucaagcccuucgagcgggacaucuccaccgagaucuaccaggccggcagcacccccugcaacgggguggagggcuucaacugcuacuucccccugcaguccuacggguuccagccgaccaacggcgugggguaccagcccuaccggguggucgugcugagcuucgagcuccugcacgcccccgccacggugugcggccccaagaaguccaccaaccuggucaagaacaagugcgugaacuucaacuucaacggccucaccgggaccggcgugcugaccgagagcaacaagaaguuccugccguuccagcaguucgggcgcgacaucgccgacacgaccgacgcgguccgcgacccccagacccuggagauccucgacaucacccccugcagcuucggcgggguguccgugaucacgccgggcaccaacaccagcaaccaggucgccgugcuguaccagggcgugaacugcaccgagguccccguggccauccacgccgaccagcugacgcccaccuggcggguguacuccaccgggagcaacgucuuccagacccgcgccggcugccucaucggggcggagcacgugaacaacuccuacgagugcgacauccccaucggcgccggcaucugcgccagcuaccagacgcagaccaacuccccgcggcgcgcccggagcguggcgucccagagcaucaucgccuacaccaugucccugggggccgagaacagcgucgccuacuccaacaacagcaucgccauccccaccaacuucacgaucuccgugaccaccgagauccugcccgugagcaugaccaagacgagcgucgacugcaccauguacaucugcggcgacuccaccgagugcagcaaccuccugcugcaguacggguccuucugcacccagcucaaccgcgcgcugacgggcaucgccguggagcaggacaagaacacccaggagguguucgcccaggucaagcagaucuacaagacgcccccgaucaaggacuucgggggcuucaacuucagccagauccugcccgaccccuccaagcccagcaagcgguccuucaucgaggaccuccuguucaacaaggugacccuggccgacgccggcuucaucaagcaguacggggacugccucggcgacaucgcggcccgcgaccugaucugcgcccagaaguucaacgggcugaccgugcucccgccccugcugaccgacgagaugaucgcccaguacaccagcgcccuccuggcgggcaccaucacguccggguggaccuucggcgccggcgccgcccugcagauccccuucgcgaugcagauggccuaccgguucaacgggaucggcgucacccagaacgugcucuacgagaaccagaagcugaucgccaaccaguucaacagcgccaucgggaagauccaggacucccugagcuccaccgccagcgcgcucggcaagcugcaggacguggucaaccagaacgcccaggcccugaacacgcucgugaagcagcuguccagcaacuucggggccaucuccagcgugcugaacgacauccucucccgccuggacaaggucgaggccgaggugcagaucgaccggcugaucaccggccgccuccagagccugcagaccuacgugacccagcagcugauccgggcggccgagauccgcgccagcgccaaccucgccgcgaccaagauguccgagugcguccugggccagagcaagcggguggacuucugcgggaagggcuaccaccugauguccuucccccagagcgccccgcacgggguggucuuccuccacgugacguacguccccgcccaggagaagaacuucaccaccgcccccgcgaucugccacgacggcaaggcccacuucccccgcgaggggguguucguguccaacggcacccacugguucgucacgcagcggaacuucuacgagccgcagaucaucaccaccgacaacaccuucgugagcggcaacugcgacguggucaucgggaucgugaacaacacgguguacgacccccugcagcccgagcuggacuccuucaaggaggagcucgacaaguacuucaagaaccacaccagccccgacgucgaccugggcgacaucuccgggaucaacgccagcguggugaacauccagaaggagaucgaccgccugaacgaggucgccaagaaccucaacgagucccugaucgaccugcaggagcucggcaaguacgagcaguacaucaaguggccgugguacaucuggcugggcuucaucgccgggcugaucgcgaucgugauggugaccaucaugcucugcugcaugaccagcugcugcuccugccugaagggcugcugcagcugcggguccugcugcaaguucgacgaggacgacagcgagcccguccugaagggcgugaagcuccacuacacgugaggacuaguuauaagacugacuagcccgaugggccucccaacgggcccuccuccccuccuugcaccgagagaucucaaaggcucuuuucagagccaccaaaaaaaaaaaaaaaaaaaaaaaaaaaaaaaaaaaaaaaaaaaaaaaaaaaaaaaaaaaaaaaaaaaaaaaaaaaaaaaaaaaaaaaaaaaaaaaaaaaaa

SEQ ID NO: 24535 - RNA, 4035 nt, Artificial Sequence
  SARS-CoV-2/Wuhan/WIV05/2019__EPI_ISL_402128 spike protein mRNA gc (1-1273)(D614G_I692V)
aggagaaagcuuaccauguucguguuccugguccuccugccccuggugagcucccagugcgugaaccucaccacccgcacgcagcugccgcccgccuacaccaacagcuucacccggggcgucuacuaccccgacaagguguuccgcuccagcgugcugcacuccacccaggaccucuuccugcccuucuucagcaacgucacgugguuccacgccauccacguguccgggaccaacggcaccaagcgguucgacaacccggugcugcccuucaacgacggggucuacuucgcgagcaccgagaaguccaacaucauccgcggcuggaucuucgggacgacccucgacagcaagacccagucccugcugaucgugaacaacgccaccaacguggucaucaaggugugcgaguuccaguucugcaacgaccccuuccucggcguguacuaccacaagaacaacaagagcuggauggaguccgaguuccgggucuacagcuccgccaacaacugcacguucgaguacgugagccagcccuuccugauggaccuggagggcaagcaggggaacuucaagaaccuccgcgaguucguguucaagaacaucgacggcuacuucaagaucuacuccaagcacaccccgaucaaccugguccgggaccugccccagggguucagcgcccucgagccccugguggaccugcccaucggcaucaacaucacccgcuuccagacccuccuggcccugcaccgguccuaccucacgccgggggacagcagcuccggcuggaccgcgggcgccgccgccuacuacgugggguaccugcagccccgcaccuuccugcucaaguacaacgagaacggcaccaucacggacgcggucgacugcgcccuggacccccugagcgagaccaagugcacccucaaguccuucaccguggagaaggggaucuaccagacgagcaacuuccgggugcagcccaccgaguccaucguccgcuucccgaacaucaccaaccugugccccuucggcgagguguucaacgccacccgguucgccagcgucuacgccuggaaccgcaagcggaucuccaacugcguggcggacuacagcgugcuguacaacuccgccagcuucuccacguucaagugcuacggcgucagccccaccaagcucaacgaccugugcuucaccaacguguacgccgacuccuucgugauccgcggggacgagguccggcagaucgcccccggccagaccgggaagaucgccgacuacaacuacaagcugccggacgacuucacgggcugcgugaucgcguggaacagcaacaaccucgacuccaaggucgggggcaacuacaacuaccuguaccgccuguuccgcaagagcaaccucaagcccuucgagcgggacaucuccaccgagaucuaccaggccggcagcacccccugcaacgggguggagggcuucaacugcuacuucccccugcaguccuacggguuccagccgaccaacggcgugggguaccagcccuaccggguggucgugcugagcuucgagcuccugcacgcccccgccacggugugcggccccaagaaguccaccaaccuggucaagaacaagugcgugaacuucaacuucaacggccucaccgggaccggcgugcugaccgagagcaacaagaaguuccugccguuccagcaguucgggcgcgacaucgccgacacgaccgacgcgguccgcgacccccagacccuggagauccucgacaucacccccugcagcuucggcgggguguccgugaucacgccgggcaccaacaccagcaaccaggucgccgugcuguaccagggcgugaacugcaccgagguccccguggccauccacgccgaccagcugacgcccaccuggcggguguacuccaccgggagcaacgucuuccagacccgcgccggcugccucaucggggcggagcacgugaacaacuccuacgagugcgacauccccaucggcgccggcaucugcgccagcuaccagacgcagaccaacuccccgcggcgcgcccggagcguggcgucccagagcgucaucgccuacaccaugucccugggggccgagaacagcguggccuacuccaacaacagcaucgccauccccaccaacuucacgaucuccgugaccaccgagauccugcccgucagcaugaccaagacgagcguggacugcaccauguacaucugcggcgacuccaccgagugcagcaaccuccugcugcaguacggguccuucugcacccagcucaaccgcgcgcugacgggcaucgccguggagcaggacaagaacacccaggaggucuucgcccaggugaagcagaucuacaagacgcccccgaucaaggacuucgggggcuucaacuucagccagauccugcccgaccccuccaagcccagcaagcgguccuucaucgaggaccuccuguucaacaaggugacccuggccgacgccggcuucaucaagcaguacggggacugccucggcgacaucgcggcccgcgaccugaucugcgcccagaaguucaacgggcugaccguccucccgccccugcugaccgacgagaugaucgcccaguacaccagcgcccuccuggcgggcaccaucacguccggguggaccuucggcgccggcgccgcccugcagauccccuucgcgaugcagauggccuaccgguucaacgggaucggcgugacccagaacgugcucuacgagaaccagaagcugaucgccaaccaguucaacagcgccaucgggaagauccaggacucccugagcuccaccgccagcgcgcucggcaagcugcaggacgucgugaaccagaacgcccaggcccugaacacgcucgugaagcagcuguccagcaacuucggggccaucuccagcguccugaacgacauccucucccgccuggacaagguggaggccgaggugcagaucgaccggcugaucaccggccgccuccagagccugcagaccuacgucacccagcagcugauccgggcggccgagauccgcgccagcgccaaccucgccgcgaccaagauguccgagugcgugcugggccagagcaagcggguggacuucugcgggaagggcuaccaccugauguccuucccccagagcgccccgcacggggucguguuccuccacgucacguacgugcccgcccaggagaagaacuucaccaccgcccccgcgaucugccacgacggcaaggcccacuucccccgcgaggggguguucgucuccaacggcacccacugguucgugacgcagcggaacuucuacgagccgcagaucaucaccaccgacaacaccuucgugagcggcaacugcgacgucgugaucgggaucgugaacaacacggucuacgacccccugcagcccgagcuggacuccuucaaggaggagcucgacaaguacuucaagaaccacaccagccccgacguggaccugggcgacaucuccgggaucaacgccagcguggucaacauccagaaggagaucgaccgccugaacgagguggccaagaaccucaacgagucccugaucgaccugcaggagcucggcaaguacgagcaguacaucaaguggccgugguacaucuggcugggcuucaucgccgggcugaucgcgaucgugauggucaccaucaugcucugcugcaugaccagcugcugcuccugccugaagggcugcugcagcugcggguccugcugcaaguucgacgaggacgacagcgagcccgugcugaagggcgugaagcuccacuacacgugaggacuaguuauaagacugacuagcccgaugggccucccaacgggcccuccuccccuccuugcaccgagagaucucaaaggcucuuuucagagccaccaaaaaaaaaaaaaaaaaaaaaaaaaaaaaaaaaaaaaaaaaaaaaaaaaaaaaaaaaaaaaaaaaaaaaaaaaaaaaaaaaaaaaaaaaaaaaaaaaaaaa

SEQ ID NO: 24536 - RNA, 4035 nt, Artificial Sequence
  SARS-CoV-2/Wuhan/WIV05/2019__EPI_ISL_402128 spike protein mRNA gc (1-1273)(D614G_M1229I)
aggagaaagcuuaccauguucguguuccugguccuccugccccuggugagcucccagugcgugaaccucaccacccgcacgcagcugccgcccgccuacaccaacagcuucacccggggcgucuacuaccccgacaagguguuccgcuccagcgugcugcacuccacccaggaccucuuccugcccuucuucagcaacgucacgugguuccacgccauccacguguccgggaccaacggcaccaagcgguucgacaacccggugcugcccuucaacgacggggucuacuucgcgagcaccgagaaguccaacaucauccgcggcuggaucuucgggacgacccucgacagcaagacccagucccugcugaucgugaacaacgccaccaacguggucaucaaggugugcgaguuccaguucugcaacgaccccuuccucggcguguacuaccacaagaacaacaagagcuggauggaguccgaguuccgggucuacagcuccgccaacaacugcacguucgaguacgugagccagcccuuccugauggaccuggagggcaagcaggggaacuucaagaaccuccgcgaguucguguucaagaacaucgacggcuacuucaagaucuacuccaagcacaccccgaucaaccugguccgggaccugccccagggguucagcgcccucgagccccugguggaccugcccaucggcaucaacaucacccgcuuccagacccuccuggcccugcaccgguccuaccucacgccgggggacagcagcuccggcuggaccgcgggcgccgccgccuacuacgugggguaccugcagccccgcaccuuccugcucaaguacaacgagaacggcaccaucacggacgcggucgacugcgcccuggacccccugagcgagaccaagugcacccucaaguccuucaccguggagaaggggaucuaccagacgagcaacuuccgggugcagcccaccgaguccaucguccgcuucccgaacaucaccaaccugugccccuucggcgagguguucaacgccacccgguucgccagcgucuacgccuggaaccgcaagcggaucuccaacugcguggcggacuacagcgugcuguacaacuccgccagcuucuccacguucaagugcuacggcgucagccccaccaagcucaacgaccugugcuucaccaacguguacgccgacuccuucgugauccgcggggacgagguccggcagaucgcccccggccagaccgggaagaucgccgacuacaacuacaagcugccggacgacuucacgggcugcgugaucgcguggaacagcaacaaccucgacuccaaggucgggggcaacuacaacuaccuguaccgccuguuccgcaagagcaaccucaagcccuucgagcgggacaucuccaccgagaucuaccaggccggcagcacccccugcaacgggguggagggcuucaacugcuacuucccccugcaguccuacggguuccagccgaccaacggcgugggguaccagcccuaccggguggucgugcugagcuucgagcuccugcacgcccccgccacggugugcggccccaagaaguccaccaaccuggucaagaacaagugcgugaacuucaacuucaacggccucaccgggaccggcgugcugaccgagagcaacaagaaguuccugccguuccagcaguucgggcgcgacaucgccgacacgaccgacgcgguccgcgacccccagacccuggagauccucgacaucacccccugcagcuucggcgggguguccgugaucacgccgggcaccaacaccagcaaccaggucgccgugcuguaccagggcgugaacugcaccgagguccccguggccauccacgccgaccagcugacgcccaccuggcggguguacuccaccgggagcaacgucuuccagacccgcgccggcugccucaucggggcggagcacgugaacaacuccuacgagugcgacauccccaucggcgccggcaucugcgccagcuaccagacgcagaccaacuccccgcggcgcgcccggagcguggcgucccagagcaucaucgccuacaccaugucccugggggccgagaacagcgucgccuacuccaacaacagcaucgccauccccaccaacuucacgaucuccgugaccaccgagauccugcccgugagcaugaccaagacgagcgucgacugcaccauguacaucugcggcgacuccaccgagugcagcaaccuccugcugcaguacggguccuucugcacccagcucaaccgcgcgcugacgggcaucgccguggagcaggacaagaacacccaggagguguucgcccaggucaagcagaucuacaagacgcccccgaucaaggacuucgggggcuucaacuucagccagauccugcccgaccccuccaagcccagcaagcgguccuucaucgaggaccuccuguucaacaaggugacccuggccgacgccggcuucaucaagcaguacggggacugccucggcgacaucgcggcccgcgaccugaucugcgcccagaaguucaacgggcugaccgugcucccgccccugcugaccgacgagaugaucgcccaguacaccagcgcccuccuggcgggcaccaucacguccggguggaccuucggcgccggcgccgcccugcagauccccuucgcgaugcagauggccuaccgguucaacgggaucggcgucacccagaacgugcucuacgagaaccagaagcugaucgccaaccaguucaacagcgccaucgggaagauccaggacucccugagcuccaccgccagcgcgcucggcaagcugcaggacguggucaaccagaacgcccaggcccugaacacgcucgugaagcagcuguccagcaacuucggggccaucuccagcgugcugaacgacauccucucccgccuggacaaggucgaggccgaggugcagaucgaccggcugaucaccggccgccuccagagccugcagaccuacgugacccagcagcugauccgggcggccgagauccgcgccagcgccaaccucgccgcgaccaagauguccgagugcguccugggccagagcaagcggguggacuucugcgggaagggcuaccaccugauguccuucccccagagcgccccgcacgggguggucuuccuccacgugacguacguccccgcccaggagaagaacuucaccaccgcccccgcgaucugccacgacggcaaggcccacuucccccgcgaggggguguucguguccaacggcacccacugguucgucacgcagcggaacuucuacgagccgcagaucaucaccaccgacaacaccuucgugagcggcaacugcgacguggucaucgggaucgugaacaacacgguguacgacccccugcagcccgagcuggacuccuucaaggaggagcucgacaaguacuucaagaaccacaccagccccgacgucgaccugggcgacaucuccgggaucaacgccagcguggugaacauccagaaggagaucgaccgccugaacgaggucgccaagaaccucaacgagucccugaucgaccugcaggagcucggcaaguacgagcaguacaucaaguggccgugguacaucuggcugggcuucaucgccgggcugaucgcgaucgugaucgugaccaucaugcucugcugcaugaccagcugcugcuccugccugaagggcugcugcagcugcggguccugcugcaaguucgacgaggacgacagcgagcccguccugaagggcgugaagcuccacuacacgugaggacuaguuauaagacugacuagcccgaugggccucccaacgggcccuccuccccuccuugcaccgagagaucucaaaggcucuuuucagagccaccaaaaaaaaaaaaaaaaaaaaaaaaaaaaaaaaaaaaaaaaaaaaaaaaaaaaaaaaaaaaaaaaaaaaaaaaaaaaaaaaaaaaaaaaaaaaaaaaaaaaa

SEQ ID NO: 24537 - RNA, 4029 nt, Artificial Sequence
  SARS-CoV-2/Wuhan/WIV05/2019__EPI_ISL_402128 spike protein mRNA gc (1-1273)(H69del_V70del_A222V_Y453F_S477N_D614G_I692V)
aggagaaagcuuaccauguucguguuccugguccuccugccccuggugagcucccagugcgugaaccucaccacccgcacgcagcugccgcccgccuacaccaacagcuucacccggggcgucuacuaccccgacaagguguuccgcuccagcgugcugcacuccacccaggaccucuuccugcccuucuucagcaacgucacgugguuccacgccaucuccgggaccaacggcaccaagcgguucgacaacccggugcugcccuucaacgacgggguguacuucgcgagcaccgagaaguccaacaucauccgcggcuggaucuucgggacgacccucgacagcaagacccagucccugcugaucgucaacaacgccaccaacguggugaucaaggucugcgaguuccaguucugcaacgaccccuuccucggcguguacuaccacaagaacaacaagagcuggauggaguccgaguuccggguguacagcuccgccaacaacugcacguucgaguacgucagccagcccuuccugauggaccuggagggcaagcaggggaacuucaagaaccuccgcgaguucguguucaagaacaucgacggcuacuucaagaucuacuccaagcacaccccgaucaaccuggugcgggaccugccccagggguucagcguccucgagccccugguggaccugcccaucggcaucaacaucacccgcuuccagacccuccuggcccugcaccgguccuaccucacgccgggggacagcagcuccggcuggaccgccggcgcggccgccuacuacgugggguaccugcagccccgcaccuuccugcucaaguacaacgagaacggcaccaucacggacgccgucgacugcgcgcuggacccccugagcgagaccaagugcacccucaaguccuucaccguggagaaggggaucuaccagacgagcaacuuccgggugcagcccaccgaguccaucguccgcuucccgaacaucaccaaccugugccccuucggcgagguguucaacgccacccgguucgccagcgucuacgccuggaaccgcaagcggaucuccaacugcguggccgacuacagcgugcuguacaacuccgcgagcuucuccacguucaagugcuacggcgucagccccaccaagcucaacgaccugugcuucaccaacguguacgccgacuccuucgugauccgcggggacgagguccggcagaucgcccccggccagaccgggaagaucgccgacuacaacuacaagcugccggacgacuucacgggcugcgugaucgccuggaacagcaacaaccucgacuccaaggucgggggcaacuacaacuaccuguuccgccuguuccgcaagagcaaccucaagcccuucgagcgggacaucuccaccgagaucuaccaggcgggcaacacccccugcaacgggguggagggcuucaacugcuacuucccccugcagagcuacggguuccagccgaccaacggcgugggguaccagcccuaccggguggucgugcuguccuucgagcuccugcacgcccccgccacggugugcggccccaagaaguccaccaaccuggucaagaacaagugcgugaacuucaacuucaacggccucaccgggaccggcgugcugaccgagagcaacaagaaguuccugccguuccagcaguucgggcgcgacaucgccgacacgaccgacgccguccgcgacccccagacccuggagauccucgacaucacccccugcagcuucggcggggugagcgugaucacgccgggcaccaacaccuccaaccaggucgcggugcuguaccagggcgugaacugcaccgagguccccguggccauccacgccgaccagcugacgcccaccuggcggguguacagcaccggguccaacgucuuccagacccgcgccggcugccucaucggggccgagcacgugaacaacagcuacgagugcgacauccccaucggcgcgggcaucugcgccuccuaccagacgcagaccaacagcccgcggcgcgcccgguccguggccagccaguccgucaucgcguacaccaugagccugggggccgagaacuccguggccuacagcaacaacuccaucgccauccccaccaacuucacgaucagcgugaccaccgagauccugcccgucuccaugaccaagacgagcguggacugcaccauguacaucugcggcgacagcaccgagugcuccaaccuccugcugcaguacgggagcuucugcacccagcucaaccgcgcccugacgggcaucgcgguggagcaggacaagaacacccaggaggucuucgcccaggugaagcagaucuacaagacgcccccgaucaaggacuucgggggcuucaacuucucccagauccugcccgaccccagcaagcccuccaagcggagcuucaucgaggaccuccuguucaacaaggugacccuggccgacgccggcuucaucaagcaguacggggacugccucggcgacaucgccgcgcgcgaccugaucugcgcccagaaguucaacgggcugaccguccucccgccccugcugaccgacgagaugaucgcccaguacaccuccgcccuccuggccggcaccaucacgagcggguggaccuucggcgcgggcgccgcccugcagauccccuucgccaugcagauggcguaccgguucaacgggaucggcgugacccagaacgugcucuacgagaaccagaagcugaucgccaaccaguucaacuccgccaucgggaagauccaggacagccuguccagcaccgccuccgcccucggcaagcugcaggacgucgugaaccagaacgcgcaggcccugaacacgcucgugaagcagcugagcuccaacuucggggccaucagcuccguccugaacgacauccucagccgccuggacaagguggaggccgaggugcagaucgaccggcugaucaccggccgccuccagucccugcagaccuacgucacccagcagcugauccgggccgcggagauccgcgccagcgccaaccucgccgccaccaagaugagcgagugcgugcugggccaguccaagcggguggacuucugcgggaagggcuaccaccugaugagcuucccccaguccgcgccgcacggggucguguuccuccacgucacguacgugcccgcccaggagaagaacuucaccaccgcccccgccaucugccacgacggcaaggcgcacuucccccgcgaggggguguucgucagcaacggcacccacugguucgugacgcagcggaacuucuacgagccgcagaucaucaccaccgacaacaccuucguguccggcaacugcgacgucgugaucgggaucgugaacaacacggucuacgacccccugcagcccgagcuggacagcuucaaggaggagcucgacaaguacuucaagaaccacaccucccccgacguggaccugggcgacaucagcgggaucaacgccuccguggucaacauccagaaggagaucgaccgccugaacgagguggccaagaaccucaacgagagccugaucgaccugcaggagcucggcaaguacgagcaguacaucaaguggccgugguacaucuggcugggcuucaucgccgggcugaucgccaucgugauggucaccaucaugcucugcugcaugaccuccugcugcagcugccugaagggcugcugcuccugcgggagcugcugcaaguucgacgaggacgacuccgagcccgugcugaagggcgugaagcuccacuacacgugaggacuaguuauaagacugacuagcccgaugggccucccaacgggcccuccuccccuccuugcaccgagagaucucaaaggcucuuuucagagccaccaaaaaaaaaaaaaaaaaaaaaaaaaaaaaaaaaaaaaaaaaaaaaaaaaaaaaaaaaaaaaaaaaaaaaaaaaaaaaaaaaaaaaaaaaaaaaaaaaaaaa

SEQ ID NO: 24538 - RNA, 4029 nt, Artificial Sequence
  SARS-CoV-2/Wuhan/WIV05/2019__EPI_ISL_402128 spike protein mRNA gc (1-1273)(H69del_V70del_Y453F_D614G_I692V_M1229I)
aggagaaagcuuaccauguucguguuccugguccuccugccccuggugagcucccagugcgugaaccucaccacccgcacgcagcugccgcccgccuacaccaacagcuucacccggggcgucuacuaccccgacaagguguuccgcuccagcgugcugcacuccacccaggaccucuuccugcccuucuucagcaacgucacgugguuccacgccaucuccgggaccaacggcaccaagcgguucgacaacccggugcugcccuucaacgacgggguguacuucgcgagcaccgagaaguccaacaucauccgcggcuggaucuucgggacgacccucgacagcaagacccagucccugcugaucgucaacaacgccaccaacguggugaucaaggucugcgaguuccaguucugcaacgaccccuuccucggcguguacuaccacaagaacaacaagagcuggauggaguccgaguuccggguguacagcuccgccaacaacugcacguucgaguacgucagccagcccuuccugauggaccuggagggcaagcaggggaacuucaagaaccuccgcgaguucguguucaagaacaucgacggcuacuucaagaucuacuccaagcacaccccgaucaaccuggugcgggaccugccccagggguucagcgcccucgagccccuggucgaccugcccaucggcaucaacaucacccgcuuccagacccuccuggcccugcaccgguccuaccucacgccgggggacagcagcuccggcuggaccgcgggcgccgccgccuacuacgugggguaccugcagccccgcaccuuccugcucaaguacaacgagaacggcaccaucacggacgcgguggacugcgcccuggacccccugagcgagaccaagugcacccucaaguccuucaccgucgagaaggggaucuaccagacgagcaacuuccgggugcagcccaccgaguccaucgugcgcuucccgaacaucaccaaccugugccccuucggcgaggucuucaacgccacccgguucgccagcguguacgccuggaaccgcaagcggaucuccaacugcgucgcggacuacagcgugcuguacaacuccgccagcuucuccacguucaagugcuacggcgugagccccaccaagcucaacgaccugugcuucaccaacgucuacgccgacuccuucgugauccgcggggacgaggugcggcagaucgcccccggccagaccgggaagaucgccgacuacaacuacaagcugccggacgacuucacgggcugcgucaucgcguggaacagcaacaaccucgacuccaaggucgggggcaacuacaacuaccuguuccgccuguuccgcaagagcaaccucaagcccuucgagcgggacaucuccaccgagaucuaccaggccggcagcacccccugcaacgggguggagggcuucaacugcuacuucccccugcaguccuacggguuccagccgaccaacggcgugggguaccagcccuaccggguggugguccugagcuucgagcuccugcacgcccccgccacggugugcggccccaagaaguccaccaaccuggugaagaacaagugcgucaacuucaacuucaacggccucaccgggaccggcgugcugaccgagagcaacaagaaguuccugccguuccagcaguucgggcgcgacaucgccgacacgaccgacgcggugcgcgacccccagacccuggagauccucgacaucacccccugcagcuucggcggggucuccgugaucacgccgggcaccaacaccagcaaccagguggccguccuguaccagggcgugaacugcaccgaggugcccgucgccauccacgccgaccagcugacgcccaccuggcggguguacuccaccgggagcaacguguuccagacccgcgccggcugccucaucggggcggagcacgucaacaacuccuacgagugcgacauccccaucggcgccggcaucugcgccagcuaccagacgcagaccaacuccccgcggcgcgcccggagcguggcgucccagagcgugaucgccuacaccaugucccugggggccgagaacagcgucgccuacuccaacaacagcaucgccauccccaccaacuucacgaucuccgugaccaccgagauccugcccgugagcaugaccaagacgagcgucgacugcaccauguacaucugcggcgacuccaccgagugcagcaaccuccugcugcaguacggguccuucugcacccagcucaaccgcgcgcugacgggcaucgccguggagcaggacaagaacacccaggagguguucgcccaggucaagcagaucuacaagacgcccccgaucaaggacuucgggggcuucaacuucagccagauccugcccgaccccuccaagcccagcaagcgguccuucaucgaggaccuccuguucaacaaggugacccuggccgacgccggcuucaucaagcaguacggggacugccucggcgacaucgcggcccgcgaccugaucugcgcccagaaguucaacgggcugaccgugcucccgccccugcugaccgacgagaugaucgcccaguacaccagcgcccuccuggcgggcaccaucacguccggguggaccuucggcgccggcgccgcccugcagauccccuucgcgaugcagauggccuaccgguucaacgggaucggcgucacccagaacgugcucuacgagaaccagaagcugaucgccaaccaguucaacagcgccaucgggaagauccaggacucccugagcuccaccgccagcgcgcucggcaagcugcaggacguggucaaccagaacgcccaggcccugaacacgcucgugaagcagcuguccagcaacuucggggccaucuccagcgugcugaacgacauccucucccgccuggacaaggucgaggccgaggugcagaucgaccggcugaucaccggccgccuccagagccugcagaccuacgugacccagcagcugauccgggcggccgagauccgcgccagcgccaaccucgccgcgaccaagauguccgagugcguccugggccagagcaagcggguggacuucugcgggaagggcuaccaccugauguccuucccccagagcgccccgcacgggguggucuuccuccacgugacguacguccccgcccaggagaagaacuucaccaccgcccccgcgaucugccacgacggcaaggcccacuucccccgcgaggggguguucguguccaacggcacccacugguucgucacgcagcggaacuucuacgagccgcagaucaucaccaccgacaacaccuucgugagcggcaacugcgacguggucaucgggaucgugaacaacacgguguacgacccccugcagcccgagcuggacuccuucaaggaggagcucgacaaguacuucaagaaccacaccagccccgacgucgaccugggcgacaucuccgggaucaacgccagcguggugaacauccagaaggagaucgaccgccugaacgaggucgccaagaaccucaacgagucccugaucgaccugcaggagcucggcaaguacgagcaguacaucaaguggccgugguacaucuggcugggcuucaucgccgggcugaucgcgaucgugaucgugaccaucaugcucugcugcaugaccagcugcugcuccugccugaagggcugcugcagcugcggguccugcugcaaguucgacgaggacgacagcgagcccguccugaagggcgugaagcuccacuacacgugaggacuaguuauaagacugacuagcccgaugggccucccaacgggcccuccuccccuccuugcaccgagagaucucaaaggcucuuuucagagccaccaaaaaaaaaaaaaaaaaaaaaaaaaaaaaaaaaaaaaaaaaaaaaaaaaaaaaaaaaaaaaaaaaaaaaaaaaaaaaaaaaaaaaaaaaaaaaaaaaaaaa

SEQ ID NO: 24539 - RNA, 4026 nt, Artificial Sequence
  SARS-CoV-2/Wuhan/WIV05/2019__EPI_ISL_402128 spike protein mRNA gc (1-1273)(H69del_V70del_Y144del_N501Y_A570D_D614G_P681H_T716I_S982 A_D1118H)
aggagaaagcuuaccauguucguguuccugguccuccugccccuggugagcucccagugcgugaaccucaccacccgcacgcagcugccgcccgccuacaccaacagcuucacccggggcgucuacuaccccgacaagguguuccgcuccagcgugcugcacuccacccaggaccucuuccugcccuucuucagcaacgucacgugguuccacgccaucuccgggaccaacggcaccaagcgguucgacaacccggugcugcccuucaacgacgggguguacuucgcgagcaccgagaaguccaacaucauccgcggcuggaucuucgggacgacccucgacagcaagacccagucccugcugaucgucaacaacgccaccaacguggugaucaaggucugcgaguuccaguucugcaacgaccccuuccucggcguguaccacaagaacaacaagagcuggauggaguccgaguuccggguguacagcuccgccaacaacugcacguucgaguacgucagccagcccuuccugauggaccuggagggcaagcaggggaacuucaagaaccuccgcgaguucguguucaagaacaucgacggcuacuucaagaucuacuccaagcacaccccgaucaaccuggugcgggaccugccccagggguucagcgcccucgagccccuggucgaccugcccaucggcaucaacaucacccgcuuccagacccuccuggcccugcaccgguccuaccucacgccgggggacagcagcuccggcuggaccgcgggcgccgccgccuacuacgugggguaccugcagccccgcaccuuccugcucaaguacaacgagaacggcaccaucacggacgcgguggacugcgcccuggacccccugagcgagaccaagugcacccucaaguccuucaccgucgagaaggggaucuaccagacgagcaacuuccgggugcagcccaccgaguccaucgugcgcuucccgaacaucaccaaccugugccccuucggcgaggucuucaacgccacccgguucgccagcguguacgccuggaaccgcaagcggaucuccaacugcgucgcggacuacagcgugcuguacaacuccgccagcuucuccacguucaagugcuacggcgugagccccaccaagcucaacgaccugugcuucaccaacgucuacgccgacuccuucgugauccgcggggacgaggugcggcagaucgcccccggccagaccgggaagaucgccgacuacaacuacaagcugccggacgacuucacgggcugcgucaucgcguggaacagcaacaaccucgacuccaaggucgggggcaacuacaacuaccuguaccgccuguuccgcaagagcaaccucaagcccuucgagcgggacaucuccaccgagaucuaccaggccggcagcacccccugcaacgggguggagggcuucaacugcuacuucccccugcaguccuacggguuccagccgaccuacggcgugggguaccagcccuaccggguggugguccugagcuucgagcuccugcacgcccccgccacggugugcggccccaagaaguccaccaaccuggugaagaacaagugcgucaacuucaacuucaacggccucaccgggaccggcgugcugaccgagagcaacaagaaguuccugccguuccagcaguucgggcgcgacaucgacgacacgaccgacgccgugcgcgacccccagacccuggagauccucgacaucacccccugcagcuucggcggggucuccgugaucacgccgggcaccaacaccagcaaccagguggcgguccuguaccagggcgugaacugcaccgaggugcccgucgccauccacgccgaccagcugacgcccaccuggcggguguacuccaccgggagcaacguguuccagacccgcgccggcugccucaucggggccgagcacgucaacaacuccuacgagugcgacauccccaucggcgcgggcaucugcgccagcuaccagacgcagaccaacucccaccggcgcgcccggagcguggccucccagagcaucaucgcguacaccaugucccugggggccgagaacagcguggccuacuccaacaacagcaucgccaucccgaucaacuucaccaucuccgucacgaccgagauccugcccgugagcaugaccaagaccagcguggacugcacgauguacaucugcggcgacuccaccgagugcagcaaccuccugcugcaguacggguccuucugcacccagcucaaccgcgcccugaccggcaucgcggucgagcaggacaagaacacgcaggagguguucgcccaggugaagcagaucuacaagaccccgcccaucaaggacuucgggggcuucaacuucagccagauccugcccgaccccuccaagcccagcaagcgguccuucaucgaggaccuccuguucaacaaggucacccuggccgacgccggcuucaucaagcaguacggggacugccucggcgacaucgccgcgcgcgaccugaucugcgcccagaaguucaacgggcugaccgugcugcccccgcuccugacggacgagaugaucgcccaguacaccagcgcccuccuggccggcaccaucaccuccggguggacguucggcgcgggcgccgcccugcagauccccuucgccaugcagauggcguaccgguucaacgggaucggcgugacccagaacguccucuacgagaaccagaagcugaucgccaaccaguucaacagcgccaucgggaagauccaggacucccugagcuccaccgccagcgcccucggcaagcugcaggacguggugaaccagaacgcgcaggcccugaacacccucgucaagcagcuguccagcaacuucggggccaucuccagcgugcugaacgacauccucgcccgccuggacaagguggaggccgagguccagaucgaccggcugaucacgggccgccuccagucccugcagaccuacgugacccagcagcugauccgggcggccgagauccgcgccagcgccaaccucgccgcgaccaagaugagcgagugcgugcugggccaguccaagcgggucgacuucugcgggaagggcuaccaccugaugagcuucccccaguccgcgccccacggggugguguuccuccacgucaccuacgugccggcccaggagaagaacuucacgaccgcccccgccaucugccacgacggcaaggcccacuucccccgcgagggggucuucgugagcaacggcacccacugguucgugacccagcggaacuucuacgagccccagaucaucacgacccacaacaccuucgucuccggcaacugcgacguggugaucgggaucgucaacaacaccguguacgacccgcugcagcccgagcuggacagcuucaaggaggagcucgacaaguacuucaagaaccacacgucccccgacguggaccugggcgacaucagcgggaucaacgccuccgucgugaacauccagaaggagaucgaccgccugaacgagguggccaagaaccucaacgagagccugaucgaccugcaggagcucggcaaguacgagcaguacaucaaguggcccugguacaucuggcugggcuucaucgccgggcugaucgcgaucgucauggugaccaucaugcucugcugcaugaccuccugcugcagcugccugaagggcugcugcuccugcgggagcugcugcaaguucgacgaggacgacuccgagccggugcugaagggcgucaagcuccacuacaccugaggacuaguuauaagacugacuagcccgaugggccucccaacgggcccuccuccccuccuugcaccgagagaucucaaaggcucuuuucagagccaccaaaaaaaaaaaaaaaaaaaaaaaaaaaaaaaaaaaaaaaaaaaaaaaaaaaaaaaaaaaaaaaaaaaaaaaaaaaaaaaaaaaaaaaaaaaaaaaaaaaaa

SEQ ID NO: 24540 - RNA, 4035 nt, Artificial Sequence
  SARS-CoV-2/Wuhan/WIV05/2019__EPI_ISL_402128 spike protein mRNA gc (1-1273)(K417N_E484K_N501Y_D614G)
aggagaaagcuuaccauguucguguuccugguccuccugccccuggugagcucccagugcgugaaccucaccacccgcacgcagcugccgcccgccuacaccaacagcuucacccggggcgucuacuaccccgacaagguguuccgcuccagcgugcugcacuccacccaggaccucuuccugcccuucuucagcaacgucacgugguuccacgccauccacguguccgggaccaacggcaccaagcgguucgacaacccggugcugcccuucaacgacggggucuacuucgcgagcaccgagaaguccaacaucauccgcggcuggaucuucgggacgacccucgacagcaagacccagucccugcugaucgugaacaacgccaccaacguggucaucaaggugugcgaguuccaguucugcaacgaccccuuccucggcguguacuaccacaagaacaacaagagcuggauggaguccgaguuccgggucuacagcuccgccaacaacugcacguucgaguacgugagccagcccuuccugauggaccuggagggcaagcaggggaacuucaagaaccuccgcgaguucguguucaagaacaucgacggcuacuucaagaucuacuccaagcacaccccgaucaaccugguccgggaccugccccagggguucagcgcccucgagccccugguggaccugcccaucggcaucaacaucacccgcuuccagacccuccuggcccugcaccgguccuaccucacgccgggggacagcagcuccggcuggaccgcgggcgccgccgccuacuacgugggguaccugcagccccgcaccuuccugcucaaguacaacgagaacggcaccaucacggacgcggucgacugcgcccuggacccccugagcgagaccaagugcacccucaaguccuucaccguggagaaggggaucuaccagacgagcaacuuccgggugcagcccaccgaguccaucguccgcuucccgaacaucaccaaccugugccccuucggcgagguguucaacgccacccgguucgccagcgucuacgccuggaaccgcaagcggaucuccaacugcguggcggacuacagcgugcuguacaacuccgccagcuucuccacguucaagugcuacggcgucagccccaccaagcucaacgaccugugcuucaccaacguguacgccgacuccuucgugauccgcggggacgagguccggcagaucgcccccggccagaccgggaacaucgccgacuacaacuacaagcugccggacgacuucacgggcugcgugaucgcguggaacagcaacaaccucgacuccaaggucgggggcaacuacaacuaccuguaccgccuguuccgcaagagcaaccucaagcccuucgagcgggacaucuccaccgagaucuaccaggccggcagcacccccugcaacggggugaagggcuucaacugcuacuucccccugcaguccuacggguuccagccgaccuacggcgugggguaccagcccuaccggguggucgugcugagcuucgagcuccugcacgcccccgccacggugugcggccccaagaaguccaccaaccuggucaagaacaagugcgugaacuucaacuucaacggccucaccgggaccggcgugcugaccgagagcaacaagaaguuccugccguuccagcaguucgggcgcgacaucgccgacacgaccgacgcgguccgcgacccccagacccuggagauccucgacaucacccccugcagcuucggcgggguguccgugaucacgccgggcaccaacaccagcaaccaggucgccgugcuguaccagggcgugaacugcaccgagguccccguggccauccacgccgaccagcugacgcccaccuggcggguguacuccaccgggagcaacgucuuccagacccgcgccggcugccucaucggggcggagcacgugaacaacuccuacgagugcgacauccccaucggcgccggcaucugcgccagcuaccagacgcagaccaacuccccgcggcgcgcccggagcguggcgucccagagcaucaucgccuacaccaugucccugggggccgagaacagcgucgccuacuccaacaacagcaucgccauccccaccaacuucacgaucuccgugaccaccgagauccugcccgugagcaugaccaagacgagcgucgacugcaccauguacaucugcggcgacuccaccgagugcagcaaccuccugcugcaguacggguccuucugcacccagcucaaccgcgcgcugacgggcaucgccguggagcaggacaagaacacccaggagguguucgcccaggucaagcagaucuacaagacgcccccgaucaaggacuucgggggcuucaacuucagccagauccugcccgaccccuccaagcccagcaagcgguccuucaucgaggaccuccuguucaacaaggugacccuggccgacgccggcuucaucaagcaguacggggacugccucggcgacaucgcggcccgcgaccugaucugcgcccagaaguucaacgggcugaccgugcucccgccccugcugaccgacgagaugaucgcccaguacaccagcgcccuccuggcgggcaccaucacguccggguggaccuucggcgccggcgccgcccugcagauccccuucgcgaugcagauggccuaccgguucaacgggaucggcgucacccagaacgugcucuacgagaaccagaagcugaucgccaaccaguucaacagcgccaucgggaagauccaggacucccugagcuccaccgccagcgcgcucggcaagcugcaggacguggucaaccagaacgcccaggcccugaacacgcucgugaagcagcuguccagcaacuucggggccaucuccagcgugcugaacgacauccucucccgccuggacaaggucgaggccgaggugcagaucgaccggcugaucaccggccgccuccagagccugcagaccuacgugacccagcagcugauccgggcggccgagauccgcgccagcgccaaccucgccgcgaccaagauguccgagugcguccugggccagagcaagcggguggacuucugcgggaagggcuaccaccugauguccuucccccagagcgccccgcacgggguggucuuccuccacgugacguacguccccgcccaggagaagaacuucaccaccgcccccgcgaucugccacgacggcaaggcccacuucccccgcgaggggguguucguguccaacggcacccacugguucgucacgcagcggaacuucuacgagccgcagaucaucaccaccgacaacaccuucgugagcggcaacugcgacguggucaucgggaucgugaacaacacgguguacgacccccugcagcccgagcuggacuccuucaaggaggagcucgacaaguacuucaagaaccacaccagccccgacgucgaccugggcgacaucuccgggaucaacgccagcguggugaacauccagaaggagaucgaccgccugaacgaggucgccaagaaccucaacgagucccugaucgaccugcaggagcucggcaaguacgagcaguacaucaaguggccgugguacaucuggcugggcuucaucgccgggcugaucgcgaucgugauggugaccaucaugcucugcugcaugaccagcugcugcuccugccugaagggcugcugcagcugcggguccugcugcaaguucgacgaggacgacagcgagcccguccugaagggcgugaagcuccacuacacgugaggacuaguuauaagacugacuagcccgaugggccucccaacgggcccuccuccccuccuugcaccgagagaucucaaaggcucuuuucagagccaccaaaaaaaaaaaaaaaaaaaaaaaaaaaaaaaaaaaaaaaaaaaaaaaaaaaaaaaaaaaaaaaaaaaaaaaaaaaaaaaaaaaaaaaaaaaaaaaaaaaaa

SEQ ID NO: 24541 - RNA, 4026 nt, Artificial Sequence
  SARS-CoV-2/Wuhan/WIV05/2019__EPI_ISL_402128 spike protein mRNA gc (1-1273)(L18F_D80A_D215G_L242del_A243del_L244del_R246I_K417N_E484 K_N501Y_D614G_A701V)
aggagaaagcuuaccauguucguguuccugguccuccugccccuggugagcucccagugcgugaacuucaccacccgcacgcagcucccgcccgccuacaccaacagcuucacccggggcgucuacuaccccgacaagguguuccgcuccagcgugcugcacuccacccaggaccuguuccuccccuucuucagcaacgucacgugguuccacgccauccacguguccgggaccaacggcaccaagcgguucgcgaacccggugcugcccuucaacgacggggucuacuucgccagcaccgagaaguccaacaucauccgcggcuggaucuucgggacgacccuggacagcaagacccagucccuccugaucgugaacaacgccaccaacguggucaucaaggugugcgaguuccaguucugcaacgaccccuuccugggcguguacuaccacaagaacaacaagagcuggauggaguccgaguuccgggucuacagcuccgccaacaacugcacguucgaguacgugagccagcccuuccucauggaccuggagggcaagcaggggaacuucaagaaccugcgcgaguucguguucaagaacaucgacggcuacuucaagaucuacuccaagcacaccccgaucaaccucguccgggggcugccccagggcuucagcgcccuggagccccucguggaccugcccaucgggaucaacaucacccgcuuccagacccugcacaucuccuaccucacgccgggcgacagcagcuccggcuggaccgcgggggccgccgccuacuacgugggcuaccugcagccccggaccuuccugcucaaguacaacgagaacgggaccaucacggacgcggucgacugcgcccuggacccccugagcgagaccaagugcacccucaaguccuucaccguggagaagggcaucuaccagacgagcaacuuccgcgugcagcccaccgaguccaucguccgguucccgaacaucaccaaccugugccccuucggcgagguguucaacgccacccgcuucgccagcgucuacgccuggaaccggaagcgcaucuccaacugcguggcggacuacagcgugcuguacaacuccgccagcuucuccacguucaagugcuacggggucagccccaccaagcucaacgaccugugcuucaccaacguguacgccgacuccuucgugauccggggcgacgagguccgccagaucgcccccgggcagaccggcaacaucgccgacuacaacuacaagcugccggacgacuucacggggugcgugaucgcguggaacagcaacaaccucgacuccaaggugggcggcaacuacaacuaccuguaccggcuguuccgcaagagcaaccucaagcccuucgagcgggacaucuccaccgagaucuaccaggccgggagcacccccugcaacggcgucaagggguucaacugcuacuucccccugcaguccuacggcuuccagccgaccuacggggugggcuaccagcccuaccgcguggucgugcugagcuucgagcuccugcacgcccccgccacggugugcggccccaagaaguccaccaaccuggucaagaacaagugcgugaacuucaacuucaacgggcucaccggcaccggggugcugaccgagagcaacaagaaguuccugccguuccagcaguucggccgggacaucgccgacacgaccgacgcgguccgcgacccccagacccucgagauccuggacaucacccccugcagcuucgggggcguguccgugaucacgccgggcaccaacaccagcaaccaggucgccgugcuguaccagggggugaacugcaccgagguccccguggccauccacgccgaccagcugacgcccaccuggcgcguguacuccaccggcagcaacgucuuccagacccgggccgggugccucaucggcgcggagcacgugaacaacuccuacgagugcgacauccccaucggcgccgggaucugcgccagcuaccagacgcagaccaacuccccgcgccgggcccgcagcguggcgucccagagcaucaucgccuacaccaugucccugggcgucgagaacagcguggccuacuccaacaacagcaucgccauccccaccaacuucacgaucuccgugaccaccgagauccugcccgucagcaugaccaagacgagcguggacugcaccauguacaucugcggggacuccaccgagugcagcaaccuccugcugcaguacggcuccuucugcacccagcucaaccgggcccugacggggaucgcgguggagcaggacaagaacacccaggaggucuucgcccaggugaagcagaucuacaagacgcccccgaucaaggacuucggcggcuucaacuucagccagauccugcccgaccccuccaagcccagcaagcgcuccuucaucgaggaccuccuguucaacaaggugacccuggccgacgccggguucaucaagcaguacggcgacugccucggggacaucgccgcgcgggaccugaucugcgcccagaaguucaacggccugaccguccucccgccccugcugaccgacgagaugaucgcccaguacaccagcgcccuccuggccgggaccaucacguccggcuggaccuucggcgcgggggccgcccugcagauccccuucgccaugcagauggcguaccgcuucaacggcaucggggugacccagaacgugcucuacgagaaccagaagcugaucgccaaccaguucaacagcgccaucggcaagauccaggacucccugagcuccaccgccagcgcccucgggaagcugcaggacgucgugaaccagaacgcgcaggcccugaacacgcucgugaagcagcuguccagcaacuucggcgccaucuccagcguccugaacgacauccucucccggcuggacaagguggaggccgaggugcagaucgaccgccugaucaccggccggcuccagagccugcagaccuacgucacccagcagcugauccgcgccgcggagauccgggccagcgccaaccucgccgccaccaagauguccgagugcgugcuggggcagagcaagcgcguggacuucugcggcaagggguaccaccugauguccuucccccagagcgcgccgcacggcgucguguuccuccacgucacguacgugcccgcccaggagaagaacuucaccaccgcccccgccaucugccacgacgggaaggcgcacuucccccgggagggcguguucgucuccaacggcacccacugguucgugacgcagcgcaacuucuacgagccgcagaucaucaccaccgacaacaccuucgugagcgggaacugcgacgucgugaucggcaucgugaacaacacggucuacgacccccugcagcccgagcuggacuccuucaaggaggagcucgacaaguacuucaagaaccacaccagccccgacguggaccugggggacaucuccggcaucaacgccagcguggucaacauccagaaggagaucgaccggcugaacgagguggccaagaaccucaacgagucccugaucgaccugcaggagcucggcaaguacgagcaguacaucaaguggccgugguacaucuggcugggguucaucgccggccugaucgccaucgugauggucaccaucaugcucugcugcaugaccagcugcugcuccugccugaaggggugcugcagcugcggcuccugcugcaaguucgacgaggacgacagcgagcccgugcugaagggggugaagcuccacuacacgugaggacuaguuauaagacugacuagcccgaugggccucccaacgggcccuccuccccuccuugcaccgagagaucucaaaggcucuuuucagagccaccaaaaaaaaaaaaaaaaaaaaaaaaaaaaaaaaaaaaaaaaaaaaaaaaaaaaaaaaaaaaaaaaaaaaaaaaaaaaaaaaaaaaaaaaaaaaaaaaaaaaa

SEQ ID NO: 24542 - RNA, 4035 nt, Artificial Sequence
  SARS-CoV-2/Wuhan/WIV05/2019__EPI_ISL_402128 spike protein mRNA gc (1-1273)(E484K_D614G)
aggagaaagcuuaccauguucguguuccugguccuccugccccuggugagcucccagugcgugaaccucaccacccgcacgcagcugccgcccgccuacaccaacagcuucacccggggcgucuacuaccccgacaagguguuccgcuccagcgugcugcacuccacccaggaccucuuccugcccuucuucagcaacgucacgugguuccacgccauccacguguccgggaccaacggcaccaagcgguucgacaacccggugcugcccuucaacgacggggucuacuucgcgagcaccgagaaguccaacaucauccgcggcuggaucuucgggacgacccucgacagcaagacccagucccugcugaucgugaacaacgccaccaacguggucaucaaggugugcgaguuccaguucugcaacgaccccuuccucggcguguacuaccacaagaacaacaagagcuggauggaguccgaguuccgggucuacagcuccgccaacaacugcacguucgaguacgugagccagcccuuccugauggaccuggagggcaagcaggggaacuucaagaaccuccgcgaguucguguucaagaacaucgacggcuacuucaagaucuacuccaagcacaccccgaucaaccugguccgggaccugccccagggguucagcgcccucgagccccugguggaccugcccaucggcaucaacaucacccgcuuccagacccuccuggcccugcaccgguccuaccucacgccgggggacagcagcuccggcuggaccgcgggcgccgccgccuacuacgugggguaccugcagccccgcaccuuccugcucaaguacaacgagaacggcaccaucacggacgcggucgacugcgcccuggacccccugagcgagaccaagugcacccucaaguccuucaccguggagaaggggaucuaccagacgagcaacuuccgggugcagcccaccgaguccaucguccgcuucccgaacaucaccaaccugugccccuucggcgagguguucaacgccacccgguucgccagcgucuacgccuggaaccgcaagcggaucuccaacugcguggcggacuacagcgugcuguacaacuccgccagcuucuccacguucaagugcuacggcgucagccccaccaagcucaacgaccugugcuucaccaacguguacgccgacuccuucgugauccgcggggacgagguccggcagaucgcccccggccagaccgggaagaucgccgacuacaacuacaagcugccggacgacuucacgggcugcgugaucgcguggaacagcaacaaccucgacuccaaggucgggggcaacuacaacuaccuguaccgccuguuccgcaagagcaaccucaagcccuucgagcgggacaucuccaccgagaucuaccaggccggcagcacccccugcaacggggugaagggcuucaacugcuacuucccccugcaguccuacggguuccagccgaccaacggcgugggguaccagcccuaccggguggucgugcugagcuucgagcuccugcacgcccccgccacggugugcggccccaagaaguccaccaaccuggucaagaacaagugcgugaacuucaacuucaacggccucaccgggaccggcgugcugaccgagagcaacaagaaguuccugccguuccagcaguucgggcgcgacaucgccgacacgaccgacgcgguccgcgacccccagacccuggagauccucgacaucacccccugcagcuucggcgggguguccgugaucacgccgggcaccaacaccagcaaccaggucgccgugcuguaccagggcgugaacugcaccgagguccccguggccauccacgccgaccagcugacgcccaccuggcggguguacuccaccgggagcaacgucuuccagacccgcgccggcugccucaucggggcggagcacgugaacaacuccuacgagugcgacauccccaucggcgccggcaucugcgccagcuaccagacgcagaccaacuccccgcggcgcgcccggagcguggcgucccagagcaucaucgccuacaccaugucccugggggccgagaacagcgucgccuacuccaacaacagcaucgccauccccaccaacuucacgaucuccgugaccaccgagauccugcccgugagcaugaccaagacgagcgucgacugcaccauguacaucugcggcgacuccaccgagugcagcaaccuccugcugcaguacggguccuucugcacccagcucaaccgcgcgcugacgggcaucgccguggagcaggacaagaacacccaggagguguucgcccaggucaagcagaucuacaagacgcccccgaucaaggacuucgggggcuucaacuucagccagauccugcccgaccccuccaagcccagcaagcgguccuucaucgaggaccuccuguucaacaaggugacccuggccgacgccggcuucaucaagcaguacggggacugccucggcgacaucgcggcccgcgaccugaucugcgcccagaaguucaacgggcugaccgugcucccgccccugcugaccgacgagaugaucgcccaguacaccagcgcccuccuggcgggcaccaucacguccggguggaccuucggcgccggcgccgcccugcagauccccuucgcgaugcagauggccuaccgguucaacgggaucggcgucacccagaacgugcucuacgagaaccagaagcugaucgccaaccaguucaacagcgccaucgggaagauccaggacucccugagcuccaccgccagcgcgcucggcaagcugcaggacguggucaaccagaacgcccaggcccugaacacgcucgugaagcagcuguccagcaacuucggggccaucuccagcgugcugaacgacauccucucccgccuggacaaggucgaggccgaggugcagaucgaccggcugaucaccggccgccuccagagccugcagaccuacgugacccagcagcugauccgggcggccgagauccgcgccagcgccaaccucgccgcgaccaagauguccgagugcguccugggccagagcaagcggguggacuucugcgggaagggcuaccaccugauguccuucccccagagcgccccgcacgggguggucuuccuccacgugacguacguccccgcccaggagaagaacuucaccaccgcccccgcgaucugccacgacggcaaggcccacuucccccgcgaggggguguucguguccaacggcacccacugguucgucacgcagcggaacuucuacgagccgcagaucaucaccaccgacaacaccuucgugagcggcaacugcgacguggucaucgggaucgugaacaacacgguguacgacccccugcagcccgagcuggacuccuucaaggaggagcucgacaaguacuucaagaaccacaccagccccgacgucgaccugggcgacaucuccgggaucaacgccagcguggugaacauccagaaggagaucgaccgccugaacgaggucgccaagaaccucaacgagucccugaucgaccugcaggagcucggcaaguacgagcaguacaucaaguggccgugguacaucuggcugggcuucaucgccgggcugaucgcgaucgugauggugaccaucaugcucugcugcaugaccagcugcugcuccugccugaagggcugcugcagcugcggguccugcugcaaguucgacgaggacgacagcgagcccguccugaagggcgugaagcuccacuacacgugaggacuaguuauaagacugacuagcccgaugggccucccaacgggcccuccuccccuccuugcaccgagagaucucaaaggcucuuuucagagccaccaaaaaaaaaaaaaaaaaaaaaaaaaaaaaaaaaaaaaaaaaaaaaaaaaaaaaaaaaaaaaaaaaaaaaaaaaaaaaaaaaaaaaaaaaaaaaaaaaaaaa

SEQ ID NO: 24543 - RNA, 4035 nt, Artificial Sequence
  SARS-CoV-2/Wuhan/WIV05/2019__EPI_ISL_402128 spike protein mRNA gc (1-1273)(L18F_T20N_P26S_D138Y_R190S_K417T_E484K_N501Y_D614G_H655Y _T1027I)
aggagaaagcuuaccauguucguguuccugguccuccugccccuggugagcucccagugcgugaacuucaccaaccgcacccagcucccgagcgccuacacgaacuccuucacccggggcgucuacuaccccgacaagguguuccgcagcuccgugcugcacagcacccaggaccuguuccuccccuucuucuccaacgucaccugguuccacgccauccacgugagcgggacgaacggcaccaagcgguucgacaaccccgugcugccguucaacgacggggucuacuucgcguccaccgagaaguccaacaucauccgcggcuggaucuucgggaccacgcuggacuccaagacccagagccuccugaucgugaacaacgccaccaacguggucaucaaggugugcgaguuccaguucugcaacuaccccuuccugggcguguacuaccacaagaacaacaaguccuggauggagagcgaguuccgggucuacuccagcgccaacaacugcaccuucgaguacgugucccagcccuuccucauggaccuggagggcaagcaggggaacuucaagaaccugagcgaguucguguucaagaacaucgacggcuacuucaagaucuacuccaagcacacgcccaucaaccucguccgcgaccugccgcagggguucagcgcccuggagccccucguggaccugcccaucggcaucaacaucacccgguuccagacccugcucgcccugcaccgcagcuaccugacccccggggacuccagcuccggcuggacggcgggcgccgccgccuacuacgugggguaccuccagccgcggaccuuccugcugaaguacaacgagaacggcaccaucaccgacgcggucgacugcgcccucgacccccugagcgagacgaagugcacccugaaguccuucaccguggagaaggggaucuaccagaccagcaacuuccgcgugcagcccacggaguccaucguccgguuccccaacaucaccaaccucugcccguucggcgagguguucaacgccacccgcuucgccagcgucuacgccuggaaccggaagcgcaucuccaacugcguggcggacuacagcgugcuguacaacuccgccagcuucuccaccuucaagugcuacggcgucagccccacgaagcugaacgaccucugcuucaccaacguguacgccgacuccuucgugauccgcggggacgagguccggcagaucgcccccggccagaccgggaccaucgccgacuacaacuacaagcugcccgacgacuucacgggcugcgugaucgcguggaacagcaacaaccuggacuccaaggucgggggcaacuacaacuaccucuaccggcuguuccgcaagagcaaccugaagccguucgagcgggacaucuccaccgagaucuaccaggccggcagcacccccugcaacggggugaagggcuucaacugcuacuucccccuccagagcuacggguuccagcccaccuacggcgugggguaccagccguaccgcguggucgugcuguccuucgagcugcuccacgcccccgccacggugugcggccccaagaaguccaccaaccuggucaagaacaagugcgugaacuucaacuucaacggccugaccgggaccggcgugcucaccgagagcaacaagaaguuccugcccuuccagcaguucgggcgggacaucgccgacacgaccgacgcgguccgcgacccgcagacccuggagauccuggacaucacccccugcagcuucggcgggguguccgugaucacgcccggcaccaacaccagcaaccaggucgccgugcucuaccagggcgugaacugcaccgaggucccgguggccauccacgccgaccagcugacgcccaccuggcgcguguacuccaccgggagcaacgucuuccagacccgggccggcugccugaucggggcggaguacgugaacaacuccuacgagugcgacauccccaucggcgccggcaucugcgccagcuaccagacgcagaccaacagcccccgccgggcccgcagcguggcgucccagagcaucaucgccuacaccaugucccucggggccgagaacagcgucgccuacuccaacaacagcaucgccaucccgaccaacuucacgaucagcgugaccaccgagauccugcccguguccaugaccaagacgagcgucgacugcaccauguacaucugcggcgacuccaccgagugcagcaaccugcuccugcaguacggguccuucugcacccagcugaaccgggcgcucacgggcaucgccguggagcaggacaagaacacccaggagguguucgcccaggucaagcagaucuacaagaccccgcccaucaaggacuucgggggcuucaacuucagccagauccugcccgaccccuccaagcccagcaagcgcuccuucaucgaggaccuccuguucaacaaggugacccuggccgacgccggcuucaucaagcaguacggggacugccugggcgacaucgcggcccgggaccucaucugcgcccagaaguucaacgggcugacggugcugcccccgcuccugaccgacgagaugaucgcccaguacaccagcgcccugcucgcgggcaccaucacguccggguggaccuucggcgccggcgccgcccugcagauccccuucgcgaugcagauggccuaccgcuucaacgggaucggcgucacccagaacgugcuguacgagaaccagaagcucaucgccaaccaguucaacagcgccaucgggaagauccaggacucccugagcuccaccgccagcgcgcugggcaagcuccaggacguggucaaccagaacgcccaggcccugaacacgcuggugaagcagcucuccagcaacuucggggccaucuccagcgugcugaacgacauccugagccggcucgacaaggucgaggccgaggugcagaucgaccgccugaucaccggccggcugcagucccuccagaccuacgugacccagcagcugauccgcgcggccgagauccgggccagcgccaaccuggccgcgaucaagauguccgagugcguccucggccagagcaagcgcguggacuucugcgggaagggcuaccaccugauguccuucccccagagcgcgccccacgggguggucuuccugcacgugaccuacgucccggcccaggagaagaacuucacgaccgcccccgccaucugccacgacggcaaggcccacuucccccgggaggggguguucguguccaacggcacccacugguucgucacccagcgcaacuucuacgagccccagaucaucacgaccgacaacaccuucgugagcggcaacugcgacguggucaucgggaucgugaacaacaccguguacgacccgcuccagcccgagcuggacuccuucaaggaggagcuggacaaguacuucaagaaccacacgagccccgacgucgaccucggcgacaucuccgggaucaacgccagcguggugaacauccagaaggagaucgaccggcugaacgaggucgccaagaaccugaacgagucccucaucgaccugcaggagcugggcaaguacgagcaguacaucaaguggcccugguacaucuggcucggcuucaucgccgggcugaucgcgaucgugauggugaccaucaugcugugcugcaugaccagcugcugcuccugccucaagggcugcugcagcugcggguccugcugcaaguucgacgaggacgacagcgagccgguccugaagggcgugaagcugcacuacaccugaggacuaguuauaagacugacuagcccgaugggccucccaacgggcccuccuccccuccuugcaccgagagaucucaaaggcucuuuucagagccaccaaaaaaaaaaaaaaaaaaaaaaaaaaaaaaaaaaaaaaaaaaaaaaaaaaaaaaaaaaaaaaaaaaaaaaaaaaaaaaaaaaaaaaaaaaaaaaaaaaaaa

SEQ ID NO: 24544 - RNA, 4035 nt, Artificial Sequence
  SARS-CoV-2/Wuhan/WIV05/2019__EPI_ISL_402128 spike protein mRNA gc (1-1273)(S13I_W152C_L452R_D614G)
aggagaaagcuuaccauguucguguuccugguccuccugccccuggugagcauccagugcgugaaccucaccacccgcacgcagcugccgcccgccuacaccaacuccuucacccggggcgucuacuaccccgacaagguguuccgcagcuccgugcugcacagcacccaggaccucuuccugcccuucuucuccaacgucacgugguuccacgccauccacgugagcgggaccaacggcaccaagcgguucgacaacccggugcugcccuucaacgacggggucuacuucgcguccaccgagaaguccaacaucauccgcggcuggaucuucgggacgacccucgacagcaagacccagagccugcugaucgugaacaacgccaccaacguggucaucaaggugugcgaguuccaguucugcaacgaccccuuccucggcguguacuaccacaagaacaacaaguccugcauggagagcgaguuccgggucuacuccagcgccaacaacugcacguucgaguacgugucccagcccuuccugauggaccuggagggcaagcaggggaacuucaagaaccuccgcgaguucguguucaagaacaucgacggcuacuucaagaucuacagcaagcacaccccgaucaaccugguccgggaccugccccagggguucuccgcccucgagccccugguggaccugcccaucggcaucaacaucacccgcuuccagacccuccuggcccugcaccggagcuaccucacgccgggggacuccagcagcggcuggaccgcgggcgccgccgccuacuacgugggguaccugcagccccgcaccuuccugcucaaguacaacgagaacggcaccaucacggacgcggucgacugcgcccuggacccccuguccgagaccaagugcacccucaagagcuucaccguggagaaggggaucuaccagacguccaacuuccgggugcagcccaccgagagcaucguccgcuucccgaacaucaccaaccugugccccuucggcgagguguucaacgccacccgguucgccuccgucuacgccuggaaccgcaagcggaucagcaacugcguggcggacuacuccgugcuguacaacagcgccuccuucagcacguucaagugcuacggcgucucccccaccaagcucaacgaccugugcuucaccaacguguacgccgacagcuucgugauccgcggggacgagguccggcagaucgcccccggccagaccgggaagaucgccgacuacaacuacaagcugccggacgacuucacgggcugcgugaucgcguggaacuccaacaaccucgacagcaaggucgggggcaacuacaacuaccgcuaccggcuguuccgcaaguccaaccugaagcccuucgagcgggacaucagcaccgagaucuaccaggccggcuccacccccugcaacgggguggagggcuucaacugcuacuucccccuccagagcuacggguuccagccgaccaacggcgugggguaccagcccuaccgcguggucgugcuguccuucgagcugcuccacgcccccgccacggugugcggccccaagaaguccaccaaccuggucaagaacaagugcgugaacuucaacuucaacggccugaccgggaccggcgugcucaccgagagcaacaagaaguuccugccguuccagcaguucgggcgcgacaucgccgacacgaccgacgcgguccgggacccccagacccuggagauccuggacaucacccccugcagcuucggcggggugagcgugaucacgccgggcaccaacaccuccaaccaggucgccgugcucuaccagggcgugaacugcaccgagguccccguggccauccacgccgaccagcugacgcccaccuggcgcguguacagcaccggguccaacgucuuccagacccgggccggcugccugaucggggcggagcacgugaacaacagcuacgagugcgacauccccaucggcgccggcaucugcgccuccuaccagacgcagaccaacagcccgcgccgggcccgcuccguggcgagccaguccaucaucgccuacaccaugagccucggggccgagaacuccgucgccuacagcaacaacuccaucgccauccccaccaacuucacgaucagcgugaccaccgagauccugcccguguccaugaccaagacgagcgucgacugcaccauguacaucugcggcgacagcaccgagugcuccaaccugcuccugcaguacgggagcuucugcacccagcugaaccgggcgcucacgggcaucgccguggagcaggacaagaacacccaggagguguucgcccaggucaagcagaucuacaagacgcccccgaucaaggacuucgggggcuucaacuucucccagauccugcccgaccccagcaagcccuccaagcgcagcuucaucgaggaccuccuguucaacaaggugacccuggccgacgccggcuucaucaagcaguacggggacugccugggcgacaucgcggcccgggaccucaucugcgcccagaaguucaacgggcugaccgugcugccgccccuccugaccgacgagaugaucgcccaguacaccuccgcccugcucgcgggcaccaucacgagcggguggaccuucggcgccggcgccgcccugcagauccccuucgcgaugcagauggccuaccgcuucaacgggaucggcgucacccagaacgugcuguacgagaaccagaagcucaucgccaaccaguucaacuccgccaucgggaagauccaggacagccuguccagcaccgccuccgcgcugggcaagcuccaggacguggucaaccagaacgcccaggcccugaacacgcuggugaagcagcucagcuccaacuucggggccaucagcuccgugcugaacgacauccugagccggcucgacaaggucgaggccgaggugcagaucgaccgccugaucaccggccggcugcagucccuccagaccuacgugacccagcagcugauccgcgcggccgagauccgggccagcgccaaccuggccgcgaccaagaugagcgagugcguccucggccaguccaagcgcguggacuucugcgggaagggcuaccaccugaugagcuucccccaguccgccccgcacgggguggucuuccugcacgugacguacguccccgcccaggagaagaacuucaccaccgcccccgcgaucugccacgacggcaaggcccacuucccccgggaggggguguucgugagcaacggcacccacugguucgucacgcagcgcaacuucuacgagccgcagaucaucaccaccgacaacaccuucguguccggcaacugcgacguggucaucgggaucgugaacaacacgguguacgacccccuccagcccgagcuggacagcuucaaggaggagcuggacaaguacuucaagaaccacaccucccccgacgucgaccucggcgacaucagcgggaucaacgccuccguggugaacauccagaaggagaucgaccggcugaacgaggucgccaagaaccugaacgagagccucaucgaccugcaggagcugggcaaguacgagcaguacaucaaguggccgugguacaucuggcucggcuucaucgccgggcugaucgcgaucgugauggugaccaucaugcugugcugcaugaccuccugcugcagcugccucaagggcugcugcuccugcgggagcugcugcaaguucgacgaggacgacuccgagcccguccugaagggcgugaagcugcacuacacgugaggacuaguuauaagacugacuagcccgaugggccucccaacgggcccuccuccccuccuugcaccgagagaucucaaaggcucuuuucagagccaccaaaaaaaaaaaaaaaaaaaaaaaaaaaaaaaaaaaaaaaaaaaaaaaaaaaaaaaaaaaaaaaaaaaaaaaaaaaaaaaaaaaaaaaaaaaaaaaaaaaaa

SEQ ID NO: 24545 - RNA, 4035 nt, Artificial Sequence
  SARS-CoV-2/Wuhan/WIV05/2019__EPI_ISL_402128 spike protein mRNA gc (1-1273)
aggagaaagcuuaccauguucguguuccuggugcugcugccccuggugagcagccagugcgugaaccugaccacccggacccagcugccaccagccuacaccaacagcuucacccggggcgucuacuaccccgacaagguguuccggagcagcguccugcacagcacccaggaccuguuccugcccuucuucagcaacgugaccugguuccacgccauccacgugagcggcaccaacggcaccaagcgguucgacaaccccgugcugcccuucaacgacggcguguacuucgccagcaccgagaagagcaacaucauccggggcuggaucuucggcaccacccuggacagcaagacccagagccugcugaucgugaauaacgccaccaacguggugaucaaggugugcgaguuccaguucugcaacgaccccuuccugggcguguacuaccacaagaacaacaagagcuggauggagagcgaguuccggguguacagcagcgccaacaacugcaccuucgaguacgugagccagcccuuccugauggaccuggagggcaagcagggcaacuucaagaaccugcgggaguucguguucaagaacaucgacggcuacuucaagaucuacagcaagcacaccccaaucaaccuggugcgggaucugccccagggcuucucagcccuggagccccugguggaccugcccaucggcaucaacaucacccgguuccagacccugcuggcccugcaccggagcuaccugaccccaggcgacagcagcagcggguggacagcaggcgcggcugcuuacuacgugggcuaccugcagccccggaccuuccugcugaaguacaacgagaacggcaccaucaccgacgccguggacugcgcccuggacccucugagcgagaccaagugcacccugaagagcuucaccguggagaagggcaucuaccagaccagcaacuuccgggugcagcccaccgagagcaucgugcgguuccccaacaucaccaaccugugccccuucggcgagguguucaacgccacccgguucgccagcguguacgccuggaaccggaagcggaucagcaacugcguggccgacuacagcgugcuguacaacagcgccagcuucagcaccuucaagugcuacggcgugagccccaccaagcugaacgaccugugcuucaccaacguguacgccgacagcuucgugauccguggcgacgaggugcggcagaucgcacccggccagacaggcaagaucgccgacuacaacuacaagcugcccgacgacuucaccggcugcgugaucgccuggaacagcaacaaccucgacagcaaggugggcggcaacuacaacuaccuguaccggcuguuccggaagagcaaccugaagcccuucgagcgggacaucagcaccgagaucuaccaagccggcuccaccccuugcaacggcguggagggcuucaacugcuacuucccucugcagagcuacggcuuccagcccaccaacggcgugggcuaccagcccuaccgggugguggugcugagcuucgagcugcugcacgccccagccaccguguguggccccaagaagagcaccaaccuggugaagaacaagugcgugaacuucaacuucaacggccuuaccggcaccggcgugcugaccgagagcaacaagaaauuccugcccuuucagcaguucggccgggacaucgccgacaccaccgacgcugugcgggauccccagacccuggagauccuggacaucaccccuugcagcuucggcggcgugagcgugaucaccccaggcaccaacaccagcaaccagguggccgugcuguaccaggacgugaacugcaccgaggugcccguggccauccacgccgaccagcugacacccaccuggcgggucuacagcaccggcagcaacguguuccagacccgggccgguugccugaucggcgccgagcacgugaacaacagcuacgagugcgacauccccaucggcgccggcaucugugccagcuaccagacccagaccaauucaccccggagggcaaggagcguggccagccagagcaucaucgccuacaccaugagccugggcgccgagaacagcguggccuacagcaacaacagcaucgccauccccaccaacuucaccaucagcgugaccaccgagauucugcccgugagcaugaccaagaccagcguggacugcaccauguacaucugcggcgacagcaccgagugcagcaaccugcugcugcaguacggcagcuucugcacccagcugaaccgggcccugaccggcaucgccguggagcaggacaagaacacccaggagguguucgcccaggugaagcagaucuacaagaccccucccaucaaggacuucggcggcuucaacuucagccagauccugcccgaccccagcaagcccagcaagcggagcuucaucgaggaccugcuguucaacaaggugacccuagccgacgccggcuucaucaagcaguacggcgacugccucggcgacauagccgcccgggaccugaucugcgcccagaaguucaacggccugaccgugcugccuccccugcugaccgacgagaugaucgcccaguacaccagcgcccuguuagccggaaccaucaccagcggcuggacuuucggcgcuggagccgcucugcagauccccuucgccaugcagauggccuaccgguucaacggcaucggcgugacccagaacgugcuguacgagaaccagaagcugaucgccaaccaguucaacagcgccaucggcaagauccaggacagccugagcagcaccgcuagcgcccugggcaagcugcaggacguggugaaccagaacgcccaggcccugaacacccuggugaagcagcugagcagcaacuucggcgccaucagcagcgugcugaacgacauccugagccggcuggacaaggucgaggccgaggugcagaucgaccggcugaucacuggccggcugcagagccugcagaccuacgugacccagcagcugauccgggccgccgagauucgggccagcgccaaccuggccgccaccaagaugagcgagugcgugcugggccagagcaagcggguggacuucugcggcaagggcuaccaccugaugagcuuuccccagagcgcaccccacggagugguguuccugcacgugaccuacgugcccgcccaggagaagaacuucaccaccgccccagccaucugccacgacggcaaggcccacuuuccccgggagggcguguucgugagcaacggcacccacugguucgugacccagcggaacuucuacgagccccagaucaucaccaccgacaacaccuucgugagcggcaacugcgacguggugaucggcaucgugaacaacaccguguacgauccccugcagcccgagcuggacagcuucaaggaggagcuggacaaguacuucaagaaucacaccagccccgacguggaccugggcgacaucagcggcaucaacgccagcguggugaacauccagaaggagaucgaucggcugaacgagguggccaagaaccugaacgagagccugaucgaccugcaggagcugggcaaguacgagcaguacaucaaguggcccugguacaucuggcugggcuucaucgccggccugaucgccaucgugauggugaccaucaugcugugcugcaugaccagcugcugcagcugccugaagggcuguugcagcugcggcagcugcugcaaguucgacgaggacgacagcgagcccgugcugaagggcgugaagcugcacuacaccugaggacuaguuauaagacugacuagcccgaugggccucccaacgggcccuccuccccuccuugcaccgagagaucucaaaggcucuuuucagagccaccaaaaaaaaaaaaaaaaaaaaaaaaaaaaaaaaaaaaaaaaaaaaaaaaaaaaaaaaaaaaaaaaaaaaaaaaaaaaaaaaaaaaaaaaaaaaaaaaaaaaa

SEQ ID NO: 24546 - RNA, 4035 nt, Artificial Sequence
  SARS-CoV-2/Wuhan/WIV05/2019__EPI_ISL_402128 spike protein mRNA gc (1-1273)(D614G)
aggagaaagcuuaccauguucguguuccuggugcugcugccccuggugagcagccagugcgugaaccugaccacccggacccagcugccaccagccuacaccaacagcuucacccggggcgucuacuaccccgacaagguguuccggagcagcguccugcacagcacccaggaccuguuccugcccuucuucagcaacgugaccugguuccacgccauccacgugagcggcaccaacggcaccaagcgguucgacaaccccgugcugcccuucaacgacggcguguacuucgccagcaccgagaagagcaacaucauccggggcuggaucuucggcaccacccuggacagcaagacccagagccugcugaucgugaauaacgccaccaacguggugaucaaggugugcgaguuccaguucugcaacgaccccuuccugggcguguacuaccacaagaacaacaagagcuggauggagagcgaguuccggguguacagcagcgccaacaacugcaccuucgaguacgugagccagcccuuccugauggaccuggagggcaagcagggcaacuucaagaaccugcgggaguucguguucaagaacaucgacggcuacuucaagaucuacagcaagcacaccccaaucaaccuggugcgggaucugccccagggcuucucagcccuggagccccugguggaccugcccaucggcaucaacaucacccgguuccagacccugcuggcccugcaccggagcuaccugaccccaggcgacagcagcagcggguggacagcaggcgcggcugcuuacuacgugggcuaccugcagccccggaccuuccugcugaaguacaacgagaacggcaccaucaccgacgccguggacugcgcccuggacccucugagcgagaccaagugcacccugaagagcuucaccguggagaagggcaucuaccagaccagcaacuuccgggugcagcccaccgagagcaucgugcgguuccccaacaucaccaaccugugccccuucggcgagguguucaacgccacccgguucgccagcguguacgccuggaaccggaagcggaucagcaacugcguggccgacuacagcgugcuguacaacagcgccagcuucagcaccuucaagugcuacggcgugagccccaccaagcugaacgaccugugcuucaccaacguguacgccgacagcuucgugauccguggcgacgaggugcggcagaucgcacccggccagacaggcaagaucgccgacuacaacuacaagcugcccgacgacuucaccggcugcgugaucgccuggaacagcaacaaccucgacagcaaggugggcggcaacuacaacuaccuguaccggcuguuccggaagagcaaccugaagcccuucgagcgggacaucagcaccgagaucuaccaagccggcuccaccccuugcaacggcguggagggcuucaacugcuacuucccucugcagagcuacggcuuccagcccaccaacggcgugggcuaccagcccuaccgggugguggugcugagcuucgagcugcugcacgccccagccaccguguguggccccaagaagagcaccaaccuggugaagaacaagugcgugaacuucaacuucaacggccuuaccggcaccggcgugcugaccgagagcaacaagaaauuccugcccuuucagcaguucggccgggacaucgccgacaccaccgacgcugugcgggauccccagacccuggagauccuggacaucaccccuugcagcuucggcggcgugagcgugaucaccccaggcaccaacaccagcaaccagguggccgugcuguaccagggcgugaacugcaccgaggugcccguggccauccacgccgaccagcugacacccaccuggcgggucuacagcaccggcagcaacguguuccagacccgggccgguugccugaucggcgccgagcacgugaacaacagcuacgagugcgacauccccaucggcgccggcaucugugccagcuaccagacccagaccaauucaccccggagggcaaggagcguggccagccagagcaucaucgccuacaccaugagccugggcgccgagaacagcguggccuacagcaacaacagcaucgccauccccaccaacuucaccaucagcgugaccaccgagauucugcccgugagcaugaccaagaccagcguggacugcaccauguacaucugcggcgacagcaccgagugcagcaaccugcugcugcaguacggcagcuucugcacccagcugaaccgggcccugaccggcaucgccguggagcaggacaagaacacccaggagguguucgcccaggugaagcagaucuacaagaccccucccaucaaggacuucggcggcuucaacuucagccagauccugcccgaccccagcaagcccagcaagcggagcuucaucgaggaccugcuguucaacaaggugacccuagccgacgccggcuucaucaagcaguacggcgacugccucggcgacauagccgcccgggaccugaucugcgcccagaaguucaacggccugaccgugcugccuccccugcugaccgacgagaugaucgcccaguacaccagcgcccuguuagccggaaccaucaccagcggcuggacuuucggcgcuggagccgcucugcagauccccuucgccaugcagauggccuaccgguucaacggcaucggcgugacccagaacgugcuguacgagaaccagaagcugaucgccaaccaguucaacagcgccaucggcaagauccaggacagccugagcagcaccgcuagcgcccugggcaagcugcaggacguggugaaccagaacgcccaggcccugaacacccuggugaagcagcugagcagcaacuucggcgccaucagcagcgugcugaacgacauccugagccggcuggacaaggucgaggccgaggugcagaucgaccggcugaucacuggccggcugcagagccugcagaccuacgugacccagcagcugauccgggccgccgagauucgggccagcgccaaccuggccgccaccaagaugagcgagugcgugcugggccagagcaagcggguggacuucugcggcaagggcuaccaccugaugagcuuuccccagagcgcaccccacggagugguguuccugcacgugaccuacgugcccgcccaggagaagaacuucaccaccgccccagccaucugccacgacggcaaggcccacuuuccccgggagggcguguucgugagcaacggcacccacugguucgugacccagcggaacuucuacgagccccagaucaucaccaccgacaacaccuucgugagcggcaacugcgacguggugaucggcaucgugaacaacaccguguacgauccccugcagcccgagcuggacagcuucaaggaggagcuggacaaguacuucaagaaucacaccagccccgacguggaccugggcgacaucagcggcaucaacgccagcguggugaacauccagaaggagaucgaucggcugaacgagguggccaagaaccugaacgagagccugaucgaccugcaggagcugggcaaguacgagcaguacaucaaguggcccugguacaucuggcugggcuucaucgccggccugaucgccaucgugauggugaccaucaugcugugcugcaugaccagcugcugcagcugccugaagggcuguugcagcugcggcagcugcugcaaguucgacgaggacgacagcgagcccgugcugaagggcgugaagcugcacuacaccugaggacuaguuauaagacugacuagcccgaugggccucccaacgggcccuccuccccuccuugcaccgagagaucucaaaggcucuuuucagagccaccaaaaaaaaaaaaaaaaaaaaaaaaaaaaaaaaaaaaaaaaaaaaaaaaaaaaaaaaaaaaaaaaaaaaaaaaaaaaaaaaaaaaaaaaaaaaaaaaaaaaa

SEQ ID NO: 24547 - RNA, 4035 nt, Artificial Sequence
  SARS-CoV-2/Wuhan/WIV05/2019__EPI_ISL_402128 spike protein mRNA gc (1-1273)(A222V_D614G)
aggagaaagcuuaccauguucguguuccuggugcugcugccccuggugagcagccagugcgugaaccugaccacccggacccagcugccaccagccuacaccaacagcuucacccggggcgucuacuaccccgacaagguguuccggagcagcguccugcacagcacccaggaccuguuccugcccuucuucagcaacgugaccugguuccacgccauccacgugagcggcaccaacggcaccaagcgguucgacaaccccgugcugcccuucaacgacggcguguacuucgccagcaccgagaagagcaacaucauccggggcuggaucuucggcaccacccuggacagcaagacccagagccugcugaucgugaauaacgccaccaacguggugaucaaggugugcgaguuccaguucugcaacgaccccuuccugggcguguacuaccacaagaacaacaagagcuggauggagagcgaguuccggguguacagcagcgccaacaacugcaccuucgaguacgugagccagcccuuccugauggaccuggagggcaagcagggcaacuucaagaaccugcgggaguucguguucaagaacaucgacggcuacuucaagaucuacagcaagcacaccccaaucaaccuggugcgggaucugccccagggcuucucagugcuggagccccugguggaccugcccaucggcaucaacaucacccgguuccagacccugcuggcccugcaccggagcuaccugaccccaggcgacagcagcagcggguggacagcaggcgcggcugcuuacuacgugggcuaccugcagccccggaccuuccugcugaaguacaacgagaacggcaccaucaccgacgccguggacugcgcccuggacccucugagcgagaccaagugcacccugaagagcuucaccguggagaagggcaucuaccagaccagcaacuuccgggugcagcccaccgagagcaucgugcgguuccccaacaucaccaaccugugccccuucggcgagguguucaacgccacccgguucgccagcguguacgccuggaaccggaagcggaucagcaacugcguggccgacuacagcgugcuguacaacagcgccagcuucagcaccuucaagugcuacggcgugagccccaccaagcugaacgaccugugcuucaccaacguguacgccgacagcuucgugauccguggcgacgaggugcggcagaucgcacccggccagacaggcaagaucgccgacuacaacuacaagcugcccgacgacuucaccggcugcgugaucgccuggaacagcaacaaccucgacagcaaggugggcggcaacuacaacuaccuguaccggcuguuccggaagagcaaccugaagcccuucgagcgggacaucagcaccgagaucuaccaagccggcuccaccccuugcaacggcguggagggcuucaacugcuacuucccucugcagagcuacggcuuccagcccaccaacggcgugggcuaccagcccuaccgggugguggugcugagcuucgagcugcugcacgccccagccaccguguguggccccaagaagagcaccaaccuggugaagaacaagugcgugaacuucaacuucaacggccuuaccggcaccggcgugcugaccgagagcaacaagaaauuccugcccuuucagcaguucggccgggacaucgccgacaccaccgacgcugugcgggauccccagacccuggagauccuggacaucaccccuugcagcuucggcggcgugagcgugaucaccccaggcaccaacaccagcaaccagguggccgugcuguaccagggcgugaacugcaccgaggugcccguggccauccacgccgaccagcugacacccaccuggcgggucuacagcaccggcagcaacguguuccagacccgggccgguugccugaucggcgccgagcacgugaacaacagcuacgagugcgacauccccaucggcgccggcaucugugccagcuaccagacccagaccaauucaccccggagggcaaggagcguggccagccagagcaucaucgccuacaccaugagccugggcgccgagaacagcguggccuacagcaacaacagcaucgccauccccaccaacuucaccaucagcgugaccaccgagauucugcccgugagcaugaccaagaccagcguggacugcaccauguacaucugcggcgacagcaccgagugcagcaaccugcugcugcaguacggcagcuucugcacccagcugaaccgggcccugaccggcaucgccguggagcaggacaagaacacccaggagguguucgcccaggugaagcagaucuacaagaccccucccaucaaggacuucggcggcuucaacuucagccagauccugcccgaccccagcaagcccagcaagcggagcuucaucgaggaccugcuguucaacaaggugacccuagccgacgccggcuucaucaagcaguacggcgacugccucggcgacauagccgcccgggaccugaucugcgcccagaaguucaacggccugaccgugcugccuccccugcugaccgacgagaugaucgcccaguacaccagcgcccuguuagccggaaccaucaccagcggcuggacuuucggcgcuggagccgcucugcagauccccuucgccaugcagauggccuaccgguucaacggcaucggcgugacccagaacgugcuguacgagaaccagaagcugaucgccaaccaguucaacagcgccaucggcaagauccaggacagccugagcagcaccgcuagcgcccugggcaagcugcaggacguggugaaccagaacgcccaggcccugaacacccuggugaagcagcugagcagcaacuucggcgccaucagcagcgugcugaacgacauccugagccggcuggacaaggucgaggccgaggugcagaucgaccggcugaucacuggccggcugcagagccugcagaccuacgugacccagcagcugauccgggccgccgagauucgggccagcgccaaccuggccgccaccaagaugagcgagugcgugcugggccagagcaagcggguggacuucugcggcaagggcuaccaccugaugagcuuuccccagagcgcaccccacggagugguguuccugcacgugaccuacgugcccgcccaggagaagaacuucaccaccgccccagccaucugccacgacggcaaggcccacuuuccccgggagggcguguucgugagcaacggcacccacugguucgugacccagcggaacuucuacgagccccagaucaucaccaccgacaacaccuucgugagcggcaacugcgacguggugaucggcaucgugaacaacaccguguacgauccccugcagcccgagcuggacagcuucaaggaggagcuggacaaguacuucaagaaucacaccagccccgacguggaccugggcgacaucagcggcaucaacgccagcguggugaacauccagaaggagaucgaucggcugaacgagguggccaagaaccugaacgagagccugaucgaccugcaggagcugggcaaguacgagcaguacaucaaguggcccugguacaucuggcugggcuucaucgccggccugaucgccaucgugauggugaccaucaugcugugcugcaugaccagcugcugcagcugccugaagggcuguugcagcugcggcagcugcugcaaguucgacgaggacgacagcgagcccgugcugaagggcgugaagcugcacuacaccugaggacuaguuauaagacugacuagcccgaugggccucccaacgggcccuccuccccuccuugcaccgagagaucucaaaggcucuuuucagagccaccaaaaaaaaaaaaaaaaaaaaaaaaaaaaaaaaaaaaaaaaaaaaaaaaaaaaaaaaaaaaaaaaaaaaaaaaaaaaaaaaaaaaaaaaaaaaaaaaaaaaa

SEQ ID NO: 24548 - RNA, 4035 nt, Artificial Sequence
  SARS-CoV-2/Wuhan/WIV05/2019__EPI_ISL_402128 spike protein mRNA gc (1-1273)(N439K_D614G)
aggagaaagcuuaccauguucguguuccuggugcugcugccccuggugagcagccagugcgugaaccugaccacccggacccagcugccaccagccuacaccaacagcuucacccggggcgucuacuaccccgacaagguguuccggagcagcguccugcacagcacccaggaccuguuccugcccuucuucagcaacgugaccugguuccacgccauccacgugagcggcaccaacggcaccaagcgguucgacaaccccgugcugcccuucaacgacggcguguacuucgccagcaccgagaagagcaacaucauccggggcuggaucuucggcaccacccuggacagcaagacccagagccugcugaucgugaauaacgccaccaacguggugaucaaggugugcgaguuccaguucugcaacgaccccuuccugggcguguacuaccacaagaacaacaagagcuggauggagagcgaguuccggguguacagcagcgccaacaacugcaccuucgaguacgugagccagcccuuccugauggaccuggagggcaagcagggcaacuucaagaaccugcgggaguucguguucaagaacaucgacggcuacuucaagaucuacagcaagcacaccccaaucaaccuggugcgggaucugccccagggcuucucagcccuggagccccugguggaccugcccaucggcaucaacaucacccgguuccagacccugcuggcccugcaccggagcuaccugaccccaggcgacagcagcagcggguggacagcaggcgcggcugcuuacuacgugggcuaccugcagccccggaccuuccugcugaaguacaacgagaacggcaccaucaccgacgccguggacugcgcccuggacccucugagcgagaccaagugcacccugaagagcuucaccguggagaagggcaucuaccagaccagcaacuuccgggugcagcccaccgagagcaucgugcgguuccccaacaucaccaaccugugccccuucggcgagguguucaacgccacccgguucgccagcguguacgccuggaaccggaagcggaucagcaacugcguggccgacuacagcgugcuguacaacagcgccagcuucagcaccuucaagugcuacggcgugagccccaccaagcugaacgaccugugcuucaccaacguguacgccgacagcuucgugauccguggcgacgaggugcggcagaucgcacccggccagacaggcaagaucgccgacuacaacuacaagcugcccgacgacuucaccggcugcgugaucgccuggaacagcaagaaccucgacagcaaggugggcggcaacuacaacuaccuguaccggcuguuccggaagagcaaccugaagcccuucgagcgggacaucagcaccgagaucuaccaagccggcuccaccccuugcaacggcguggagggcuucaacugcuacuucccucugcagagcuacggcuuccagcccaccaacggcgugggcuaccagcccuaccgggugguggugcugagcuucgagcugcugcacgccccagccaccguguguggccccaagaagagcaccaaccuggugaagaacaagugcgugaacuucaacuucaacggccuuaccggcaccggcgugcugaccgagagcaacaagaaauuccugcccuuucagcaguucggccgggacaucgccgacaccaccgacgcugugcgggauccccagacccuggagauccuggacaucaccccuugcagcuucggcggcgugagcgugaucaccccaggcaccaacaccagcaaccagguggccgugcuguaccagggcgugaacugcaccgaggugcccguggccauccacgccgaccagcugacacccaccuggcgggucuacagcaccggcagcaacguguuccagacccgggccgguugccugaucggcgccgagcacgugaacaacagcuacgagugcgacauccccaucggcgccggcaucugugccagcuaccagacccagaccaauucaccccggagggcaaggagcguggccagccagagcaucaucgccuacaccaugagccugggcgccgagaacagcguggccuacagcaacaacagcaucgccauccccaccaacuucaccaucagcgugaccaccgagauucugcccgugagcaugaccaagaccagcguggacugcaccauguacaucugcggcgacagcaccgagugcagcaaccugcugcugcaguacggcagcuucugcacccagcugaaccgggcccugaccggcaucgccguggagcaggacaagaacacccaggagguguucgcccaggugaagcagaucuacaagaccccucccaucaaggacuucggcggcuucaacuucagccagauccugcccgaccccagcaagcccagcaagcggagcuucaucgaggaccugcuguucaacaaggugacccuagccgacgccggcuucaucaagcaguacggcgacugccucggcgacauagccgcccgggaccugaucugcgcccagaaguucaacggccugaccgugcugccuccccugcugaccgacgagaugaucgcccaguacaccagcgcccuguuagccggaaccaucaccagcggcuggacuuucggcgcuggagccgcucugcagauccccuucgccaugcagauggccuaccgguucaacggcaucggcgugacccagaacgugcuguacgagaaccagaagcugaucgccaaccaguucaacagcgccaucggcaagauccaggacagccugagcagcaccgcuagcgcccugggcaagcugcaggacguggugaaccagaacgcccaggcccugaacacccuggugaagcagcugagcagcaacuucggcgccaucagcagcgugcugaacgacauccugagccggcuggacaaggucgaggccgaggugcagaucgaccggcugaucacuggccggcugcagagccugcagaccuacgugacccagcagcugauccgggccgccgagauucgggccagcgccaaccuggccgccaccaagaugagcgagugcgugcugggccagagcaagcggguggacuucugcggcaagggcuaccaccugaugagcuuuccccagagcgcaccccacggagugguguuccugcacgugaccuacgugcccgcccaggagaagaacuucaccaccgccccagccaucugccacgacggcaaggcccacuuuccccgggagggcguguucgugagcaacggcacccacugguucgugacccagcggaacuucuacgagccccagaucaucaccaccgacaacaccuucgugagcggcaacugcgacguggugaucggcaucgugaacaacaccguguacgauccccugcagcccgagcuggacagcuucaaggaggagcuggacaaguacuucaagaaucacaccagccccgacguggaccugggcgacaucagcggcaucaacgccagcguggugaacauccagaaggagaucgaucggcugaacgagguggccaagaaccugaacgagagccugaucgaccugcaggagcugggcaaguacgagcaguacaucaaguggcccugguacaucuggcugggcuucaucgccggccugaucgccaucgugauggugaccaucaugcugugcugcaugaccagcugcugcagcugccugaagggcuguugcagcugcggcagcugcugcaaguucgacgaggacgacagcgagcccgugcugaagggcgugaagcugcacuacaccugaggacuaguuauaagacugacuagcccgaugggccucccaacgggcccuccuccccuccuugcaccgagagaucucaaaggcucuuuucagagccaccaaaaaaaaaaaaaaaaaaaaaaaaaaaaaaaaaaaaaaaaaaaaaaaaaaaaaaaaaaaaaaaaaaaaaaaaaaaaaaaaaaaaaaaaaaaaaaaaaaaaa

SEQ ID NO: 24549 - RNA, 4035 nt, Artificial Sequence
  SARS-CoV-2/Wuhan/WIV05/2019__EPI_ISL_402128 spike protein mRNA gc (1-1273)(S477N_D614G)
aggagaaagcuuaccauguucguguuccuggugcugcugccccuggugagcagccagugcgugaaccugaccacccggacccagcugccaccagccuacaccaacagcuucacccggggcgucuacuaccccgacaagguguuccggagcagcguccugcacagcacccaggaccuguuccugcccuucuucagcaacgugaccugguuccacgccauccacgugagcggcaccaacggcaccaagcgguucgacaaccccgugcugcccuucaacgacggcguguacuucgccagcaccgagaagagcaacaucauccggggcuggaucuucggcaccacccuggacagcaagacccagagccugcugaucgugaauaacgccaccaacguggugaucaaggugugcgaguuccaguucugcaacgaccccuuccugggcguguacuaccacaagaacaacaagagcuggauggagagcgaguuccggguguacagcagcgccaacaacugcaccuucgaguacgugagccagcccuuccugauggaccuggagggcaagcagggcaacuucaagaaccugcgggaguucguguucaagaacaucgacggcuacuucaagaucuacagcaagcacaccccaaucaaccuggugcgggaucugccccagggcuucucagcccuggagccccugguggaccugcccaucggcaucaacaucacccgguuccagacccugcuggcccugcaccggagcuaccugaccccaggcgacagcagcagcggguggacagcaggcgcggcugcuuacuacgugggcuaccugcagccccggaccuuccugcugaaguacaacgagaacggcaccaucaccgacgccguggacugcgcccuggacccucugagcgagaccaagugcacccugaagagcuucaccguggagaagggcaucuaccagaccagcaacuuccgggugcagcccaccgagagcaucgugcgguuccccaacaucaccaaccugugccccuucggcgagguguucaacgccacccgguucgccagcguguacgccuggaaccggaagcggaucagcaacugcguggccgacuacagcgugcuguacaacagcgccagcuucagcaccuucaagugcuacggcgugagccccaccaagcugaacgaccugugcuucaccaacguguacgccgacagcuucgugauccguggcgacgaggugcggcagaucgcacccggccagacaggcaagaucgccgacuacaacuacaagcugcccgacgacuucaccggcugcgugaucgccuggaacagcaacaaccucgacagcaaggugggcggcaacuacaacuaccuguaccggcuguuccggaagagcaaccugaagcccuucgagcgggacaucagcaccgagaucuaccaagccggcaacaccccuugcaacggcguggagggcuucaacugcuacuucccucugcagagcuacggcuuccagcccaccaacggcgugggcuaccagcccuaccgggugguggugcugagcuucgagcugcugcacgccccagccaccguguguggccccaagaagagcaccaaccuggugaagaacaagugcgugaacuucaacuucaacggccuuaccggcaccggcgugcugaccgagagcaacaagaaauuccugcccuuucagcaguucggccgggacaucgccgacaccaccgacgcugugcgggauccccagacccuggagauccuggacaucaccccuugcagcuucggcggcgugagcgugaucaccccaggcaccaacaccagcaaccagguggccgugcuguaccagggcgugaacugcaccgaggugcccguggccauccacgccgaccagcugacacccaccuggcgggucuacagcaccggcagcaacguguuccagacccgggccgguugccugaucggcgccgagcacgugaacaacagcuacgagugcgacauccccaucggcgccggcaucugugccagcuaccagacccagaccaauucaccccggagggcaaggagcguggccagccagagcaucaucgccuacaccaugagccugggcgccgagaacagcguggccuacagcaacaacagcaucgccauccccaccaacuucaccaucagcgugaccaccgagauucugcccgugagcaugaccaagaccagcguggacugcaccauguacaucugcggcgacagcaccgagugcagcaaccugcugcugcaguacggcagcuucugcacccagcugaaccgggcccugaccggcaucgccguggagcaggacaagaacacccaggagguguucgcccaggugaagcagaucuacaagaccccucccaucaaggacuucggcggcuucaacuucagccagauccugcccgaccccagcaagcccagcaagcggagcuucaucgaggaccugcuguucaacaaggugacccuagccgacgccggcuucaucaagcaguacggcgacugccucggcgacauagccgcccgggaccugaucugcgcccagaaguucaacggccugaccgugcugccuccccugcugaccgacgagaugaucgcccaguacaccagcgcccuguuagccggaaccaucaccagcggcuggacuuucggcgcuggagccgcucugcagauccccuucgccaugcagauggccuaccgguucaacggcaucggcgugacccagaacgugcuguacgagaaccagaagcugaucgccaaccaguucaacagcgccaucggcaagauccaggacagccugagcagcaccgcuagcgcccugggcaagcugcaggacguggugaaccagaacgcccaggcccugaacacccuggugaagcagcugagcagcaacuucggcgccaucagcagcgugcugaacgacauccugagccggcuggacaaggucgaggccgaggugcagaucgaccggcugaucacuggccggcugcagagccugcagaccuacgugacccagcagcugauccgggccgccgagauucgggccagcgccaaccuggccgccaccaagaugagcgagugcgugcugggccagagcaagcggguggacuucugcggcaagggcuaccaccugaugagcuuuccccagagcgcaccccacggagugguguuccugcacgugaccuacgugcccgcccaggagaagaacuucaccaccgccccagccaucugccacgacggcaaggcccacuuuccccgggagggcguguucgugagcaacggcacccacugguucgugacccagcggaacuucuacgagccccagaucaucaccaccgacaacaccuucgugagcggcaacugcgacguggugaucggcaucgugaacaacaccguguacgauccccugcagcccgagcuggacagcuucaaggaggagcuggacaaguacuucaagaaucacaccagccccgacguggaccugggcgacaucagcggcaucaacgccagcguggugaacauccagaaggagaucgaucggcugaacgagguggccaagaaccugaacgagagccugaucgaccugcaggagcugggcaaguacgagcaguacaucaaguggcccugguacaucuggcugggcuucaucgccggccugaucgccaucgugauggugaccaucaugcugugcugcaugaccagcugcugcagcugccugaagggcuguugcagcugcggcagcugcugcaaguucgacgaggacgacagcgagcccgugcugaagggcgugaagcugcacuacaccugaggacuaguuauaagacugacuagcccgaugggccucccaacgggcccuccuccccuccuugcaccgagagaucucaaaggcucuuuucagagccaccaaaaaaaaaaaaaaaaaaaaaaaaaaaaaaaaaaaaaaaaaaaaaaaaaaaaaaaaaaaaaaaaaaaaaaaaaaaaaaaaaaaaaaaaaaaaaaaaaaaaa

SEQ ID NO: 24550 - RNA, 4035 nt, Artificial Sequence
  SARS-CoV-2/Wuhan/WIV05/2019__EPI_ISL_402128 spike protein mRNA gc (1-1273)(N501Y_D614G)
aggagaaagcuuaccauguucguguuccuggugcugcugccccuggugagcagccagugcgugaaccugaccacccggacccagcugccaccagccuacaccaacagcuucacccggggcgucuacuaccccgacaagguguuccggagcagcguccugcacagcacccaggaccuguuccugcccuucuucagcaacgugaccugguuccacgccauccacgugagcggcaccaacggcaccaagcgguucgacaaccccgugcugcccuucaacgacggcguguacuucgccagcaccgagaagagcaacaucauccggggcuggaucuucggcaccacccuggacagcaagacccagagccugcugaucgugaauaacgccaccaacguggugaucaaggugugcgaguuccaguucugcaacgaccccuuccugggcguguacuaccacaagaacaacaagagcuggauggagagcgaguuccggguguacagcagcgccaacaacugcaccuucgaguacgugagccagcccuuccugauggaccuggagggcaagcagggcaacuucaagaaccugcgggaguucguguucaagaacaucgacggcuacuucaagaucuacagcaagcacaccccaaucaaccuggugcgggaucugccccagggcuucucagcccuggagccccugguggaccugcccaucggcaucaacaucacccgguuccagacccugcuggcccugcaccggagcuaccugaccccaggcgacagcagcagcggguggacagcaggcgcggcugcuuacuacgugggcuaccugcagccccggaccuuccugcugaaguacaacgagaacggcaccaucaccgacgccguggacugcgcccuggacccucugagcgagaccaagugcacccugaagagcuucaccguggagaagggcaucuaccagaccagcaacuuccgggugcagcccaccgagagcaucgugcgguuccccaacaucaccaaccugugccccuucggcgagguguucaacgccacccgguucgccagcguguacgccuggaaccggaagcggaucagcaacugcguggccgacuacagcgugcuguacaacagcgccagcuucagcaccuucaagugcuacggcgugagccccaccaagcugaacgaccugugcuucaccaacguguacgccgacagcuucgugauccguggcgacgaggugcggcagaucgcacccggccagacaggcaagaucgccgacuacaacuacaagcugcccgacgacuucaccggcugcgugaucgccuggaacagcaacaaccucgacagcaaggugggcggcaacuacaacuaccuguaccggcuguuccggaagagcaaccugaagcccuucgagcgggacaucagcaccgagaucuaccaagccggcuccaccccuugcaacggcguggagggcuucaacugcuacuucccucugcagagcuacggcuuccagcccaccuacggcgugggcuaccagcccuaccgggugguggugcugagcuucgagcugcugcacgccccagccaccguguguggccccaagaagagcaccaaccuggugaagaacaagugcgugaacuucaacuucaacggccuuaccggcaccggcgugcugaccgagagcaacaagaaauuccugcccuuucagcaguucggccgggacaucgccgacaccaccgacgcugugcgggauccccagacccuggagauccuggacaucaccccuugcagcuucggcggcgugagcgugaucaccccaggcaccaacaccagcaaccagguggccgugcuguaccagggcgugaacugcaccgaggugcccguggccauccacgccgaccagcugacacccaccuggcgggucuacagcaccggcagcaacguguuccagacccgggccgguugccugaucggcgccgagcacgugaacaacagcuacgagugcgacauccccaucggcgccggcaucugugccagcuaccagacccagaccaauucaccccggagggcaaggagcguggccagccagagcaucaucgccuacaccaugagccugggcgccgagaacagcguggccuacagcaacaacagcaucgccauccccaccaacuucaccaucagcgugaccaccgagauucugcccgugagcaugaccaagaccagcguggacugcaccauguacaucugcggcgacagcaccgagugcagcaaccugcugcugcaguacggcagcuucugcacccagcugaaccgggcccugaccggcaucgccguggagcaggacaagaacacccaggagguguucgcccaggugaagcagaucuacaagaccccucccaucaaggacuucggcggcuucaacuucagccagauccugcccgaccccagcaagcccagcaagcggagcuucaucgaggaccugcuguucaacaaggugacccuagccgacgccggcuucaucaagcaguacggcgacugccucggcgacauagccgcccgggaccugaucugcgcccagaaguucaacggccugaccgugcugccuccccugcugaccgacgagaugaucgcccaguacaccagcgcccuguuagccggaaccaucaccagcggcuggacuuucggcgcuggagccgcucugcagauccccuucgccaugcagauggccuaccgguucaacggcaucggcgugacccagaacgugcuguacgagaaccagaagcugaucgccaaccaguucaacagcgccaucggcaagauccaggacagccugagcagcaccgcuagcgcccugggcaagcugcaggacguggugaaccagaacgcccaggcccugaacacccuggugaagcagcugagcagcaacuucggcgccaucagcagcgugcugaacgacauccugagccggcuggacaaggucgaggccgaggugcagaucgaccggcugaucacuggccggcugcagagccugcagaccuacgugacccagcagcugauccgggccgccgagauucgggccagcgccaaccuggccgccaccaagaugagcgagugcgugcugggccagagcaagcggguggacuucugcggcaagggcuaccaccugaugagcuuuccccagagcgcaccccacggagugguguuccugcacgugaccuacgugcccgcccaggagaagaacuucaccaccgccccagccaucugccacgacggcaaggcccacuuuccccgggagggcguguucgugagcaacggcacccacugguucgugacccagcggaacuucuacgagccccagaucaucaccaccgacaacaccuucgugagcggcaacugcgacguggugaucggcaucgugaacaacaccguguacgauccccugcagcccgagcuggacagcuucaaggaggagcuggacaaguacuucaagaaucacaccagccccgacguggaccugggcgacaucagcggcaucaacgccagcguggugaacauccagaaggagaucgaucggcugaacgagguggccaagaaccugaacgagagccugaucgaccugcaggagcugggcaaguacgagcaguacaucaaguggcccugguacaucuggcugggcuucaucgccggccugaucgccaucgugauggugaccaucaugcugugcugcaugaccagcugcugcagcugccugaagggcuguugcagcugcggcagcugcugcaaguucgacgaggacgacagcgagcccgugcugaagggcgugaagcugcacuacaccugaggacuaguuauaagacugacuagcccgaugggccucccaacgggcccuccuccccuccuugcaccgagagaucucaaaggcucuuuucagagccaccaaaaaaaaaaaaaaaaaaaaaaaaaaaaaaaaaaaaaaaaaaaaaaaaaaaaaaaaaaaaaaaaaaaaaaaaaaaaaaaaaaaaaaaaaaaaaaaaaaaaa

SEQ ID NO: 24551 - RNA, 4029 nt, Artificial Sequence
  SARS-CoV-2/Wuhan/WIV05/2019__EPI_ISL_402128 spike protein mRNA gc (1-1273)(H69del_V70del_D614G)
aggagaaagcuuaccauguucguguuccuggugcugcugccccuggugagcagccagugcgugaaccugaccacccggacccagcugccaccagccuacaccaacagcuucacccggggcgucuacuaccccgacaagguguuccggagcagcguccugcacagcacccaggaccuguuccugcccuucuucagcaacgugaccugguuccacgccaucagcggcaccaacggcaccaagcgguucgacaaccccgugcugcccuucaacgacggcguguacuucgccagcaccgagaagagcaacaucauccggggcuggaucuucggcaccacccuggacagcaagacccagagccugcugaucgugaauaacgccaccaacguggugaucaaggugugcgaguuccaguucugcaacgaccccuuccugggcguguacuaccacaagaacaacaagagcuggauggagagcgaguuccggguguacagcagcgccaacaacugcaccuucgaguacgugagccagcccuuccugauggaccuggagggcaagcagggcaacuucaagaaccugcgggaguucguguucaagaacaucgacggcuacuucaagaucuacagcaagcacaccccaaucaaccuggugcgggaucugccccagggcuucucagcccuggagccccugguggaccugcccaucggcaucaacaucacccgguuccagacccugcuggcccugcaccggagcuaccugaccccaggcgacagcagcagcggguggacagcaggcgcggcugcuuacuacgugggcuaccugcagccccggaccuuccugcugaaguacaacgagaacggcaccaucaccgacgccguggacugcgcccuggacccucugagcgagaccaagugcacccugaagagcuucaccguggagaagggcaucuaccagaccagcaacuuccgggugcagcccaccgagagcaucgugcgguuccccaacaucaccaaccugugccccuucggcgagguguucaacgccacccgguucgccagcguguacgccuggaaccggaagcggaucagcaacugcguggccgacuacagcgugcuguacaacagcgccagcuucagcaccuucaagugcuacggcgugagccccaccaagcugaacgaccugugcuucaccaacguguacgccgacagcuucgugauccguggcgacgaggugcggcagaucgcacccggccagacaggcaagaucgccgacuacaacuacaagcugcccgacgacuucaccggcugcgugaucgccuggaacagcaacaaccucgacagcaaggugggcggcaacuacaacuaccuguaccggcuguuccggaagagcaaccugaagcccuucgagcgggacaucagcaccgagaucuaccaagccggcuccaccccuugcaacggcguggagggcuucaacugcuacuucccucugcagagcuacggcuuccagcccaccaacggcgugggcuaccagcccuaccgggugguggugcugagcuucgagcugcugcacgccccagccaccguguguggccccaagaagagcaccaaccuggugaagaacaagugcgugaacuucaacuucaacggccuuaccggcaccggcgugcugaccgagagcaacaagaaauuccugcccuuucagcaguucggccgggacaucgccgacaccaccgacgcugugcgggauccccagacccuggagauccuggacaucaccccuugcagcuucggcggcgugagcgugaucaccccaggcaccaacaccagcaaccagguggccgugcuguaccagggcgugaacugcaccgaggugcccguggccauccacgccgaccagcugacacccaccuggcgggucuacagcaccggcagcaacguguuccagacccgggccgguugccugaucggcgccgagcacgugaacaacagcuacgagugcgacauccccaucggcgccggcaucugugccagcuaccagacccagaccaauucaccccggagggcaaggagcguggccagccagagcaucaucgccuacaccaugagccugggcgccgagaacagcguggccuacagcaacaacagcaucgccauccccaccaacuucaccaucagcgugaccaccgagauucugcccgugagcaugaccaagaccagcguggacugcaccauguacaucugcggcgacagcaccgagugcagcaaccugcugcugcaguacggcagcuucugcacccagcugaaccgggcccugaccggcaucgccguggagcaggacaagaacacccaggagguguucgcccaggugaagcagaucuacaagaccccucccaucaaggacuucggcggcuucaacuucagccagauccugcccgaccccagcaagcccagcaagcggagcuucaucgaggaccugcuguucaacaaggugacccuagccgacgccggcuucaucaagcaguacggcgacugccucggcgacauagccgcccgggaccugaucugcgcccagaaguucaacggccugaccgugcugccuccccugcugaccgacgagaugaucgcccaguacaccagcgcccuguuagccggaaccaucaccagcggcuggacuuucggcgcuggagccgcucugcagauccccuucgccaugcagauggccuaccgguucaacggcaucggcgugacccagaacgugcuguacgagaaccagaagcugaucgccaaccaguucaacagcgccaucggcaagauccaggacagccugagcagcaccgcuagcgcccugggcaagcugcaggacguggugaaccagaacgcccaggcccugaacacccuggugaagcagcugagcagcaacuucggcgccaucagcagcgugcugaacgacauccugagccggcuggacaaggucgaggccgaggugcagaucgaccggcugaucacuggccggcugcagagccugcagaccuacgugacccagcagcugauccgggccgccgagauucgggccagcgccaaccuggccgccaccaagaugagcgagugcgugcugggccagagcaagcggguggacuucugcggcaagggcuaccaccugaugagcuuuccccagagcgcaccccacggagugguguuccugcacgugaccuacgugcccgcccaggagaagaacuucaccaccgccccagccaucugccacgacggcaaggcccacuuuccccgggagggcguguucgugagcaacggcacccacugguucgugacccagcggaacuucuacgagccccagaucaucaccaccgacaacaccuucgugagcggcaacugcgacguggugaucggcaucgugaacaacaccguguacgauccccugcagcccgagcuggacagcuucaaggaggagcuggacaaguacuucaagaaucacaccagccccgacguggaccugggcgacaucagcggcaucaacgccagcguggugaacauccagaaggagaucgaucggcugaacgagguggccaagaaccugaacgagagccugaucgaccugcaggagcugggcaaguacgagcaguacaucaaguggcccugguacaucuggcugggcuucaucgccggccugaucgccaucgugauggugaccaucaugcugugcugcaugaccagcugcugcagcugccugaagggcuguugcagcugcggcagcugcugcaaguucgacgaggacgacagcgagcccgugcugaagggcgugaagcugcacuacaccugaggacuaguuauaagacugacuagcccgaugggccucccaacgggcccuccuccccuccuugcaccgagagaucucaaaggcucuuuucagagccaccaaaaaaaaaaaaaaaaaaaaaaaaaaaaaaaaaaaaaaaaaaaaaaaaaaaaaaaaaaaaaaaaaaaaaaaaaaaaaaaaaaaaaaaaaaaaaaaaaaaaa

SEQ ID NO: 24552 - RNA, 4035 nt, Artificial Sequence
  SARS-CoV-2/Wuhan/WIV05/2019__EPI_ISL_402128 spike protein mRNA gc (1-1273)(Y453F_D614G)
aggagaaagcuuaccauguucguguuccuggugcugcugccccuggugagcagccagugcgugaaccugaccacccggacccagcugccaccagccuacaccaacagcuucacccggggcgucuacuaccccgacaagguguuccggagcagcguccugcacagcacccaggaccuguuccugcccuucuucagcaacgugaccugguuccacgccauccacgugagcggcaccaacggcaccaagcgguucgacaaccccgugcugcccuucaacgacggcguguacuucgccagcaccgagaagagcaacaucauccggggcuggaucuucggcaccacccuggacagcaagacccagagccugcugaucgugaauaacgccaccaacguggugaucaaggugugcgaguuccaguucugcaacgaccccuuccugggcguguacuaccacaagaacaacaagagcuggauggagagcgaguuccggguguacagcagcgccaacaacugcaccuucgaguacgugagccagcccuuccugauggaccuggagggcaagcagggcaacuucaagaaccugcgggaguucguguucaagaacaucgacggcuacuucaagaucuacagcaagcacaccccaaucaaccuggugcgggaucugccccagggcuucucagcccuggagccccugguggaccugcccaucggcaucaacaucacccgguuccagacccugcuggcccugcaccggagcuaccugaccccaggcgacagcagcagcggguggacagcaggcgcggcugcuuacuacgugggcuaccugcagccccggaccuuccugcugaaguacaacgagaacggcaccaucaccgacgccguggacugcgcccuggacccucugagcgagaccaagugcacccugaagagcuucaccguggagaagggcaucuaccagaccagcaacuuccgggugcagcccaccgagagcaucgugcgguuccccaacaucaccaaccugugccccuucggcgagguguucaacgccacccgguucgccagcguguacgccuggaaccggaagcggaucagcaacugcguggccgacuacagcgugcuguacaacagcgccagcuucagcaccuucaagugcuacggcgugagccccaccaagcugaacgaccugugcuucaccaacguguacgccgacagcuucgugauccguggcgacgaggugcggcagaucgcacccggccagacaggcaagaucgccgacuacaacuacaagcugcccgacgacuucaccggcugcgugaucgccuggaacagcaacaaccucgacagcaaggugggcggcaacuacaacuaccuguuccggcuguuccggaagagcaaccugaagcccuucgagcgggacaucagcaccgagaucuaccaagccggcuccaccccuugcaacggcguggagggcuucaacugcuacuucccucugcagagcuacggcuuccagcccaccaacggcgugggcuaccagcccuaccgggugguggugcugagcuucgagcugcugcacgccccagccaccguguguggccccaagaagagcaccaaccuggugaagaacaagugcgugaacuucaacuucaacggccuuaccggcaccggcgugcugaccgagagcaacaagaaauuccugcccuuucagcaguucggccgggacaucgccgacaccaccgacgcugugcgggauccccagacccuggagauccuggacaucaccccuugcagcuucggcggcgugagcgugaucaccccaggcaccaacaccagcaaccagguggccgugcuguaccagggcgugaacugcaccgaggugcccguggccauccacgccgaccagcugacacccaccuggcgggucuacagcaccggcagcaacguguuccagacccgggccgguugccugaucggcgccgagcacgugaacaacagcuacgagugcgacauccccaucggcgccggcaucugugccagcuaccagacccagaccaauucaccccggagggcaaggagcguggccagccagagcaucaucgccuacaccaugagccugggcgccgagaacagcguggccuacagcaacaacagcaucgccauccccaccaacuucaccaucagcgugaccaccgagauucugcccgugagcaugaccaagaccagcguggacugcaccauguacaucugcggcgacagcaccgagugcagcaaccugcugcugcaguacggcagcuucugcacccagcugaaccgggcccugaccggcaucgccguggagcaggacaagaacacccaggagguguucgcccaggugaagcagaucuacaagaccccucccaucaaggacuucggcggcuucaacuucagccagauccugcccgaccccagcaagcccagcaagcggagcuucaucgaggaccugcuguucaacaaggugacccuagccgacgccggcuucaucaagcaguacggcgacugccucggcgacauagccgcccgggaccugaucugcgcccagaaguucaacggccugaccgugcugccuccccugcugaccgacgagaugaucgcccaguacaccagcgcccuguuagccggaaccaucaccagcggcuggacuuucggcgcuggagccgcucugcagauccccuucgccaugcagauggccuaccgguucaacggcaucggcgugacccagaacgugcuguacgagaaccagaagcugaucgccaaccaguucaacagcgccaucggcaagauccaggacagccugagcagcaccgcuagcgcccugggcaagcugcaggacguggugaaccagaacgcccaggcccugaacacccuggugaagcagcugagcagcaacuucggcgccaucagcagcgugcugaacgacauccugagccggcuggacaaggucgaggccgaggugcagaucgaccggcugaucacuggccggcugcagagccugcagaccuacgugacccagcagcugauccgggccgccgagauucgggccagcgccaaccuggccgccaccaagaugagcgagugcgugcugggccagagcaagcggguggacuucugcggcaagggcuaccaccugaugagcuuuccccagagcgcaccccacggagugguguuccugcacgugaccuacgugcccgcccaggagaagaacuucaccaccgccccagccaucugccacgacggcaaggcccacuuuccccgggagggcguguucgugagcaacggcacccacugguucgugacccagcggaacuucuacgagccccagaucaucaccaccgacaacaccuucgugagcggcaacugcgacguggugaucggcaucgugaacaacaccguguacgauccccugcagcccgagcuggacagcuucaaggaggagcuggacaaguacuucaagaaucacaccagccccgacguggaccugggcgacaucagcggcaucaacgccagcguggugaacauccagaaggagaucgaucggcugaacgagguggccaagaaccugaacgagagccugaucgaccugcaggagcugggcaaguacgagcaguacaucaaguggcccugguacaucuggcugggcuucaucgccggccugaucgccaucgugauggugaccaucaugcugugcugcaugaccagcugcugcagcugccugaagggcuguugcagcugcggcagcugcugcaaguucgacgaggacgacagcgagcccgugcugaagggcgugaagcugcacuacaccugaggacuaguuauaagacugacuagcccgaugggccucccaacgggcccuccuccccuccuugcaccgagagaucucaaaggcucuuuucagagccaccaaaaaaaaaaaaaaaaaaaaaaaaaaaaaaaaaaaaaaaaaaaaaaaaaaaaaaaaaaaaaaaaaaaaaaaaaaaaaaaaaaaaaaaaaaaaaaaaaaaaa

SEQ ID NO: 24553 - RNA, 4035 nt, Artificial Sequence
  SARS-CoV-2/Wuhan/WIV05/2019__EPI_ISL_402128 spike protein mRNA gc (1-1273)(D614G_I692V)
aggagaaagcuuaccauguucguguuccuggugcugcugccccuggugagcagccagugcgugaaccugaccacccggacccagcugccaccagccuacaccaacagcuucacccggggcgucuacuaccccgacaagguguuccggagcagcguccugcacagcacccaggaccuguuccugcccuucuucagcaacgugaccugguuccacgccauccacgugagcggcaccaacggcaccaagcgguucgacaaccccgugcugcccuucaacgacggcguguacuucgccagcaccgagaagagcaacaucauccggggcuggaucuucggcaccacccuggacagcaagacccagagccugcugaucgugaauaacgccaccaacguggugaucaaggugugcgaguuccaguucugcaacgaccccuuccugggcguguacuaccacaagaacaacaagagcuggauggagagcgaguuccggguguacagcagcgccaacaacugcaccuucgaguacgugagccagcccuuccugauggaccuggagggcaagcagggcaacuucaagaaccugcgggaguucguguucaagaacaucgacggcuacuucaagaucuacagcaagcacaccccaaucaaccuggugcgggaucugccccagggcuucucagcccuggagccccugguggaccugcccaucggcaucaacaucacccgguuccagacccugcuggcccugcaccggagcuaccugaccccaggcgacagcagcagcggguggacagcaggcgcggcugcuuacuacgugggcuaccugcagccccggaccuuccugcugaaguacaacgagaacggcaccaucaccgacgccguggacugcgcccuggacccucugagcgagaccaagugcacccugaagagcuucaccguggagaagggcaucuaccagaccagcaacuuccgggugcagcccaccgagagcaucgugcgguuccccaacaucaccaaccugugccccuucggcgagguguucaacgccacccgguucgccagcguguacgccuggaaccggaagcggaucagcaacugcguggccgacuacagcgugcuguacaacagcgccagcuucagcaccuucaagugcuacggcgugagccccaccaagcugaacgaccugugcuucaccaacguguacgccgacagcuucgugauccguggcgacgaggugcggcagaucgcacccggccagacaggcaagaucgccgacuacaacuacaagcugcccgacgacuucaccggcugcgugaucgccuggaacagcaacaaccucgacagcaaggugggcggcaacuacaacuaccuguaccggcuguuccggaagagcaaccugaagcccuucgagcgggacaucagcaccgagaucuaccaagccggcuccaccccuugcaacggcguggagggcuucaacugcuacuucccucugcagagcuacggcuuccagcccaccaacggcgugggcuaccagcccuaccgggugguggugcugagcuucgagcugcugcacgccccagccaccguguguggccccaagaagagcaccaaccuggugaagaacaagugcgugaacuucaacuucaacggccuuaccggcaccggcgugcugaccgagagcaacaagaaauuccugcccuuucagcaguucggccgggacaucgccgacaccaccgacgcugugcgggauccccagacccuggagauccuggacaucaccccuugcagcuucggcggcgugagcgugaucaccccaggcaccaacaccagcaaccagguggccgugcuguaccagggcgugaacugcaccgaggugcccguggccauccacgccgaccagcugacacccaccuggcgggucuacagcaccggcagcaacguguuccagacccgggccgguugccugaucggcgccgagcacgugaacaacagcuacgagugcgacauccccaucggcgccggcaucugugccagcuaccagacccagaccaauucaccccggagggcaaggagcguggccagccagagcgugaucgccuacaccaugagccugggcgccgagaacagcguggccuacagcaacaacagcaucgccauccccaccaacuucaccaucagcgugaccaccgagauucugcccgugagcaugaccaagaccagcguggacugcaccauguacaucugcggcgacagcaccgagugcagcaaccugcugcugcaguacggcagcuucugcacccagcugaaccgggcccugaccggcaucgccguggagcaggacaagaacacccaggagguguucgcccaggugaagcagaucuacaagaccccucccaucaaggacuucggcggcuucaacuucagccagauccugcccgaccccagcaagcccagcaagcggagcuucaucgaggaccugcuguucaacaaggugacccuagccgacgccggcuucaucaagcaguacggcgacugccucggcgacauagccgcccgggaccugaucugcgcccagaaguucaacggccugaccgugcugccuccccugcugaccgacgagaugaucgcccaguacaccagcgcccuguuagccggaaccaucaccagcggcuggacuuucggcgcuggagccgcucugcagauccccuucgccaugcagauggccuaccgguucaacggcaucggcgugacccagaacgugcuguacgagaaccagaagcugaucgccaaccaguucaacagcgccaucggcaagauccaggacagccugagcagcaccgcuagcgcccugggcaagcugcaggacguggugaaccagaacgcccaggcccugaacacccuggugaagcagcugagcagcaacuucggcgccaucagcagcgugcugaacgacauccugagccggcuggacaaggucgaggccgaggugcagaucgaccggcugaucacuggccggcugcagagccugcagaccuacgugacccagcagcugauccgggccgccgagauucgggccagcgccaaccuggccgccaccaagaugagcgagugcgugcugggccagagcaagcggguggacuucugcggcaagggcuaccaccugaugagcuuuccccagagcgcaccccacggagugguguuccugcacgugaccuacgugcccgcccaggagaagaacuucaccaccgccccagccaucugccacgacggcaaggcccacuuuccccgggagggcguguucgugagcaacggcacccacugguucgugacccagcggaacuucuacgagccccagaucaucaccaccgacaacaccuucgugagcggcaacugcgacguggugaucggcaucgugaacaacaccguguacgauccccugcagcccgagcuggacagcuucaaggaggagcuggacaaguacuucaagaaucacaccagccccgacguggaccugggcgacaucagcggcaucaacgccagcguggugaacauccagaaggagaucgaucggcugaacgagguggccaagaaccugaacgagagccugaucgaccugcaggagcugggcaaguacgagcaguacaucaaguggcccugguacaucuggcugggcuucaucgccggccugaucgccaucgugauggugaccaucaugcugugcugcaugaccagcugcugcagcugccugaagggcuguugcagcugcggcagcugcugcaaguucgacgaggacgacagcgagcccgugcugaagggcgugaagcugcacuacaccugaggacuaguuauaagacugacuagcccgaugggccucccaacgggcccuccuccccuccuugcaccgagagaucucaaaggcucuuuucagagccaccaaaaaaaaaaaaaaaaaaaaaaaaaaaaaaaaaaaaaaaaaaaaaaaaaaaaaaaaaaaaaaaaaaaaaaaaaaaaaaaaaaaaaaaaaaaaaaaaaaaaa

SEQ ID NO: 24554 - RNA, 4035 nt, Artificial Sequence
  SARS-CoV-2/Wuhan/WIV05/2019__EPI_ISL_402128 spike protein mRNA gc (1-1273)(D614G_M1229I)
aggagaaagcuuaccauguucguguuccuggugcugcugccccuggugagcagccagugcgugaaccugaccacccggacccagcugccaccagccuacaccaacagcuucacccggggcgucuacuaccccgacaagguguuccggagcagcguccugcacagcacccaggaccuguuccugcccuucuucagcaacgugaccugguuccacgccauccacgugagcggcaccaacggcaccaagcgguucgacaaccccgugcugcccuucaacgacggcguguacuucgccagcaccgagaagagcaacaucauccggggcuggaucuucggcaccacccuggacagcaagacccagagccugcugaucgugaauaacgccaccaacguggugaucaaggugugcgaguuccaguucugcaacgaccccuuccugggcguguacuaccacaagaacaacaagagcuggauggagagcgaguuccggguguacagcagcgccaacaacugcaccuucgaguacgugagccagcccuuccugauggaccuggagggcaagcagggcaacuucaagaaccugcgggaguucguguucaagaacaucgacggcuacuucaagaucuacagcaagcacaccccaaucaaccuggugcgggaucugccccagggcuucucagcccuggagccccugguggaccugcccaucggcaucaacaucacccgguuccagacccugcuggcccugcaccggagcuaccugaccccaggcgacagcagcagcggguggacagcaggcgcggcugcuuacuacgugggcuaccugcagccccggaccuuccugcugaaguacaacgagaacggcaccaucaccgacgccguggacugcgcccuggacccucugagcgagaccaagugcacccugaagagcuucaccguggagaagggcaucuaccagaccagcaacuuccgggugcagcccaccgagagcaucgugcgguuccccaacaucaccaaccugugccccuucggcgagguguucaacgccacccgguucgccagcguguacgccuggaaccggaagcggaucagcaacugcguggccgacuacagcgugcuguacaacagcgccagcuucagcaccuucaagugcuacggcgugagccccaccaagcugaacgaccugugcuucaccaacguguacgccgacagcuucgugauccguggcgacgaggugcggcagaucgcacccggccagacaggcaagaucgccgacuacaacuacaagcugcccgacgacuucaccggcugcgugaucgccuggaacagcaacaaccucgacagcaaggugggcggcaacuacaacuaccuguaccggcuguuccggaagagcaaccugaagcccuucgagcgggacaucagcaccgagaucuaccaagccggcuccaccccuugcaacggcguggagggcuucaacugcuacuucccucugcagagcuacggcuuccagcccaccaacggcgugggcuaccagcccuaccgggugguggugcugagcuucgagcugcugcacgccccagccaccguguguggccccaagaagagcaccaaccuggugaagaacaagugcgugaacuucaacuucaacggccuuaccggcaccggcgugcugaccgagagcaacaagaaauuccugcccuuucagcaguucggccgggacaucgccgacaccaccgacgcugugcgggauccccagacccuggagauccuggacaucaccccuugcagcuucggcggcgugagcgugaucaccccaggcaccaacaccagcaaccagguggccgugcuguaccagggcgugaacugcaccgaggugcccguggccauccacgccgaccagcugacacccaccuggcgggucuacagcaccggcagcaacguguuccagacccgggccgguugccugaucggcgccgagcacgugaacaacagcuacgagugcgacauccccaucggcgccggcaucugugccagcuaccagacccagaccaauucaccccggagggcaaggagcguggccagccagagcaucaucgccuacaccaugagccugggcgccgagaacagcguggccuacagcaacaacagcaucgccauccccaccaacuucaccaucagcgugaccaccgagauucugcccgugagcaugaccaagaccagcguggacugcaccauguacaucugcggcgacagcaccgagugcagcaaccugcugcugcaguacggcagcuucugcacccagcugaaccgggcccugaccggcaucgccguggagcaggacaagaacacccaggagguguucgcccaggugaagcagaucuacaagaccccucccaucaaggacuucggcggcuucaacuucagccagauccugcccgaccccagcaagcccagcaagcggagcuucaucgaggaccugcuguucaacaaggugacccuagccgacgccggcuucaucaagcaguacggcgacugccucggcgacauagccgcccgggaccugaucugcgcccagaaguucaacggccugaccgugcugccuccccugcugaccgacgagaugaucgcccaguacaccagcgcccuguuagccggaaccaucaccagcggcuggacuuucggcgcuggagccgcucugcagauccccuucgccaugcagauggccuaccgguucaacggcaucggcgugacccagaacgugcuguacgagaaccagaagcugaucgccaaccaguucaacagcgccaucggcaagauccaggacagccugagcagcaccgcuagcgcccugggcaagcugcaggacguggugaaccagaacgcccaggcccugaacacccuggugaagcagcugagcagcaacuucggcgccaucagcagcgugcugaacgacauccugagccggcuggacaaggucgaggccgaggugcagaucgaccggcugaucacuggccggcugcagagccugcagaccuacgugacccagcagcugauccgggccgccgagauucgggccagcgccaaccuggccgccaccaagaugagcgagugcgugcugggccagagcaagcggguggacuucugcggcaagggcuaccaccugaugagcuuuccccagagcgcaccccacggagugguguuccugcacgugaccuacgugcccgcccaggagaagaacuucaccaccgccccagccaucugccacgacggcaaggcccacuuuccccgggagggcguguucgugagcaacggcacccacugguucgugacccagcggaacuucuacgagccccagaucaucaccaccgacaacaccuucgugagcggcaacugcgacguggugaucggcaucgugaacaacaccguguacgauccccugcagcccgagcuggacagcuucaaggaggagcuggacaaguacuucaagaaucacaccagccccgacguggaccugggcgacaucagcggcaucaacgccagcguggugaacauccagaaggagaucgaucggcugaacgagguggccaagaaccugaacgagagccugaucgaccugcaggagcugggcaaguacgagcaguacaucaaguggcccugguacaucuggcugggcuucaucgccggccugaucgccaucgugaucgugaccaucaugcugugcugcaugaccagcugcugcagcugccugaagggcuguugcagcugcggcagcugcugcaaguucgacgaggacgacagcgagcccgugcugaagggcgugaagcugcacuacaccugaggacuaguuauaagacugacuagcccgaugggccucccaacgggcccuccuccccuccuugcaccgagagaucucaaaggcucuuuucagagccaccaaaaaaaaaaaaaaaaaaaaaaaaaaaaaaaaaaaaaaaaaaaaaaaaaaaaaaaaaaaaaaaaaaaaaaaaaaaaaaaaaaaaaaaaaaaaaaaaaaaaa

SEQ ID NO: 24555 - RNA, 4029 nt, Artificial Sequence
  SARS-CoV-2/Wuhan/WIV05/2019__EPI_ISL_402128 spike protein mRNA gc (1-1273)(H69del_V70del_A222V_Y453F_S477N_D614G_I692V)
aggagaaagcuuaccauguucguguuccuggugcugcugccccuggugagcagccagugcgugaaccugaccacccggacccagcugccaccagccuacaccaacagcuucacccggggcgucuacuaccccgacaagguguuccggagcagcguccugcacagcacccaggaccuguuccugcccuucuucagcaacgugaccugguuccacgccaucagcggcaccaacggcaccaagcgguucgacaaccccgugcugcccuucaacgacggcguguacuucgccagcaccgagaagagcaacaucauccggggcuggaucuucggcaccacccuggacagcaagacccagagccugcugaucgugaauaacgccaccaacguggugaucaaggugugcgaguuccaguucugcaacgaccccuuccugggcguguacuaccacaagaacaacaagagcuggauggagagcgaguuccggguguacagcagcgccaacaacugcaccuucgaguacgugagccagcccuuccugauggaccuggagggcaagcagggcaacuucaagaaccugcgggaguucguguucaagaacaucgacggcuacuucaagaucuacagcaagcacaccccaaucaaccuggugcgggaucugccccagggcuucucagugcuggagccccugguggaccugcccaucggcaucaacaucacccgguuccagacccugcuggcccugcaccggagcuaccugaccccaggcgacagcagcagcggguggacagcaggcgcggcugcuuacuacgugggcuaccugcagccccggaccuuccugcugaaguacaacgagaacggcaccaucaccgacgccguggacugcgcccuggacccucugagcgagaccaagugcacccugaagagcuucaccguggagaagggcaucuaccagaccagcaacuuccgggugcagcccaccgagagcaucgugcgguuccccaacaucaccaaccugugccccuucggcgagguguucaacgccacccgguucgccagcguguacgccuggaaccggaagcggaucagcaacugcguggccgacuacagcgugcuguacaacagcgccagcuucagcaccuucaagugcuacggcgugagccccaccaagcugaacgaccugugcuucaccaacguguacgccgacagcuucgugauccguggcgacgaggugcggcagaucgcacccggccagacaggcaagaucgccgacuacaacuacaagcugcccgacgacuucaccggcugcgugaucgccuggaacagcaacaaccucgacagcaaggugggcggcaacuacaacuaccuguuccggcuguuccggaagagcaaccugaagcccuucgagcgggacaucagcaccgagaucuaccaagccggcaacaccccuugcaacggcguggagggcuucaacugcuacuucccucugcagagcuacggcuuccagcccaccaacggcgugggcuaccagcccuaccgggugguggugcugagcuucgagcugcugcacgccccagccaccguguguggccccaagaagagcaccaaccuggugaagaacaagugcgugaacuucaacuucaacggccuuaccggcaccggcgugcugaccgagagcaacaagaaauuccugcccuuucagcaguucggccgggacaucgccgacaccaccgacgcugugcgggauccccagacccuggagauccuggacaucaccccuugcagcuucggcggcgugagcgugaucaccccaggcaccaacaccagcaaccagguggccgugcuguaccagggcgugaacugcaccgaggugcccguggccauccacgccgaccagcugacacccaccuggcgggucuacagcaccggcagcaacguguuccagacccgggccgguugccugaucggcgccgagcacgugaacaacagcuacgagugcgacauccccaucggcgccggcaucugugccagcuaccagacccagaccaauucaccccggagggcaaggagcguggccagccagagcgugaucgccuacaccaugagccugggcgccgagaacagcguggccuacagcaacaacagcaucgccauccccaccaacuucaccaucagcgugaccaccgagauucugcccgugagcaugaccaagaccagcguggacugcaccauguacaucugcggcgacagcaccgagugcagcaaccugcugcugcaguacggcagcuucugcacccagcugaaccgggcccugaccggcaucgccguggagcaggacaagaacacccaggagguguucgcccaggugaagcagaucuacaagaccccucccaucaaggacuucggcggcuucaacuucagccagauccugcccgaccccagcaagcccagcaagcggagcuucaucgaggaccugcuguucaacaaggugacccuagccgacgccggcuucaucaagcaguacggcgacugccucggcgacauagccgcccgggaccugaucugcgcccagaaguucaacggccugaccgugcugccuccccugcugaccgacgagaugaucgcccaguacaccagcgcccuguuagccggaaccaucaccagcggcuggacuuucggcgcuggagccgcucugcagauccccuucgccaugcagauggccuaccgguucaacggcaucggcgugacccagaacgugcuguacgagaaccagaagcugaucgccaaccaguucaacagcgccaucggcaagauccaggacagccugagcagcaccgcuagcgcccugggcaagcugcaggacguggugaaccagaacgcccaggcccugaacacccuggugaagcagcugagcagcaacuucggcgccaucagcagcgugcugaacgacauccugagccggcuggacaaggucgaggccgaggugcagaucgaccggcugaucacuggccggcugcagagccugcagaccuacgugacccagcagcugauccgggccgccgagauucgggccagcgccaaccuggccgccaccaagaugagcgagugcgugcugggccagagcaagcggguggacuucugcggcaagggcuaccaccugaugagcuuuccccagagcgcaccccacggagugguguuccugcacgugaccuacgugcccgcccaggagaagaacuucaccaccgccccagccaucugccacgacggcaaggcccacuuuccccgggagggcguguucgugagcaacggcacccacugguucgugacccagcggaacuucuacgagccccagaucaucaccaccgacaacaccuucgugagcggcaacugcgacguggugaucggcaucgugaacaacaccguguacgauccccugcagcccgagcuggacagcuucaaggaggagcuggacaaguacuucaagaaucacaccagccccgacguggaccugggcgacaucagcggcaucaacgccagcguggugaacauccagaaggagaucgaucggcugaacgagguggccaagaaccugaacgagagccugaucgaccugcaggagcugggcaaguacgagcaguacaucaaguggcccugguacaucuggcugggcuucaucgccggccugaucgccaucgugauggugaccaucaugcugugcugcaugaccagcugcugcagcugccugaagggcuguugcagcugcggcagcugcugcaaguucgacgaggacgacagcgagcccgugcugaagggcgugaagcugcacuacaccugaggacuaguuauaagacugacuagcccgaugggccucccaacgggcccuccuccccuccuugcaccgagagaucucaaaggcucuuuucagagccaccaaaaaaaaaaaaaaaaaaaaaaaaaaaaaaaaaaaaaaaaaaaaaaaaaaaaaaaaaaaaaaaaaaaaaaaaaaaaaaaaaaaaaaaaaaaaaaaaaaaaa

SEQ ID NO: 24556 - RNA, 4029 nt, Artificial Sequence
  SARS-CoV-2/Wuhan/WIV05/2019__EPI_ISL_402128 spike protein mRNA gc (1-1273)(H69del_V70del_Y453F_D614G_I692V_M1229I)
aggagaaagcuuaccauguucguguuccuggugcugcugccccuggugagcagccagugcgugaaccugaccacccggacccagcugccaccagccuacaccaacagcuucacccggggcgucuacuaccccgacaagguguuccggagcagcguccugcacagcacccaggaccuguuccugcccuucuucagcaacgugaccugguuccacgccaucagcggcaccaacggcaccaagcgguucgacaaccccgugcugcccuucaacgacggcguguacuucgccagcaccgagaagagcaacaucauccggggcuggaucuucggcaccacccuggacagcaagacccagagccugcugaucgugaauaacgccaccaacguggugaucaaggugugcgaguuccaguucugcaacgaccccuuccugggcguguacuaccacaagaacaacaagagcuggauggagagcgaguuccggguguacagcagcgccaacaacugcaccuucgaguacgugagccagcccuuccugauggaccuggagggcaagcagggcaacuucaagaaccugcgggaguucguguucaagaacaucgacggcuacuucaagaucuacagcaagcacaccccaaucaaccuggugcgggaucugccccagggcuucucagcccuggagccccugguggaccugcccaucggcaucaacaucacccgguuccagacccugcuggcccugcaccggagcuaccugaccccaggcgacagcagcagcggguggacagcaggcgcggcugcuuacuacgugggcuaccugcagccccggaccuuccugcugaaguacaacgagaacggcaccaucaccgacgccguggacugcgcccuggacccucugagcgagaccaagugcacccugaagagcuucaccguggagaagggcaucuaccagaccagcaacuuccgggugcagcccaccgagagcaucgugcgguuccccaacaucaccaaccugugccccuucggcgagguguucaacgccacccgguucgccagcguguacgccuggaaccggaagcggaucagcaacugcguggccgacuacagcgugcuguacaacagcgccagcuucagcaccuucaagugcuacggcgugagccccaccaagcugaacgaccugugcuucaccaacguguacgccgacagcuucgugauccguggcgacgaggugcggcagaucgcacccggccagacaggcaagaucgccgacuacaacuacaagcugcccgacgacuucaccggcugcgugaucgccuggaacagcaacaaccucgacagcaaggugggcggcaacuacaacuaccuguuccggcuguuccggaagagcaaccugaagcccuucgagcgggacaucagcaccgagaucuaccaagccggcuccaccccuugcaacggcguggagggcuucaacugcuacuucccucugcagagcuacggcuuccagcccaccaacggcgugggcuaccagcccuaccgggugguggugcugagcuucgagcugcugcacgccccagccaccguguguggccccaagaagagcaccaaccuggugaagaacaagugcgugaacuucaacuucaacggccuuaccggcaccggcgugcugaccgagagcaacaagaaauuccugcccuuucagcaguucggccgggacaucgccgacaccaccgacgcugugcgggauccccagacccuggagauccuggacaucaccccuugcagcuucggcggcgugagcgugaucaccccaggcaccaacaccagcaaccagguggccgugcuguaccagggcgugaacugcaccgaggugcccguggccauccacgccgaccagcugacacccaccuggcgggucuacagcaccggcagcaacguguuccagacccgggccgguugccugaucggcgccgagcacgugaacaacagcuacgagugcgacauccccaucggcgccggcaucugugccagcuaccagacccagaccaauucaccccggagggcaaggagcguggccagccagagcgugaucgccuacaccaugagccugggcgccgagaacagcguggccuacagcaacaacagcaucgccauccccaccaacuucaccaucagcgugaccaccgagauucugcccgugagcaugaccaagaccagcguggacugcaccauguacaucugcggcgacagcaccgagugcagcaaccugcugcugcaguacggcagcuucugcacccagcugaaccgggcccugaccggcaucgccguggagcaggacaagaacacccaggagguguucgcccaggugaagcagaucuacaagaccccucccaucaaggacuucggcggcuucaacuucagccagauccugcccgaccccagcaagcccagcaagcggagcuucaucgaggaccugcuguucaacaaggugacccuagccgacgccggcuucaucaagcaguacggcgacugccucggcgacauagccgcccgggaccugaucugcgcccagaaguucaacggccugaccgugcugccuccccugcugaccgacgagaugaucgcccaguacaccagcgcccuguuagccggaaccaucaccagcggcuggacuuucggcgcuggagccgcucugcagauccccuucgccaugcagauggccuaccgguucaacggcaucggcgugacccagaacgugcuguacgagaaccagaagcugaucgccaaccaguucaacagcgccaucggcaagauccaggacagccugagcagcaccgcuagcgcccugggcaagcugcaggacguggugaaccagaacgcccaggcccugaacacccuggugaagcagcugagcagcaacuucggcgccaucagcagcgugcugaacgacauccugagccggcuggacaaggucgaggccgaggugcagaucgaccggcugaucacuggccggcugcagagccugcagaccuacgugacccagcagcugauccgggccgccgagauucgggccagcgccaaccuggccgccaccaagaugagcgagugcgugcugggccagagcaagcggguggacuucugcggcaagggcuaccaccugaugagcuuuccccagagcgcaccccacggagugguguuccugcacgugaccuacgugcccgcccaggagaagaacuucaccaccgccccagccaucugccacgacggcaaggcccacuuuccccgggagggcguguucgugagcaacggcacccacugguucgugacccagcggaacuucuacgagccccagaucaucaccaccgacaacaccuucgugagcggcaacugcgacguggugaucggcaucgugaacaacaccguguacgauccccugcagcccgagcuggacagcuucaaggaggagcuggacaaguacuucaagaaucacaccagccccgacguggaccugggcgacaucagcggcaucaacgccagcguggugaacauccagaaggagaucgaucggcugaacgagguggccaagaaccugaacgagagccugaucgaccugcaggagcugggcaaguacgagcaguacaucaaguggcccugguacaucuggcugggcuucaucgccggccugaucgccaucgugaucgugaccaucaugcugugcugcaugaccagcugcugcagcugccugaagggcuguugcagcugcggcagcugcugcaaguucgacgaggacgacagcgagcccgugcugaagggcgugaagcugcacuacaccugaggacuaguuauaagacugacuagcccgaugggccucccaacgggcccuccuccccuccuugcaccgagagaucucaaaggcucuuuucagagccaccaaaaaaaaaaaaaaaaaaaaaaaaaaaaaaaaaaaaaaaaaaaaaaaaaaaaaaaaaaaaaaaaaaaaaaaaaaaaaaaaaaaaaaaaaaaaaaaaaaaaa

SEQ ID NO: 24557 - RNA, 4026 nt, Artificial Sequence
  SARS-CoV-2/Wuhan/WIV05/2019__EPI_ISL_402128 spike protein mRNA gc (1-1273)(H69del_V70del_Y144del_N501Y_A570D_D614G_P681H_T716I_S982 A_D1118H)
aggagaaagcuuaccauguucguguuccuggugcugcugccccuggugagcagccagugcgugaaccugaccacccggacccagcugccaccagccuacaccaacagcuucacccggggcgucuacuaccccgacaagguguuccggagcagcguccugcacagcacccaggaccuguuccugcccuucuucagcaacgugaccugguuccacgccaucagcggcaccaacggcaccaagcgguucgacaaccccgugcugcccuucaacgacggcguguacuucgccagcaccgagaagagcaacaucauccggggcuggaucuucggcaccacccuggacagcaagacccagagccugcugaucgugaauaacgccaccaacguggugaucaaggugugcgaguuccaguucugcaacgaccccuuccugggcguguaccacaagaacaacaagagcuggauggagagcgaguuccggguguacagcagcgccaacaacugcaccuucgaguacgugagccagcccuuccugauggaccuggagggcaagcagggcaacuucaagaaccugcgggaguucguguucaagaacaucgacggcuacuucaagaucuacagcaagcacaccccaaucaaccuggugcgggaucugccccagggcuucucagcccuggagccccugguggaccugcccaucggcaucaacaucacccgguuccagacccugcuggcccugcaccggagcuaccugaccccaggcgacagcagcagcggguggacagcaggcgcggcugcuuacuacgugggcuaccugcagccccggaccuuccugcugaaguacaacgagaacggcaccaucaccgacgccguggacugcgcccuggacccucugagcgagaccaagugcacccugaagagcuucaccguggagaagggcaucuaccagaccagcaacuuccgggugcagcccaccgagagcaucgugcgguuccccaacaucaccaaccugugccccuucggcgagguguucaacgccacccgguucgccagcguguacgccuggaaccggaagcggaucagcaacugcguggccgacuacagcgugcuguacaacagcgccagcuucagcaccuucaagugcuacggcgugagccccaccaagcugaacgaccugugcuucaccaacguguacgccgacagcuucgugauccguggcgacgaggugcggcagaucgcacccggccagacaggcaagaucgccgacuacaacuacaagcugcccgacgacuucaccggcugcgugaucgccuggaacagcaacaaccucgacagcaaggugggcggcaacuacaacuaccuguaccggcuguuccggaagagcaaccugaagcccuucgagcgggacaucagcaccgagaucuaccaagccggcuccaccccuugcaacggcguggagggcuucaacugcuacuucccucugcagagcuacggcuuccagcccaccuacggcgugggcuaccagcccuaccgggugguggugcugagcuucgagcugcugcacgccccagccaccguguguggccccaagaagagcaccaaccuggugaagaacaagugcgugaacuucaacuucaacggccuuaccggcaccggcgugcugaccgagagcaacaagaaauuccugcccuuucagcaguucggccgggacaucgacgacaccaccgacgcugugcgggauccccagacccuggagauccuggacaucaccccuugcagcuucggcggcgugagcgugaucaccccaggcaccaacaccagcaaccagguggccgugcuguaccagggcgugaacugcaccgaggugcccguggccauccacgccgaccagcugacacccaccuggcgggucuacagcaccggcagcaacguguuccagacccgggccgguugccugaucggcgccgagcacgugaacaacagcuacgagugcgacauccccaucggcgccggcaucugugccagcuaccagacccagaccaauucacaccggagggcaaggagcguggccagccagagcaucaucgccuacaccaugagccugggcgccgagaacagcguggccuacagcaacaacagcaucgccauccccaucaacuucaccaucagcgugaccaccgagauucugcccgugagcaugaccaagaccagcguggacugcaccauguacaucugcggcgacagcaccgagugcagcaaccugcugcugcaguacggcagcuucugcacccagcugaaccgggcccugaccggcaucgccguggagcaggacaagaacacccaggagguguucgcccaggugaagcagaucuacaagaccccucccaucaaggacuucggcggcuucaacuucagccagauccugcccgaccccagcaagcccagcaagcggagcuucaucgaggaccugcuguucaacaaggugacccuagccgacgccggcuucaucaagcaguacggcgacugccucggcgacauagccgcccgggaccugaucugcgcccagaaguucaacggccugaccgugcugccuccccugcugaccgacgagaugaucgcccaguacaccagcgcccuguuagccggaaccaucaccagcggcuggacuuucggcgcuggagccgcucugcagauccccuucgccaugcagauggccuaccgguucaacggcaucggcgugacccagaacgugcuguacgagaaccagaagcugaucgccaaccaguucaacagcgccaucggcaagauccaggacagccugagcagcaccgcuagcgcccugggcaagcugcaggacguggugaaccagaacgcccaggcccugaacacccuggugaagcagcugagcagcaacuucggcgccaucagcagcgugcugaacgacauccuggcccggcuggacaaggucgaggccgaggugcagaucgaccggcugaucacuggccggcugcagagccugcagaccuacgugacccagcagcugauccgggccgccgagauucgggccagcgccaaccuggccgccaccaagaugagcgagugcgugcugggccagagcaagcggguggacuucugcggcaagggcuaccaccugaugagcuuuccccagagcgcaccccacggagugguguuccugcacgugaccuacgugcccgcccaggagaagaacuucaccaccgccccagccaucugccacgacggcaaggcccacuuuccccgggagggcguguucgugagcaacggcacccacugguucgugacccagcggaacuucuacgagccccagaucaucaccacccacaacaccuucgugagcggcaacugcgacguggugaucggcaucgugaacaacaccguguacgauccccugcagcccgagcuggacagcuucaaggaggagcuggacaaguacuucaagaaucacaccagccccgacguggaccugggcgacaucagcggcaucaacgccagcguggugaacauccagaaggagaucgaucggcugaacgagguggccaagaaccugaacgagagccugaucgaccugcaggagcugggcaaguacgagcaguacaucaaguggcccugguacaucuggcugggcuucaucgccggccugaucgccaucgugauggugaccaucaugcugugcugcaugaccagcugcugcagcugccugaagggcuguugcagcugcggcagcugcugcaaguucgacgaggacgacagcgagcccgugcugaagggcgugaagcugcacuacaccugaggacuaguuauaagacugacuagcccgaugggccucccaacgggcccuccuccccuccuugcaccgagagaucucaaaggcucuuuucagagccaccaaaaaaaaaaaaaaaaaaaaaaaaaaaaaaaaaaaaaaaaaaaaaaaaaaaaaaaaaaaaaaaaaaaaaaaaaaaaaaaaaaaaaaaaaaaaaaaaaaaaa

SEQ ID NO: 24558 - RNA, 4035 nt, Artificial Sequence
  SARS-CoV-2/Wuhan/WIV05/2019__EPI_ISL_402128 spike protein mRNA gc (1-1273)(K417N_E484K_N501Y_D614G)
aggagaaagcuuaccauguucguguuccuggugcugcugccccuggugagcagccagugcgugaaccugaccacccggacccagcugccaccagccuacaccaacagcuucacccggggcgucuacuaccccgacaagguguuccggagcagcguccugcacagcacccaggaccuguuccugcccuucuucagcaacgugaccugguuccacgccauccacgugagcggcaccaacggcaccaagcgguucgacaaccccgugcugcccuucaacgacggcguguacuucgccagcaccgagaagagcaacaucauccggggcuggaucuucggcaccacccuggacagcaagacccagagccugcugaucgugaauaacgccaccaacguggugaucaaggugugcgaguuccaguucugcaacgaccccuuccugggcguguacuaccacaagaacaacaagagcuggauggagagcgaguuccggguguacagcagcgccaacaacugcaccuucgaguacgugagccagcccuuccugauggaccuggagggcaagcagggcaacuucaagaaccugcgggaguucguguucaagaacaucgacggcuacuucaagaucuacagcaagcacaccccaaucaaccuggugcgggaucugccccagggcuucucagcccuggagccccugguggaccugcccaucggcaucaacaucacccgguuccagacccugcuggcccugcaccggagcuaccugaccccaggcgacagcagcagcggguggacagcaggcgcggcugcuuacuacgugggcuaccugcagccccggaccuuccugcugaaguacaacgagaacggcaccaucaccgacgccguggacugcgcccuggacccucugagcgagaccaagugcacccugaagagcuucaccguggagaagggcaucuaccagaccagcaacuuccgggugcagcccaccgagagcaucgugcgguuccccaacaucaccaaccugugccccuucggcgagguguucaacgccacccgguucgccagcguguacgccuggaaccggaagcggaucagcaacugcguggccgacuacagcgugcuguacaacagcgccagcuucagcaccuucaagugcuacggcgugagccccaccaagcugaacgaccugugcuucaccaacguguacgccgacagcuucgugauccguggcgacgaggugcggcagaucgcacccggccagacaggcaacaucgccgacuacaacuacaagcugcccgacgacuucaccggcugcgugaucgccuggaacagcaacaaccucgacagcaaggugggcggcaacuacaacuaccuguaccggcuguuccggaagagcaaccugaagcccuucgagcgggacaucagcaccgagaucuaccaagccggcuccaccccuugcaacggcgugaagggcuucaacugcuacuucccucugcagagcuacggcuuccagcccaccuacggcgugggcuaccagcccuaccgggugguggugcugagcuucgagcugcugcacgccccagccaccguguguggccccaagaagagcaccaaccuggugaagaacaagugcgugaacuucaacuucaacggccuuaccggcaccggcgugcugaccgagagcaacaagaaauuccugcccuuucagcaguucggccgggacaucgccgacaccaccgacgcugugcgggauccccagacccuggagauccuggacaucaccccuugcagcuucggcggcgugagcgugaucaccccaggcaccaacaccagcaaccagguggccgugcuguaccagggcgugaacugcaccgaggugcccguggccauccacgccgaccagcugacacccaccuggcgggucuacagcaccggcagcaacguguuccagacccgggccgguugccugaucggcgccgagcacgugaacaacagcuacgagugcgacauccccaucggcgccggcaucugugccagcuaccagacccagaccaauucaccccggagggcaaggagcguggccagccagagcaucaucgccuacaccaugagccugggcgccgagaacagcguggccuacagcaacaacagcaucgccauccccaccaacuucaccaucagcgugaccaccgagauucugcccgugagcaugaccaagaccagcguggacugcaccauguacaucugcggcgacagcaccgagugcagcaaccugcugcugcaguacggcagcuucugcacccagcugaaccgggcccugaccggcaucgccguggagcaggacaagaacacccaggagguguucgcccaggugaagcagaucuacaagaccccucccaucaaggacuucggcggcuucaacuucagccagauccugcccgaccccagcaagcccagcaagcggagcuucaucgaggaccugcuguucaacaaggugacccuagccgacgccggcuucaucaagcaguacggcgacugccucggcgacauagccgcccgggaccugaucugcgcccagaaguucaacggccugaccgugcugccuccccugcugaccgacgagaugaucgcccaguacaccagcgcccuguuagccggaaccaucaccagcggcuggacuuucggcgcuggagccgcucugcagauccccuucgccaugcagauggccuaccgguucaacggcaucggcgugacccagaacgugcuguacgagaaccagaagcugaucgccaaccaguucaacagcgccaucggcaagauccaggacagccugagcagcaccgcuagcgcccugggcaagcugcaggacguggugaaccagaacgcccaggcccugaacacccuggugaagcagcugagcagcaacuucggcgccaucagcagcgugcugaacgacauccugagccggcuggacaaggucgaggccgaggugcagaucgaccggcugaucacuggccggcugcagagccugcagaccuacgugacccagcagcugauccgggccgccgagauucgggccagcgccaaccuggccgccaccaagaugagcgagugcgugcugggccagagcaagcggguggacuucugcggcaagggcuaccaccugaugagcuuuccccagagcgcaccccacggagugguguuccugcacgugaccuacgugcccgcccaggagaagaacuucaccaccgccccagccaucugccacgacggcaaggcccacuuuccccgggagggcguguucgugagcaacggcacccacugguucgugacccagcggaacuucuacgagccccagaucaucaccaccgacaacaccuucgugagcggcaacugcgacguggugaucggcaucgugaacaacaccguguacgauccccugcagcccgagcuggacagcuucaaggaggagcuggacaaguacuucaagaaucacaccagccccgacguggaccugggcgacaucagcggcaucaacgccagcguggugaacauccagaaggagaucgaucggcugaacgagguggccaagaaccugaacgagagccugaucgaccugcaggagcugggcaaguacgagcaguacaucaaguggcccugguacaucuggcugggcuucaucgccggccugaucgccaucgugauggugaccaucaugcugugcugcaugaccagcugcugcagcugccugaagggcuguugcagcugcggcagcugcugcaaguucgacgaggacgacagcgagcccgugcugaagggcgugaagcugcacuacaccugaggacuaguuauaagacugacuagcccgaugggccucccaacgggcccuccuccccuccuugcaccgagagaucucaaaggcucuuuucagagccaccaaaaaaaaaaaaaaaaaaaaaaaaaaaaaaaaaaaaaaaaaaaaaaaaaaaaaaaaaaaaaaaaaaaaaaaaaaaaaaaaaaaaaaaaaaaaaaaaaaaaa

SEQ ID NO: 24559 - RNA, 4026 nt, Artificial Sequence
  SARS-CoV-2/Wuhan/WIV05/2019__EPI_ISL_402128 spike protein mRNA gc (1-1273)(L18F_D80A_D215G_L242del_A243del_L244del_R246I_K417N_E484 K_N501Y_D614G_A701V)
aggagaaagcuuaccauguucguguuccuggugcugcugccccuggugagcagccagugcgugaacuucaccacccggacccagcugccaccagccuacaccaacagcuucacccggggcgucuacuaccccgacaagguguuccggagcagcguccugcacagcacccaggaccuguuccugcccuucuucagcaacgugaccugguuccacgccauccacgugagcggcaccaacggcaccaagcgguucgccaaccccgugcugcccuucaacgacggcguguacuucgccagcaccgagaagagcaacaucauccggggcuggaucuucggcaccacccuggacagcaagacccagagccugcugaucgugaauaacgccaccaacguggugaucaaggugugcgaguuccaguucugcaacgaccccuuccugggcguguacuaccacaagaacaacaagagcuggauggagagcgaguuccggguguacagcagcgccaacaacugcaccuucgaguacgugagccagcccuuccugauggaccuggagggcaagcagggcaacuucaagaaccugcgggaguucguguucaagaacaucgacggcuacuucaagaucuacagcaagcacaccccaaucaaccuggugcggggccugccccagggcuucucagcccuggagccccugguggaccugcccaucggcaucaacaucacccgguuccagacccugcacaucagcuaccugaccccaggcgacagcagcagcggguggacagcaggcgcggcugcuuacuacgugggcuaccugcagccccggaccuuccugcugaaguacaacgagaacggcaccaucaccgacgccguggacugcgcccuggacccucugagcgagaccaagugcacccugaagagcuucaccguggagaagggcaucuaccagaccagcaacuuccgggugcagcccaccgagagcaucgugcgguuccccaacaucaccaaccugugccccuucggcgagguguucaacgccacccgguucgccagcguguacgccuggaaccggaagcggaucagcaacugcguggccgacuacagcgugcuguacaacagcgccagcuucagcaccuucaagugcuacggcgugagccccaccaagcugaacgaccugugcuucaccaacguguacgccgacagcuucgugauccguggcgacgaggugcggcagaucgcacccggccagacaggcaacaucgccgacuacaacuacaagcugcccgacgacuucaccggcugcgugaucgccuggaacagcaacaaccucgacagcaaggugggcggcaacuacaacuaccuguaccggcuguuccggaagagcaaccugaagcccuucgagcgggacaucagcaccgagaucuaccaagccggcuccaccccuugcaacggcgugaagggcuucaacugcuacuucccucugcagagcuacggcuuccagcccaccuacggcgugggcuaccagcccuaccgggugguggugcugagcuucgagcugcugcacgccccagccaccguguguggccccaagaagagcaccaaccuggugaagaacaagugcgugaacuucaacuucaacggccuuaccggcaccggcgugcugaccgagagcaacaagaaauuccugcccuuucagcaguucggccgggacaucgccgacaccaccgacgcugugcgggauccccagacccuggagauccuggacaucaccccuugcagcuucggcggcgugagcgugaucaccccaggcaccaacaccagcaaccagguggccgugcuguaccagggcgugaacugcaccgaggugcccguggccauccacgccgaccagcugacacccaccuggcgggucuacagcaccggcagcaacguguuccagacccgggccgguugccugaucggcgccgagcacgugaacaacagcuacgagugcgacauccccaucggcgccggcaucugugccagcuaccagacccagaccaauucaccccggagggcaaggagcguggccagccagagcaucaucgccuacaccaugagccugggcguggagaacagcguggccuacagcaacaacagcaucgccauccccaccaacuucaccaucagcgugaccaccgagauucugcccgugagcaugaccaagaccagcguggacugcaccauguacaucugcggcgacagcaccgagugcagcaaccugcugcugcaguacggcagcuucugcacccagcugaaccgggcccugaccggcaucgccguggagcaggacaagaacacccaggagguguucgcccaggugaagcagaucuacaagaccccucccaucaaggacuucggcggcuucaacuucagccagauccugcccgaccccagcaagcccagcaagcggagcuucaucgaggaccugcuguucaacaaggugacccuagccgacgccggcuucaucaagcaguacggcgacugccucggcgacauagccgcccgggaccugaucugcgcccagaaguucaacggccugaccgugcugccuccccugcugaccgacgagaugaucgcccaguacaccagcgcccuguuagccggaaccaucaccagcggcuggacuuucggcgcuggagccgcucugcagauccccuucgccaugcagauggccuaccgguucaacggcaucggcgugacccagaacgugcuguacgagaaccagaagcugaucgccaaccaguucaacagcgccaucggcaagauccaggacagccugagcagcaccgcuagcgcccugggcaagcugcaggacguggugaaccagaacgcccaggcccugaacacccuggugaagcagcugagcagcaacuucggcgccaucagcagcgugcugaacgacauccugagccggcuggacaaggucgaggccgaggugcagaucgaccggcugaucacuggccggcugcagagccugcagaccuacgugacccagcagcugauccgggccgccgagauucgggccagcgccaaccuggccgccaccaagaugagcgagugcgugcugggccagagcaagcggguggacuucugcggcaagggcuaccaccugaugagcuuuccccagagcgcaccccacggagugguguuccugcacgugaccuacgugcccgcccaggagaagaacuucaccaccgccccagccaucugccacgacggcaaggcccacuuuccccgggagggcguguucgugagcaacggcacccacugguucgugacccagcggaacuucuacgagccccagaucaucaccaccgacaacaccuucgugagcggcaacugcgacguggugaucggcaucgugaacaacaccguguacgauccccugcagcccgagcuggacagcuucaaggaggagcuggacaaguacuucaagaaucacaccagccccgacguggaccugggcgacaucagcggcaucaacgccagcguggugaacauccagaaggagaucgaucggcugaacgagguggccaagaaccugaacgagagccugaucgaccugcaggagcugggcaaguacgagcaguacaucaaguggcccugguacaucuggcugggcuucaucgccggccugaucgccaucgugauggugaccaucaugcugugcugcaugaccagcugcugcagcugccugaagggcuguugcagcugcggcagcugcugcaaguucgacgaggacgacagcgagcccgugcugaagggcgugaagcugcacuacaccugaggacuaguuauaagacugacuagcccgaugggccucccaacgggcccuccuccccuccuugcaccgagagaucucaaaggcucuuuucagagccaccaaaaaaaaaaaaaaaaaaaaaaaaaaaaaaaaaaaaaaaaaaaaaaaaaaaaaaaaaaaaaaaaaaaaaaaaaaaaaaaaaaaaaaaaaaaaaaaaaaaaa

SEQ ID NO: 24560 - RNA, 4035 nt, Artificial Sequence
  SARS-CoV-2/Wuhan/WIV05/2019__EPI_ISL_402128 spike protein mRNA gc (1-1273)(E484K_D614G)
aggagaaagcuuaccauguucguguuccuggugcugcugccccuggugagcagccagugcgugaaccugaccacccggacccagcugccaccagccuacaccaacagcuucacccggggcgucuacuaccccgacaagguguuccggagcagcguccugcacagcacccaggaccuguuccugcccuucuucagcaacgugaccugguuccacgccauccacgugagcggcaccaacggcaccaagcgguucgacaaccccgugcugcccuucaacgacggcguguacuucgccagcaccgagaagagcaacaucauccggggcuggaucuucggcaccacccuggacagcaagacccagagccugcugaucgugaauaacgccaccaacguggugaucaaggugugcgaguuccaguucugcaacgaccccuuccugggcguguacuaccacaagaacaacaagagcuggauggagagcgaguuccggguguacagcagcgccaacaacugcaccuucgaguacgugagccagcccuuccugauggaccuggagggcaagcagggcaacuucaagaaccugcgggaguucguguucaagaacaucgacggcuacuucaagaucuacagcaagcacaccccaaucaaccuggugcgggaucugccccagggcuucucagcccuggagccccugguggaccugcccaucggcaucaacaucacccgguuccagacccugcuggcccugcaccggagcuaccugaccccaggcgacagcagcagcggguggacagcaggcgcggcugcuuacuacgugggcuaccugcagccccggaccuuccugcugaaguacaacgagaacggcaccaucaccgacgccguggacugcgcccuggacccucugagcgagaccaagugcacccugaagagcuucaccguggagaagggcaucuaccagaccagcaacuuccgggugcagcccaccgagagcaucgugcgguuccccaacaucaccaaccugugccccuucggcgagguguucaacgccacccgguucgccagcguguacgccuggaaccggaagcggaucagcaacugcguggccgacuacagcgugcuguacaacagcgccagcuucagcaccuucaagugcuacggcgugagccccaccaagcugaacgaccugugcuucaccaacguguacgccgacagcuucgugauccguggcgacgaggugcggcagaucgcacccggccagacaggcaagaucgccgacuacaacuacaagcugcccgacgacuucaccggcugcgugaucgccuggaacagcaacaaccucgacagcaaggugggcggcaacuacaacuaccuguaccggcuguuccggaagagcaaccugaagcccuucgagcgggacaucagcaccgagaucuaccaagccggcuccaccccuugcaacggcgugaagggcuucaacugcuacuucccucugcagagcuacggcuuccagcccaccaacggcgugggcuaccagcccuaccgggugguggugcugagcuucgagcugcugcacgccccagccaccguguguggccccaagaagagcaccaaccuggugaagaacaagugcgugaacuucaacuucaacggccuuaccggcaccggcgugcugaccgagagcaacaagaaauuccugcccuuucagcaguucggccgggacaucgccgacaccaccgacgcugugcgggauccccagacccuggagauccuggacaucaccccuugcagcuucggcggcgugagcgugaucaccccaggcaccaacaccagcaaccagguggccgugcuguaccagggcgugaacugcaccgaggugcccguggccauccacgccgaccagcugacacccaccuggcgggucuacagcaccggcagcaacguguuccagacccgggccgguugccugaucggcgccgagcacgugaacaacagcuacgagugcgacauccccaucggcgccggcaucugugccagcuaccagacccagaccaauucaccccggagggcaaggagcguggccagccagagcaucaucgccuacaccaugagccugggcgccgagaacagcguggccuacagcaacaacagcaucgccauccccaccaacuucaccaucagcgugaccaccgagauucugcccgugagcaugaccaagaccagcguggacugcaccauguacaucugcggcgacagcaccgagugcagcaaccugcugcugcaguacggcagcuucugcacccagcugaaccgggcccugaccggcaucgccguggagcaggacaagaacacccaggagguguucgcccaggugaagcagaucuacaagaccccucccaucaaggacuucggcggcuucaacuucagccagauccugcccgaccccagcaagcccagcaagcggagcuucaucgaggaccugcuguucaacaaggugacccuagccgacgccggcuucaucaagcaguacggcgacugccucggcgacauagccgcccgggaccugaucugcgcccagaaguucaacggccugaccgugcugccuccccugcugaccgacgagaugaucgcccaguacaccagcgcccuguuagccggaaccaucaccagcggcuggacuuucggcgcuggagccgcucugcagauccccuucgccaugcagauggccuaccgguucaacggcaucggcgugacccagaacgugcuguacgagaaccagaagcugaucgccaaccaguucaacagcgccaucggcaagauccaggacagccugagcagcaccgcuagcgcccugggcaagcugcaggacguggugaaccagaacgcccaggcccugaacacccuggugaagcagcugagcagcaacuucggcgccaucagcagcgugcugaacgacauccugagccggcuggacaaggucgaggccgaggugcagaucgaccggcugaucacuggccggcugcagagccugcagaccuacgugacccagcagcugauccgggccgccgagauucgggccagcgccaaccuggccgccaccaagaugagcgagugcgugcugggccagagcaagcggguggacuucugcggcaagggcuaccaccugaugagcuuuccccagagcgcaccccacggagugguguuccugcacgugaccuacgugcccgcccaggagaagaacuucaccaccgccccagccaucugccacgacggcaaggcccacuuuccccgggagggcguguucgugagcaacggcacccacugguucgugacccagcggaacuucuacgagccccagaucaucaccaccgacaacaccuucgugagcggcaacugcgacguggugaucggcaucgugaacaacaccguguacgauccccugcagcccgagcuggacagcuucaaggaggagcuggacaaguacuucaagaaucacaccagccccgacguggaccugggcgacaucagcggcaucaacgccagcguggugaacauccagaaggagaucgaucggcugaacgagguggccaagaaccugaacgagagccugaucgaccugcaggagcugggcaaguacgagcaguacaucaaguggcccugguacaucuggcugggcuucaucgccggccugaucgccaucgugauggugaccaucaugcugugcugcaugaccagcugcugcagcugccugaagggcuguugcagcugcggcagcugcugcaaguucgacgaggacgacagcgagcccgugcugaagggcgugaagcugcacuacaccugaggacuaguuauaagacugacuagcccgaugggccucccaacgggcccuccuccccuccuugcaccgagagaucucaaaggcucuuuucagagccaccaaaaaaaaaaaaaaaaaaaaaaaaaaaaaaaaaaaaaaaaaaaaaaaaaaaaaaaaaaaaaaaaaaaaaaaaaaaaaaaaaaaaaaaaaaaaaaaaaaaaa

SEQ ID NO: 24561 - RNA, 4035 nt, Artificial Sequence
  SARS-CoV-2/Wuhan/WIV05/2019__EPI_ISL_402128 spike protein mRNA gc (1-1273)(L18F_T20N_P26S_D138Y_R190S_K417T_E484K_N501Y_D614G_H655Y _T1027I)
aggagaaagcuuaccauguucguguuccuggugcugcugccccuggugagcagccagugcgugaacuucaccaaccggacccagcugccaagcgccuacaccaacagcuucacccggggcgucuacuaccccgacaagguguuccggagcagcguccugcacagcacccaggaccuguuccugcccuucuucagcaacgugaccugguuccacgccauccacgugagcggcaccaacggcaccaagcgguucgacaaccccgugcugcccuucaacgacggcguguacuucgccagcaccgagaagagcaacaucauccggggcuggaucuucggcaccacccuggacagcaagacccagagccugcugaucgugaauaacgccaccaacguggugaucaaggugugcgaguuccaguucugcaacuaccccuuccugggcguguacuaccacaagaacaacaagagcuggauggagagcgaguuccggguguacagcagcgccaacaacugcaccuucgaguacgugagccagcccuuccugauggaccuggagggcaagcagggcaacuucaagaaccugagcgaguucguguucaagaacaucgacggcuacuucaagaucuacagcaagcacaccccaaucaaccuggugcgggaucugccccagggcuucucagcccuggagccccugguggaccugcccaucggcaucaacaucacccgguuccagacccugcuggcccugcaccggagcuaccugaccccaggcgacagcagcagcggguggacagcaggcgcggcugcuuacuacgugggcuaccugcagccccggaccuuccugcugaaguacaacgagaacggcaccaucaccgacgccguggacugcgcccuggacccucugagcgagaccaagugcacccugaagagcuucaccguggagaagggcaucuaccagaccagcaacuuccgggugcagcccaccgagagcaucgugcgguuccccaacaucaccaaccugugccccuucggcgagguguucaacgccacccgguucgccagcguguacgccuggaaccggaagcggaucagcaacugcguggccgacuacagcgugcuguacaacagcgccagcuucagcaccuucaagugcuacggcgugagccccaccaagcugaacgaccugugcuucaccaacguguacgccgacagcuucgugauccguggcgacgaggugcggcagaucgcacccggccagacaggcaccaucgccgacuacaacuacaagcugcccgacgacuucaccggcugcgugaucgccuggaacagcaacaaccucgacagcaaggugggcggcaacuacaacuaccuguaccggcuguuccggaagagcaaccugaagcccuucgagcgggacaucagcaccgagaucuaccaagccggcuccaccccuugcaacggcgugaagggcuucaacugcuacuucccucugcagagcuacggcuuccagcccaccuacggcgugggcuaccagcccuaccgggugguggugcugagcuucgagcugcugcacgccccagccaccguguguggccccaagaagagcaccaaccuggugaagaacaagugcgugaacuucaacuucaacggccuuaccggcaccggcgugcugaccgagagcaacaagaaauuccugcccuuucagcaguucggccgggacaucgccgacaccaccgacgcugugcgggauccccagacccuggagauccuggacaucaccccuugcagcuucggcggcgugagcgugaucaccccaggcaccaacaccagcaaccagguggccgugcuguaccagggcgugaacugcaccgaggugcccguggccauccacgccgaccagcugacacccaccuggcgggucuacagcaccggcagcaacguguuccagacccgggccgguugccugaucggcgccgaguacgugaacaacagcuacgagugcgacauccccaucggcgccggcaucugugccagcuaccagacccagaccaauucaccccggagggcaaggagcguggccagccagagcaucaucgccuacaccaugagccugggcgccgagaacagcguggccuacagcaacaacagcaucgccauccccaccaacuucaccaucagcgugaccaccgagauucugcccgugagcaugaccaagaccagcguggacugcaccauguacaucugcggcgacagcaccgagugcagcaaccugcugcugcaguacggcagcuucugcacccagcugaaccgggcccugaccggcaucgccguggagcaggacaagaacacccaggagguguucgcccaggugaagcagaucuacaagaccccucccaucaaggacuucggcggcuucaacuucagccagauccugcccgaccccagcaagcccagcaagcggagcuucaucgaggaccugcuguucaacaaggugacccuagccgacgccggcuucaucaagcaguacggcgacugccucggcgacauagccgcccgggaccugaucugcgcccagaaguucaacggccugaccgugcugccuccccugcugaccgacgagaugaucgcccaguacaccagcgcccuguuagccggaaccaucaccagcggcuggacuuucggcgcuggagccgcucugcagauccccuucgccaugcagauggccuaccgguucaacggcaucggcgugacccagaacgugcuguacgagaaccagaagcugaucgccaaccaguucaacagcgccaucggcaagauccaggacagccugagcagcaccgcuagcgcccugggcaagcugcaggacguggugaaccagaacgcccaggcccugaacacccuggugaagcagcugagcagcaacuucggcgccaucagcagcgugcugaacgacauccugagccggcuggacaaggucgaggccgaggugcagaucgaccggcugaucacuggccggcugcagagccugcagaccuacgugacccagcagcugauccgggccgccgagauucgggccagcgccaaccuggccgccaucaagaugagcgagugcgugcugggccagagcaagcggguggacuucugcggcaagggcuaccaccugaugagcuuuccccagagcgcaccccacggagugguguuccugcacgugaccuacgugcccgcccaggagaagaacuucaccaccgccccagccaucugccacgacggcaaggcccacuuuccccgggagggcguguucgugagcaacggcacccacugguucgugacccagcggaacuucuacgagccccagaucaucaccaccgacaacaccuucgugagcggcaacugcgacguggugaucggcaucgugaacaacaccguguacgauccccugcagcccgagcuggacagcuucaaggaggagcuggacaaguacuucaagaaucacaccagccccgacguggaccugggcgacaucagcggcaucaacgccagcguggugaacauccagaaggagaucgaucggcugaacgagguggccaagaaccugaacgagagccugaucgaccugcaggagcugggcaaguacgagcaguacaucaaguggcccugguacaucuggcugggcuucaucgccggccugaucgccaucgugauggugaccaucaugcugugcugcaugaccagcugcugcagcugccugaagggcuguugcagcugcggcagcugcugcaaguucgacgaggacgacagcgagcccgugcugaagggcgugaagcugcacuacaccugaggacuaguuauaagacugacuagcccgaugggccucccaacgggcccuccuccccuccuugcaccgagagaucucaaaggcucuuuucagagccaccaaaaaaaaaaaaaaaaaaaaaaaaaaaaaaaaaaaaaaaaaaaaaaaaaaaaaaaaaaaaaaaaaaaaaaaaaaaaaaaaaaaaaaaaaaaaaaaaaaaaa

SEQ ID NO: 24562 - RNA, 4035 nt, Artificial Sequence
  SARS-CoV-2/Wuhan/WIV05/2019__EPI_ISL_402128 spike protein mRNA gc (1-1273)(S13I_W152C_L452R_D614G)
aggagaaagcuuaccauguucguguuccuggugcugcugccccuggugagcauccagugcgugaaccugaccacccggacccagcugccaccagccuacaccaacagcuucacccggggcgucuacuaccccgacaagguguuccggagcagcguccugcacagcacccaggaccuguuccugcccuucuucagcaacgugaccugguuccacgccauccacgugagcggcaccaacggcaccaagcgguucgacaaccccgugcugcccuucaacgacggcguguacuucgccagcaccgagaagagcaacaucauccggggcuggaucuucggcaccacccuggacagcaagacccagagccugcugaucgugaauaacgccaccaacguggugaucaaggugugcgaguuccaguucugcaacgaccccuuccugggcguguacuaccacaagaacaacaagagcugcauggagagcgaguuccggguguacagcagcgccaacaacugcaccuucgaguacgugagccagcccuuccugauggaccuggagggcaagcagggcaacuucaagaaccugcgggaguucguguucaagaacaucgacggcuacuucaagaucuacagcaagcacaccccaaucaaccuggugcgggaucugccccagggcuucucagcccuggagccccugguggaccugcccaucggcaucaacaucacccgguuccagacccugcuggcccugcaccggagcuaccugaccccaggcgacagcagcagcggguggacagcaggcgcggcugcuuacuacgugggcuaccugcagccccggaccuuccugcugaaguacaacgagaacggcaccaucaccgacgccguggacugcgcccuggacccucugagcgagaccaagugcacccugaagagcuucaccguggagaagggcaucuaccagaccagcaacuuccgggugcagcccaccgagagcaucgugcgguuccccaacaucaccaaccugugccccuucggcgagguguucaacgccacccgguucgccagcguguacgccuggaaccggaagcggaucagcaacugcguggccgacuacagcgugcuguacaacagcgccagcuucagcaccuucaagugcuacggcgugagccccaccaagcugaacgaccugugcuucaccaacguguacgccgacagcuucgugauccguggcgacgaggugcggcagaucgcacccggccagacaggcaagaucgccgacuacaacuacaagcugcccgacgacuucaccggcugcgugaucgccuggaacagcaacaaccucgacagcaaggugggcggcaacuacaacuaccgcuaccggcuguuccggaagagcaaccugaagcccuucgagcgggacaucagcaccgagaucuaccaagccggcuccaccccuugcaacggcguggagggcuucaacugcuacuucccucugcagagcuacggcuuccagcccaccaacggcgugggcuaccagcccuaccgggugguggugcugagcuucgagcugcugcacgccccagccaccguguguggccccaagaagagcaccaaccuggugaagaacaagugcgugaacuucaacuucaacggccuuaccggcaccggcgugcugaccgagagcaacaagaaauuccugcccuuucagcaguucggccgggacaucgccgacaccaccgacgcugugcgggauccccagacccuggagauccuggacaucaccccuugcagcuucggcggcgugagcgugaucaccccaggcaccaacaccagcaaccagguggccgugcuguaccagggcgugaacugcaccgaggugcccguggccauccacgccgaccagcugacacccaccuggcgggucuacagcaccggcagcaacguguuccagacccgggccgguugccugaucggcgccgagcacgugaacaacagcuacgagugcgacauccccaucggcgccggcaucugugccagcuaccagacccagaccaauucaccccggagggcaaggagcguggccagccagagcaucaucgccuacaccaugagccugggcgccgagaacagcguggccuacagcaacaacagcaucgccauccccaccaacuucaccaucagcgugaccaccgagauucugcccgugagcaugaccaagaccagcguggacugcaccauguacaucugcggcgacagcaccgagugcagcaaccugcugcugcaguacggcagcuucugcacccagcugaaccgggcccugaccggcaucgccguggagcaggacaagaacacccaggagguguucgcccaggugaagcagaucuacaagaccccucccaucaaggacuucggcggcuucaacuucagccagauccugcccgaccccagcaagcccagcaagcggagcuucaucgaggaccugcuguucaacaaggugacccuagccgacgccggcuucaucaagcaguacggcgacugccucggcgacauagccgcccgggaccugaucugcgcccagaaguucaacggccugaccgugcugccuccccugcugaccgacgagaugaucgcccaguacaccagcgcccuguuagccggaaccaucaccagcggcuggacuuucggcgcuggagccgcucugcagauccccuucgccaugcagauggccuaccgguucaacggcaucggcgugacccagaacgugcuguacgagaaccagaagcugaucgccaaccaguucaacagcgccaucggcaagauccaggacagccugagcagcaccgcuagcgcccugggcaagcugcaggacguggugaaccagaacgcccaggcccugaacacccuggugaagcagcugagcagcaacuucggcgccaucagcagcgugcugaacgacauccugagccggcuggacaaggucgaggccgaggugcagaucgaccggcugaucacuggccggcugcagagccugcagaccuacgugacccagcagcugauccgggccgccgagauucgggccagcgccaaccuggccgccaccaagaugagcgagugcgugcugggccagagcaagcggguggacuucugcggcaagggcuaccaccugaugagcuuuccccagagcgcaccccacggagugguguuccugcacgugaccuacgugcccgcccaggagaagaacuucaccaccgccccagccaucugccacgacggcaaggcccacuuuccccgggagggcguguucgugagcaacggcacccacugguucgugacccagcggaacuucuacgagccccagaucaucaccaccgacaacaccuucgugagcggcaacugcgacguggugaucggcaucgugaacaacaccguguacgauccccugcagcccgagcuggacagcuucaaggaggagcuggacaaguacuucaagaaucacaccagccccgacguggaccugggcgacaucagcggcaucaacgccagcguggugaacauccagaaggagaucgaucggcugaacgagguggccaagaaccugaacgagagccugaucgaccugcaggagcugggcaaguacgagcaguacaucaaguggcccugguacaucuggcugggcuucaucgccggccugaucgccaucgugauggugaccaucaugcugugcugcaugaccagcugcugcagcugccugaagggcuguugcagcugcggcagcugcugcaaguucgacgaggacgacagcgagcccgugcugaagggcgugaagcugcacuacaccugaggacuaguuauaagacugacuagcccgaugggccucccaacgggcccuccuccccuccuugcaccgagagaucucaaaggcucuuuucagagccaccaaaaaaaaaaaaaaaaaaaaaaaaaaaaaaaaaaaaaaaaaaaaaaaaaaaaaaaaaaaaaaaaaaaaaaaaaaaaaaaaaaaaaaaaaaaaaaaaaaaaa

SEQ ID NO: 24563 - RNA, 4035 nt, Artificial Sequence
  SARS-CoV-2/Wuhan/WIV05/2019__EPI_ISL_402128 spike protein mRNA gc (1-1273)
aggagaaagcuuaccauguucguguuccuggugcugcugccccuggugagcagccagugcgugaaccugaccacccggacccagcugcccccugccuacaccaacagcuucacccggggcguguacuaccccgacaagguguuccggagcagcgugcugcacagcacccaggaccuguuccugcccuucuucagcaacgugaccugguuccacgccauccacgugagcggcaccaacggcaccaagcgguucgacaacccagugcugcccuucaacgacggcguguacuucgccagcaccgagaagucaaacaucauccggggcuggaucuucggcaccacccuggacagcaagacacagagccugcugaucgugaacaacgccaccaacguggugaucaaggugugcgaguuucaguucugcaacgaccccuuccugggcguguacuaccacaagaacaacaagagcuggauggagagcgaguuccgggucuacagcagcgcuaacaauugcaccuucgaguacgugagccagcccuuccugauggaccucgagggcaagcagggcaacuucaagaaccugcgggaguucguguucaagaacaucgauggcuacuucaagaucuacagcaagcacacccccaucaaccuggugcgggaccugccccagggauucagcgcccuggagccucugguggaccugcccaucggcaucaacaucaccagguuccagacccugcuggcccugcaccggagcuaccugacccccggcgacagcagcagcggcuggaccgccggcgccgccgcauacuacgugggcuaccugcagccacggaccuuccugcugaaguacaacgagaacggcaccaucaccgacgccguggacugcgcccuggacccccugagcgagaccaagugcacccuaaagagcuucaccguggagaagggcaucuaccagaccagcaacuuccgggugcagcccacugagagcaucgugcgguuccccaacauuaccaaccugugucccuucggcgagguguucaacgccacccgguucgccagcguguacgccuggaaccggaagcggaucagcaacugcguggccgacuacagcgugcuguacaacagcgccagcuucagcaccuucaagugcuacggcgugagcccuaccaagcugaacgaccugugcuucaccaacguguacgcugacagcuucgugauccggggcgacgaggugcggcagaucgcccccggccagaccggcaagaucgccgacuacaacuacaagcugcccgacgacuucaccggcugcgugaucgccuggaacagcaacaaccuggacagcaaggugggcggcaacuacaacuaccuguaccggcuguuccguaagagcaaccugaagccauucgagcgggacaucagcaccgagaucuaccaggccggcagcacccccugcaacgguguggagggcuuuaacugcuacuucccccugcagagcuacggcuuccagcccaccaacggcgugggcuaccagcccuaccgggugguggugcugagcuucgagcugcugcacgcccccgccaccgugugcggcccuaaaaagagcaccaaccuggugaagaacaagugcgugaacuucaauuucaacggccugaccggcaccggcgugcugaccgagagcaacaagaaguuccugcccuuccagcaguucggccgggauaucgccgacaccaccgacgcagugcgggacccccagacccuggagauccuggacaucaccccaugcagcuucggcggcgugagcgucaucacccccggcacaaacaccagcaaccagguggccgugcuguaccaggacgugaacugcaccgaggugcccguggccauccacgccgaccagcugacccccaccuggcggguguacagcaccggaagcaacguguuccagacccgggccggcugccugaucggcgccgagcacgugaacaacuccuacgagugcgacauccccaucggcgcuggcaucugcgccagcuaccagacccagaccaacagcccccggcgggcccggagcguggccagccagagcaucaucgccuacaccaugagcuuaggcgccgagaacagcguggccuacagcaacaacagcaucgcgaucccuaccaacuucaccaucagcgugaccaccgagauacugcccgugagcaugaccaagaccagcguggacuguaccauguacaucugcggcgacagcaccgagugcagcaaccugcugcugcaguacggcagcuucugcacccagcugaaccgggcccugaccggcaucgccguggagcaggacaagaacacccaagagguguucgcccaggugaagcagaucuacaagacucccccaaucaaggacuucggcggcuucaacuucagccagauccugcccgaccccagcaagcccagcaagcggagcuucaucgaggaccugcuguucaacaaggugacccuggccgacgccggcuucaucaagcaguacggcgauugccugggcgacaucgccgcucgggaccugaucugcgcccagaaguucaacgggcugaccgugcugcccccucugcugaccgacgagaugaucgcccaguacaccagcgcccugcuugccggcaccaucaccagcggcuggaccuucggcgccggcgcagcccugcagauccccuucgccaugcagauggccuaccgguucaacggcaucggcgugacccagaacgugcuguacgagaaccagaagcugaucgccaaccaguucaacagcgccaucggcaagauccaggacagccugagcagcaccgccagcgcccugggcaagcugcaggacguggugaaccagaacgcucaggcccugaacacccuggugaagcagcugagcagcaacuucggcgccaucagcucagugcugaaugacauccugagcaggcuggacaagguggaggccgaggugcagaucgaccggcugaucaccggccggcugcagagccugcagaccuacgugacccagcagcugauccgggccgccgagauccgggccagcgccaaccuggcagccaccaagaugagcgagugcgugcugggccagagcaagcggguggacuuuugcggcaagggcuaccaccugaugagcuucccccagagcgccccacacggcgugguguuccuccacgucacauacgugcccgcccaggagaagaacuucaccaccgcccccgccauuugccacgacggcaaggcucacuucccccgggagggcguguucgugagcaacggaacccacugguucgugacccagcggaacuucuacgagccccagaucaucaccaccgacaacaccuucgugagcggcaacugcgacguggugaucggcaucgugaacaacaccguguacgacccccugcagccugagcuggacagcuucaaggaggagcuggacaaguacuucaagaaccacaccagccccgauguggaccugggcgacaucagcggcaucaacgccagcguggugaacauccagaaggagaucgaccggcugaacgagguggccaagaaccugaacgagagccugaucgaccugcaggagcugggcaaguacgagcaguacaucaaguggcccugguacaucuggcugggcuucaucgccggccugaucgccaucgugauggugaccaucaugcugugcugcaugaccagcugcuguagcugccugaagggcugcugcagcugcggcagcugcugcaaguucgacgaggacgacagcgagccagugcugaagggcgugaagcugcacuacaccugaggacuaguuauaagacugacuagcccgaugggccucccaacgggcccuccuccccuccuugcaccgagagaucucaaaggcucuuuucagagccaccaaaaaaaaaaaaaaaaaaaaaaaaaaaaaaaaaaaaaaaaaaaaaaaaaaaaaaaaaaaaaaaaaaaaaaaaaaaaaaaaaaaaaaaaaaaaaaaaaaaaa

SEQ ID NO: 24564 - RNA, 4035 nt, Artificial Sequence
  SARS-CoV-2/Wuhan/WIV05/2019__EPI_ISL_402128 spike protein mRNA gc (1-1273)(D614G)
aggagaaagcuuaccauguucguguuccuggugcugcugccccuggugagcagccagugcgugaaccugaccacccggacccagcugcccccugccuacaccaacagcuucacccggggcguguacuaccccgacaagguguuccggagcagcgugcugcacagcacccaggaccuguuccugcccuucuucagcaacgugaccugguuccacgccauccacgugagcggcaccaacggcaccaagcgguucgacaacccagugcugcccuucaacgacggcguguacuucgccagcaccgagaagucaaacaucauccggggcuggaucuucggcaccacccuggacagcaagacacagagccugcugaucgugaacaacgccaccaacguggugaucaaggugugcgaguuucaguucugcaacgaccccuuccugggcguguacuaccacaagaacaacaagagcuggauggagagcgaguuccgggucuacagcagcgcuaacaauugcaccuucgaguacgugagccagcccuuccugauggaccucgagggcaagcagggcaacuucaagaaccugcgggaguucguguucaagaacaucgauggcuacuucaagaucuacagcaagcacacccccaucaaccuggugcgggaccugccccagggauucagcgcccuggagccucugguggaccugcccaucggcaucaacaucaccagguuccagacccugcuggcccugcaccggagcuaccugacccccggcgacagcagcagcggcuggaccgccggcgccgccgcauacuacgugggcuaccugcagccacggaccuuccugcugaaguacaacgagaacggcaccaucaccgacgccguggacugcgcccuggacccccugagcgagaccaagugcacccuaaagagcuucaccguggagaagggcaucuaccagaccagcaacuuccgggugcagcccacugagagcaucgugcgguuccccaacauuaccaaccugugucccuucggcgagguguucaacgccacccgguucgccagcguguacgccuggaaccggaagcggaucagcaacugcguggccgacuacagcgugcuguacaacagcgccagcuucagcaccuucaagugcuacggcgugagcccuaccaagcugaacgaccugugcuucaccaacguguacgcugacagcuucgugauccggggcgacgaggugcggcagaucgcccccggccagaccggcaagaucgccgacuacaacuacaagcugcccgacgacuucaccggcugcgugaucgccuggaacagcaacaaccuggacagcaaggugggcggcaacuacaacuaccuguaccggcuguuccguaagagcaaccugaagccauucgagcgggacaucagcaccgagaucuaccaggccggcagcacccccugcaacgguguggagggcuuuaacugcuacuucccccugcagagcuacggcuuccagcccaccaacggcgugggcuaccagcccuaccgggugguggugcugagcuucgagcugcugcacgcccccgccaccgugugcggcccuaaaaagagcaccaaccuggugaagaacaagugcgugaacuucaauuucaacggccugaccggcaccggcgugcugaccgagagcaacaagaaguuccugcccuuccagcaguucggccgggauaucgccgacaccaccgacgcagugcgggacccccagacccuggagauccuggacaucaccccaugcagcuucggcggcgugagcgucaucacccccggcacaaacaccagcaaccagguggccgugcuguaccagggagugaacugcaccgaggugcccguggccauccacgccgaccagcugacccccaccuggcggguguacagcaccggcagcaacguguuccagacccgggccggcugccugaucggcgccgagcacgugaacaacuccuacgagugcgacauccccaucggcgcuggcaucugcgccagcuaccagacccagaccaacagcccccggcgggcccggagcguggccagccagagcaucaucgccuacaccaugagcuuaggcgccgagaacagcguggccuacagcaacaacagcaucgcgaucccuaccaacuucaccaucagcgugaccaccgagauacugcccgugagcaugaccaagaccagcguggacuguaccauguacaucugcggcgacagcaccgagugcagcaaccugcugcugcaguacggcagcuucugcacccagcugaaccgggcccugaccggcaucgccguggagcaggacaagaacacccaagagguguucgcccaggugaagcagaucuacaagacucccccaaucaaggacuucggcggcuucaacuucagccagauccugcccgaccccagcaagcccagcaagcggagcuucaucgaggaccugcuguucaacaaggugacccuggccgacgccggcuucaucaagcaguacggcgacugccugggggauaucgccgcucgggaccugaucugcgcccagaaguucaacggccugaccgugcugcccccucugcugaccgacgagaugaucgcccaguacaccagcgcccugcuugccggcaccaucaccagcggcuggaccuucggcgccggcgcagcccugcagauccccuucgccaugcagauggccuaccgguucaacggcaucggcgugacccagaacgugcuguacgagaaccagaagcugaucgccaaccaguucaacagcgccaucggcaagauccaggacagccugagcagcaccgccagcgcccugggcaagcugcaggacguggugaaccagaacgcucaggcccugaacacccuggugaagcagcugagcagcaacuucggcgccaucagcucagugcugaaugacauccugagcaggcuggacaagguggaggccgaggugcagaucgaccggcugaucaccggccggcugcagagccugcagaccuacgugacccagcagcugauccgggccgccgagauccgggccagcgccaaccuggcagccaccaagaugagcgagugcgugcugggccagagcaagcggguggacuuuugcggcaagggcuaccaccugaugagcuucccccagagcgccccacacggcgugguguuccuccacgucacauacgugcccgcccaggagaagaacuucaccaccgcccccgccauuugccacgacggcaaggcucacuucccccgggagggaguguucgugagcaacggcacccacugguucgugacccagcggaacuucuacgagccccagaucaucaccaccgacaacaccuucgugagcggcaacugcgacguggugaucggcaucgugaacaacaccguguacgacccccugcagccugagcuggacagcuucaaggaggagcuggacaaguacuucaagaaccacaccagccccgacguggaucugggcgacaucagcggcaucaacgccagcguggugaacauccagaaggagaucgaccggcugaacgagguggccaagaaccugaacgagagccugaucgaccugcaggagcugggcaaguacgagcaguacaucaaguggcccugguacaucuggcugggcuucaucgccggccugaucgccaucgugauggugaccaucaugcugugcugcaugaccagcugcuguagcugccugaagggcugcugcagcugcggcagcugcugcaaguucgacgaggacgacagcgagccagugcugaagggcgugaagcugcacuacaccugaggacuaguuauaagacugacuagcccgaugggccucccaacgggcccuccuccccuccuugcaccgagagaucucaaaggcucuuuucagagccaccaaaaaaaaaaaaaaaaaaaaaaaaaaaaaaaaaaaaaaaaaaaaaaaaaaaaaaaaaaaaaaaaaaaaaaaaaaaaaaaaaaaaaaaaaaaaaaaaaaaaa

SEQ ID NO: 24565 - RNA, 4035 nt, Artificial Sequence
  SARS-CoV-2/Wuhan/WIV05/2019__EPI_ISL_402128 spike protein mRNA gc (1-1273)(A222V_D614G)
aggagaaagcuuaccauguucguguuccuggugcugcugccccuggugagcagccagugcgugaaccugaccacccggacccagcugcccccugccuacaccaacagcuucacccggggcguguacuaccccgacaagguguuccggagcagcgugcugcacagcacccaggaccuguuccugcccuucuucagcaacgugaccugguuccacgccauccacgugagcggcaccaacggcaccaagcgguucgacaacccagugcugcccuucaacgacggcguguacuucgccagcaccgagaagucaaacaucauccggggcuggaucuucggcaccacccuggacagcaagacacagagccugcugaucgugaacaacgccaccaacguggugaucaaggugugcgaguuucaguucugcaacgaccccuuccugggcguguacuaccacaagaacaacaagagcuggauggagagcgaguuccgggucuacagcagcgcuaacaauugcaccuucgaguacgugagccagcccuuccugauggaccucgagggcaagcagggcaacuucaagaaccugcgggaguucguguucaagaacaucgauggcuacuucaagaucuacagcaagcacacccccaucaaccuggugcgggaccugccccagggauucagcgugcuggagccucugguggaccugcccaucggcaucaacaucaccagguuccagacccugcuggcccugcaccggagcuaccugacccccggcgacagcagcagcggcuggaccgccggcgccgccgccuacuacgugggcuaccugcagccacggaccuuccugcugaaguacaacgagaacggcaccaucaccgacgcaguggacugcgcccuggacccccugagcgagaccaagugcacccuaaagagcuucaccguggagaagggcaucuaccagaccagcaacuuccgggugcagcccacugagagcaucgugcgguuccccaacauuaccaaccugugucccuucggcgagguguucaacgccacccgguucgccagcguguacgccuggaaccggaagcggaucagcaacugcguggccgacuacagcgugcuguacaacagcgccagcuucagcaccuucaagugcuacggcgugagcccuaccaagcugaacgaccugugcuucaccaacguguacgccgacagcuucgugauccggggcgacgaggugcggcagaucgcucccggccagaccggcaagaucgccgacuacaacuacaagcugcccgacgacuucaccggcugcgugaucgccuggaacagcaacaaccuggacagcaaggugggcggcaacuacaacuaccuguaccggcuguuccguaagagcaaccugaagccauucgagcgggacaucagcaccgagaucuaccaggccggcagcacccccugcaacgguguggagggcuuuaacugcuacuucccccugcagagcuacggcuuccagcccaccaacggcgugggcuaccagcccuaccgggugguggugcugagcuucgagcugcugcacgcccccgccaccgugugcggcccuaaaaagagcaccaaccuggugaagaacaagugcgugaacuucaauuucaacggccugaccggcaccggcgugcugaccgagagcaacaagaaguuccugcccuuccagcaguucggccgggauaucgccgacaccaccgacgccgugcgggacccccagacccuggagauccuggacaucaccccaugcagcuucggcggcgucagcgugaucacccccggcacaaacaccagcaaccagguggcagugcuguaccagggagugaacugcaccgaggugcccguggccauccacgccgaccagcugacccccaccuggcggguguacagcaccggcagcaacguguuccagacccgggccggcugccugaucggcgccgagcacgugaacaacuccuacgagugcgacauccccaucggcgccggcaucugcgcuagcuaccagacccagaccaacagcccccggcgggcccggagcguggccagccagagcaucaucgccuacaccaugagcuuaggcgccgagaacagcguggccuacagcaacaacagcaucgccaucccuaccaacuucaccaucagcgugaccaccgagauacugcccgugagcaugaccaagaccagcguggacuguaccauguacaucugcggcgacagcaccgagugcagcaaccugcugcugcaguacggcagcuucugcacccagcugaaccgggcgcugaccggcaucgccguggagcaggacaagaacacccaagagguguucgcccaggugaagcagaucuacaagacucccccaaucaaggacuucggcggcuucaacuucagccagauccugcccgaccccagcaagcccagcaagcggagcuucaucgaggaccugcuguucaacaaggugacccuggccgacgccggcuucaucaagcaguacggcgacugccugggggauaucgccgcccgggaccugaucugcgcucagaaguucaacggccugaccgugcugcccccucugcugaccgacgagaugaucgcccaguacaccagcgcccugcuugccggcaccaucaccagcggcuggaccuucggcgccggcgccgcacugcagauccccuucgccaugcagauggccuaccgguucaacggcaucggcgugacccagaacgugcuguacgagaaccagaagcugaucgccaaccaguucaacagcgccaucggcaagauccaggacagccugagcagcaccgccagcgcccugggcaagcugcaggacguggugaaccagaacgcccaggcucugaacacccuggugaagcagcugagcagcaacuucggcgccaucagcucagugcugaaugacauccugagcaggcuggacaagguggaggccgaggugcagaucgaccggcugaucaccggccggcugcagagccugcagaccuacgugacccagcagcugauccgggccgccgagauccgggccagcgccaaccuggccgcaaccaagaugagcgagugcgugcugggccagagcaagcggguggacuuuugcggcaagggcuaccaccugaugagcuucccccagagcgccccacacggcguggucuuccuccacgugacauacgugcccgcccaggagaagaacuucaccaccgcccccgccauuugccacgacggcaaggcccacuucccccgggagggaguguucgugagcaacggcacccacugguucgugacccagcggaacuucuacgagccccagaucaucaccaccgacaacaccuucgugagcggcaacugcgacguggugaucggcaucgugaacaacaccguguacgacccccugcagccugagcuggacagcuucaaggaggagcuggacaaguacuucaagaaccacaccagccccgacguggaucugggcgacaucagcggcaucaacgcuagcguggugaacauccagaaggagaucgaccggcugaacgagguggccaagaaccugaacgagagccugaucgaccugcaggagcugggcaaguacgagcaguacaucaaguggcccugguacaucuggcugggcuucaucgccggccugaucgccaucgugauggugaccaucaugcugugcugcaugaccagcugcuguagcugccugaagggcugcugcagcugcggcagcugcugcaaguucgacgaggacgacagcgagccagugcugaagggcgugaagcugcacuacaccugaggacuaguuauaagacugacuagcccgaugggccucccaacgggcccuccuccccuccuugcaccgagagaucucaaaggcucuuuucagagccaccaaaaaaaaaaaaaaaaaaaaaaaaaaaaaaaaaaaaaaaaaaaaaaaaaaaaaaaaaaaaaaaaaaaaaaaaaaaaaaaaaaaaaaaaaaaaaaaaaaaaa

SEQ ID NO: 24566 - RNA, 4035 nt, Artificial Sequence
  SARS-CoV-2/Wuhan/WIV05/2019__EPI_ISL_402128 spike protein mRNA gc (1-1273)(N439K_D614G)
aggagaaagcuuaccauguucguguuccuggugcugcugccccuggugagcagccagugcgugaaccugaccacccggacccagcugcccccugccuacaccaacagcuucacccggggcguguacuaccccgacaagguguuccggagcagcgugcugcacagcacccaggaccuguuccugcccuucuucagcaacgugaccugguuccacgccauccacgugagcggcaccaacggcaccaagcgguucgacaacccagugcugcccuucaacgacggcguguacuucgccagcaccgagaagucaaacaucauccggggcuggaucuucggcaccacccuggacagcaagacacagagccugcugaucgugaacaacgccaccaacguggugaucaaggugugcgaguuucaguucugcaacgaccccuuccugggcguguacuaccacaagaacaacaagagcuggauggagagcgaguuccgggucuacagcagcgcuaacaauugcaccuucgaguacgugagccagcccuuccugauggaccucgagggcaagcagggcaacuucaagaaccugcgggaguucguguucaagaacaucgauggcuacuucaagaucuacagcaagcacacccccaucaaccuggugcgggaccugccccagggauucagcgcccuggagccucugguggaccugcccaucggcaucaacaucaccagguuccagacccugcuggcccugcaccggagcuaccugacccccggcgacagcagcagcggcuggaccgccggcgccgccgcauacuacgugggcuaccugcagccacggaccuuccugcugaaguacaacgagaacggcaccaucaccgacgccguggacugcgcccuggacccccugagcgagaccaagugcacccuaaagagcuucaccguggagaagggcaucuaccagaccagcaacuuccgggugcagcccacugagagcaucgugcgguuccccaacauuaccaaccugugucccuucggcgagguguucaacgccacccgguucgccagcguguacgccuggaaccggaagcggaucagcaacugcguggccgacuacagcgugcuguacaacagcgccagcuucagcaccuucaagugcuacggcgugagcccuaccaagcugaacgaccugugcuucaccaacguguacgcugacagcuucgugauccggggcgacgaggugcggcagaucgcccccggccagaccggcaagaucgccgacuacaacuacaagcugcccgacgacuucaccggcugcgugaucgccuggaacagcaagaaccuggacagcaaggugggcggcaacuacaacuaccuguaccggcuguuccguaagagcaaccugaagccauucgagcgggacaucagcaccgagaucuaccaggccggcagcacccccugcaacgguguggagggcuuuaacugcuacuucccccugcagagcuacggcuuccagcccaccaacggcgugggcuaccagcccuaccgggugguggugcugagcuucgagcugcugcacgcccccgccaccgugugcggcccuaaaaagagcaccaaccuggugaagaacaagugcgugaacuucaacuucaauggccugaccggcaccggcgugcugaccgagagcaacaagaaguuccugcccuuccagcaguucggccgggauaucgccgacaccaccgacgcagugcgggacccccagacccuggagauccuggacaucaccccaugcagcuucggcggcgugagcgucaucacccccggcacaaacaccagcaaccagguggccgugcuguaccagggagugaacugcaccgaggugcccguggccauccacgccgaccagcugacccccaccuggcggguguacagcaccggcagcaacguguuccagacccgggccggcugccugaucggcgccgagcacgugaacaacuccuacgagugcgacauccccaucggcgcuggcaucugcgccagcuaccagacccagaccaacagcccccggcgggcccggagcguggccagccagagcaucaucgccuacaccaugagcuuaggcgccgagaacagcguggccuacagcaacaacagcaucgcgaucccuaccaacuucaccaucagcgugaccaccgagauacugcccgugagcaugaccaagaccagcguggacuguaccauguacaucugcggcgacagcaccgagugcagcaaccugcugcugcaguacggcagcuucugcacccagcugaaccgggcccugaccggcaucgccguggagcaggacaagaacacccaagagguguucgcccaggugaagcagaucuacaagacucccccaaucaaggacuucggcggcuucaacuucagccagauccugcccgaccccagcaagcccagcaagcggagcuucaucgaggaccugcuguucaacaaggugacccuggccgacgccggcuucaucaagcaguacggcgacugccugggggauaucgccgcucgggaccugaucugcgcccagaaguucaacggccugaccgugcugcccccucugcugaccgacgagaugaucgcccaguacaccagcgcccugcuugccggcaccaucaccagcggcuggaccuucggcgccggcgcagcccugcagauccccuucgccaugcagauggccuaccgguucaacggcaucggcgugacccagaacgugcuguacgagaaccagaagcugaucgccaaccaguucaacagcgccaucggcaagauccaggacagccugagcagcaccgccagcgcccugggcaagcugcaggacguggugaaccagaacgcucaggcccugaacacccuggugaagcagcugagcagcaacuucggcgccaucagcucagugcugaacgacauccugagcaggcuggacaagguggaggccgaggugcagaucgaccggcugaucaccggccggcugcagagccugcagaccuacgugacccagcagcugauccgggccgccgagauccgggccagcgccaaucuggcagccaccaagaugagcgagugcgugcugggccagagcaagcggguggacuuuugcggcaagggcuaccaccugaugagcuucccccagagcgccccacacggcgugguguuccuccacgucacauacgugcccgcccaggagaagaacuucaccaccgcccccgccauuugccacgacggcaaggcucacuucccccgggagggaguguucgugagcaacggcacccacugguucgugacccagcggaacuucuacgagccccagaucaucaccaccgacaacaccuucgugagcggcaacugcgacguggugaucggcaucgugaacaacaccguguacgacccccugcagccugagcuggacagcuucaaggaggagcuggacaaguacuucaagaaccacaccagccccgacguggaucugggcgacaucagcggcaucaacgccagcguggugaacauccagaaggagaucgaccggcugaacgagguggccaagaaccugaacgagagccugaucgaccugcaggagcugggcaaguacgagcaguacaucaaguggcccugguacaucuggcugggcuucaucgccggccugaucgccaucgugauggugaccaucaugcugugcugcaugaccagcugcuguagcugccugaagggcugcugcagcugcggcagcugcugcaaguucgacgaggacgacagcgagccagugcugaagggcgugaagcugcacuacaccugaggacuaguuauaagacugacuagcccgaugggccucccaacgggcccuccuccccuccuugcaccgagagaucucaaaggcucuuuucagagccaccaaaaaaaaaaaaaaaaaaaaaaaaaaaaaaaaaaaaaaaaaaaaaaaaaaaaaaaaaaaaaaaaaaaaaaaaaaaaaaaaaaaaaaaaaaaaaaaaaaaaa

SEQ ID NO: 24567 - RNA, 4035 nt, Artificial Sequence
  SARS-CoV-2/Wuhan/WIV05/2019__EPI_ISL_402128 spike protein mRNA gc (1-1273)(S477N_D614G)
aggagaaagcuuaccauguucguguuccuggugcugcugccccuggugagcagccagugcgugaaccugaccacccggacccagcugcccccugccuacaccaacagcuucacccggggcguguacuaccccgacaagguguuccggagcagcgugcugcacagcacccaggaccuguuccugcccuucuucagcaacgugaccugguuccacgccauccacgugagcggcaccaacggcaccaagcgguucgacaacccagugcugcccuucaacgacggcguguacuucgccagcaccgagaagucaaacaucauccggggcuggaucuucggcaccacccuggacagcaagacacagagccugcugaucgugaacaacgccaccaacguggugaucaaggugugcgaguuucaguucugcaacgaccccuuccugggcguguacuaccacaagaacaacaagagcuggauggagagcgaguuccgggucuacagcagcgcuaacaauugcaccuucgaguacgugagccagcccuuccugauggaccucgagggcaagcagggcaacuucaagaaccugcgggaguucguguucaagaacaucgauggcuacuucaagaucuacagcaagcacacccccaucaaccuggugcgggaccugccccagggauucagcgcccuggagccucugguggaccugcccaucggcaucaacaucaccagguuccagacccugcuggcccugcaccggagcuaccugacccccggcgacagcagcagcggcuggaccgccggcgccgccgcauacuacgugggcuaccugcagccacggaccuuccugcugaaguacaacgagaacggcaccaucaccgacgccguggacugcgcccuggacccccugagcgagaccaagugcacccuaaagagcuucaccguggagaagggcaucuaccagaccagcaacuuccgggugcagcccacugagagcaucgugcgguuccccaacauuaccaaccugugucccuucggcgagguguucaacgccacccgguucgccagcguguacgccuggaaccggaagcggaucagcaacugcguggccgacuacagcgugcuguacaacagcgccagcuucagcaccuucaagugcuacggcgugagcccuaccaagcugaacgaccugugcuucaccaacguguacgcugacagcuucgugauccggggcgacgaggugcggcagaucgcccccggccagaccggcaagaucgccgacuacaacuacaagcugcccgacgacuucaccggcugcgugaucgccuggaacagcaacaaccuggacagcaaggugggcggcaacuacaacuaccuguaccggcuguuccguaagagcaaccugaagccauucgagcgggacaucagcaccgagaucuaccaggccggcaacacccccugcaacgguguggagggcuuuaacugcuacuucccccugcagagcuacggcuuccagcccaccaacggcgugggcuaccagcccuaccgggugguggugcugagcuucgagcugcugcacgcccccgccaccgugugcggcccuaaaaagagcaccaaccuggugaagaacaagugcgugaauuucaacuucaacggccugaccggcaccggcgugcugaccgagagcaacaagaaguuccugcccuuccagcaguucggccgggauaucgccgacaccaccgacgcagugcgggacccccagacccuggagauccuggacaucaccccaugcagcuucggcggcgugagcgucaucacccccggcacaaacaccagcaaccagguggccgugcuguaccagggagugaacugcaccgaggugcccguggccauccacgccgaccagcugacccccaccuggcggguguacagcaccggcagcaacguguuccagacccgggccggcugccugaucggcgccgagcacgugaacaacagcuacgagugcgacauccccaucggcgcuggcaucugcgccuccuaccagacccagaccaacagcccccggcgggcccggagcguggccagccagagcaucaucgccuacaccaugagcuuaggcgccgagaacagcguggccuacagcaacaacagcaucgcgaucccuaccaacuucaccaucagcgugaccaccgagauacugcccgugagcaugaccaagaccagcguggacuguaccauguacaucugcggcgacagcaccgagugcagcaaccugcugcugcaguacggcagcuucugcacccagcugaaccgggcccugaccggcaucgccguggagcaggacaagaacacccaagagguguucgcccaggugaagcagaucuacaagacucccccaaucaaggacuucggcggcuucaacuucagccagauccugcccgaccccagcaagcccagcaagcggagcuucaucgaggaccugcuguucaacaaggugacccuggccgacgccggcuucaucaagcaguacggcgacugccugggggauaucgccgcucgggaccugaucugcgcccagaaguucaacggccugaccgugcugcccccucugcugaccgacgagaugaucgcccaguacaccagcgcccugcuugccggcaccaucaccagcggcuggaccuucggcgccggcgcagcccugcagauccccuucgccaugcagauggccuaccgguucaacggcaucggcgugacccagaacgugcuguacgagaaccagaagcugaucgccaaccaguucaacagcgccaucggcaagauccaggacagccugagcagcaccgccagcgcccugggcaagcugcaggacguggugaaccagaacgcucaggcccugaacacccuggugaagcagcugagcagcaauuucggcgccaucagcagcgugcugaacgacauccugucaaggcuggacaagguggaggccgaggugcagaucgaccggcugaucaccggccggcugcagagccugcagaccuacgugacccagcagcugauccgggccgccgagauccgggccagcgccaaccuggcagccaccaagaugagcgagugcgugcugggccagagcaagcggguggacuuuugcggcaagggcuaccaccugaugagcuucccccagagcgccccacacggcgugguguuccuccacgucacauacgugcccgcccaggagaagaacuucaccaccgcccccgccauuugccacgacggcaaggcucacuucccccgggagggaguguucgugagcaacggcacccacugguucgugacccagcggaacuucuacgagccccagaucaucaccaccgacaacaccuucgugagcggcaacugcgacguggugaucggcaucgugaacaacaccguguacgacccccugcagccugagcuggacagcuucaaggaggagcuggacaaguacuucaagaaccacaccagccccgacguggaucugggcgacaucagcggcaucaacgccagcguggugaacauccagaaggagaucgaccggcugaacgagguggccaagaaccugaacgagagccugaucgaccugcaggagcugggcaaguacgagcaguacaucaaguggcccugguacaucuggcugggcuucaucgccggccugaucgccaucgugauggugaccaucaugcugugcugcaugaccagcugcuguagcugccugaagggcugcugcagcugcggcagcugcugcaaguucgacgaggacgacagcgagccagugcugaagggcgugaagcugcacuacaccugaggacuaguuauaagacugacuagcccgaugggccucccaacgggcccuccuccccuccuugcaccgagagaucucaaaggcucuuuucagagccaccaaaaaaaaaaaaaaaaaaaaaaaaaaaaaaaaaaaaaaaaaaaaaaaaaaaaaaaaaaaaaaaaaaaaaaaaaaaaaaaaaaaaaaaaaaaaaaaaaaaaa

SEQ ID NO: 24568 - RNA, 4035 nt, Artificial Sequence
  SARS-CoV-2/Wuhan/WIV05/2019__EPI_ISL_402128 spike protein mRNA gc (1-1273)(N501Y_D614G)
aggagaaagcuuaccauguucguguuccuggugcugcugccccuggugagcagccagugcgugaaccugaccacccggacccagcugcccccugccuacaccaacagcuucacccggggcguguacuaccccgacaagguguuccggagcagcgugcugcacagcacccaggaccuguuccugcccuucuucagcaacgugaccugguuccacgccauccacgugagcggcaccaacggcaccaagcgguucgacaacccagugcugcccuucaacgacggcguguacuucgccagcaccgagaagucaaacaucauccggggcuggaucuucggcaccacccuggacagcaagacacagagccugcugaucgugaacaacgccaccaacguggugaucaaggugugcgaguuucaguucugcaacgaccccuuccugggcguguacuaccacaagaacaacaagagcuggauggagagcgaguuccgggucuacagcagcgcuaacaauugcaccuucgaguacgugagccagcccuuccugauggaccucgagggcaagcagggcaacuucaagaaccugcgggaguucguguucaagaacaucgauggcuacuucaagaucuacagcaagcacacccccaucaaccuggugcgggaccugccccagggauucagcgcccuggagccucugguggaccugcccaucggcaucaacaucaccagguuccagacccugcuggcccugcaccggagcuaccugacccccggcgacagcagcagcggcuggaccgccggcgccgccgcauacuacgugggcuaccugcagccacggaccuuccugcugaaguacaacgagaacggcaccaucaccgacgccguggacugcgcccuggacccccugagcgagaccaagugcacccuaaagagcuucaccguggagaagggcaucuaccagaccagcaacuuccgggugcagcccacugagagcaucgugcgguuccccaacauuaccaaccugugucccuucggcgagguguucaacgccacccgguucgccagcguguacgccuggaaccggaagcggaucagcaacugcguggccgacuacagcgugcuguacaacagcgccagcuucagcaccuucaagugcuacggcgugagcccuaccaagcugaacgaccugugcuucaccaacguguacgcugacagcuucgugauccggggcgacgaggugcggcagaucgcccccggccagaccggcaagaucgccgacuacaacuacaagcugcccgacgacuucaccggcugcgugaucgccuggaacagcaacaaccuggacagcaaggugggcggcaacuacaacuaccuguaccggcuguuccguaagagcaaccugaagccauucgagcgggacaucagcaccgagaucuaccaggccggcagcacccccugcaacgguguggagggcuuuaacugcuacuucccccugcagagcuacggcuuccagcccaccuacggcgugggcuaccagcccuaccgggugguggugcugagcuucgagcugcugcacgcccccgccaccgugugcggcccuaaaaagagcaccaaccuggugaagaacaagugcgugaacuucaacuucaauggccugaccggcaccggcgugcugaccgagagcaacaagaaguuccugcccuuccagcaguucggccgggauaucgccgacaccaccgacgcagugcgggacccccagacccuggagauccuggacaucaccccaugcagcuucggcggcgugagcgucaucacccccggcacaaacaccagcaaccagguggccgugcuguaccagggagugaacugcaccgaggugcccguggccauccacgccgaccagcugacccccaccuggcggguguacagcaccggcagcaacguguuccagacccgggccggcugccugaucggcgccgagcacgugaacaacuccuacgagugcgacauccccaucggcgcuggcaucugcgccagcuaccagacccagaccaacagcccccggcgggcccggagcguggccagccagagcaucaucgccuacaccaugagcuuaggcgccgagaacagcguggccuacagcaacaacagcaucgcgaucccuaccaacuucaccaucagcgugaccaccgagauacugcccgugagcaugaccaagaccagcguggacuguaccauguacaucugcggcgacagcaccgagugcagcaaccugcugcugcaguacggcagcuucugcacccagcugaaccgggcccugaccggcaucgccguggagcaggacaagaacacccaagagguguucgcccaggugaagcagaucuacaagacucccccaaucaaggacuucggcggcuucaacuucagccagauccugcccgaccccagcaagcccagcaagcggagcuucaucgaggaccugcuguucaacaaggugacccuggccgacgccggcuucaucaagcaguacggcgacugccugggggauaucgccgcucgggaccugaucugcgcccagaaguucaacggccugaccgugcugcccccucugcugaccgacgagaugaucgcccaguacaccagcgcccugcuugccggcaccaucaccagcggcuggaccuucggcgccggcgcagcccugcagauccccuucgccaugcagauggccuaccgguucaacggcaucggcgugacccagaacgugcuguacgagaaccagaagcugaucgccaaccaguucaacagcgccaucggcaagauccaggacagccugagcagcaccgccagcgcccugggcaagcugcaggacguggugaaccagaacgcucaggcccugaacacccuggugaagcagcugagcagcaacuucggcgccaucagcucagugcugaacgacauccugagcaggcuggacaagguggaggccgaggugcagaucgaccggcugaucaccggccggcugcagagccugcagaccuacgugacccagcagcugauccgggccgccgagauccgggccagcgccaaucuggcagccaccaagaugagcgagugcgugcugggccagagcaagcggguggacuuuugcggcaagggcuaccaccugaugagcuucccccagagcgccccacacggcgugguguuccuccacgucacauacgugcccgcccaggagaagaacuucaccaccgcccccgccauuugccacgacggcaaggcucacuucccccgggagggaguguucgugagcaacggcacccacugguucgugacccagcggaacuucuacgagccccagaucaucaccaccgacaacaccuucgugagcggcaacugcgacguggugaucggcaucgugaacaacaccguguacgacccccugcagccugagcuggacagcuucaaggaggagcuggacaaguacuucaagaaccacaccagccccgacguggaucugggcgacaucagcggcaucaacgccagcguggugaacauccagaaggagaucgaccggcugaacgagguggccaagaaccugaacgagagccugaucgaccugcaggagcugggcaaguacgagcaguacaucaaguggcccugguacaucuggcugggcuucaucgccggccugaucgccaucgugauggugaccaucaugcugugcugcaugaccagcugcuguagcugccugaagggcugcugcagcugcggcagcugcugcaaguucgacgaggacgacagcgagccagugcugaagggcgugaagcugcacuacaccugaggacuaguuauaagacugacuagcccgaugggccucccaacgggcccuccuccccuccuugcaccgagagaucucaaaggcucuuuucagagccaccaaaaaaaaaaaaaaaaaaaaaaaaaaaaaaaaaaaaaaaaaaaaaaaaaaaaaaaaaaaaaaaaaaaaaaaaaaaaaaaaaaaaaaaaaaaaaaaaaaaaa

SEQ ID NO: 24569 - RNA, 4029 nt, Artificial Sequence
  SARS-CoV-2/Wuhan/WIV05/2019__EPI_ISL_402128 spike protein mRNA gc (1-1273)(H69del_V70del_D614G)
aggagaaagcuuaccauguucguguuccuggugcugcugccccuggugagcagccagugcgugaaccugaccacccggacccagcugcccccugccuacaccaacagcuucacccggggcguguacuaccccgacaagguguuccggagcagcgugcugcacagcacccaggaccuguuccugcccuucuucagcaacgugaccugguuccacgccaucagcggcaccaacggcaccaagcgguucgacaacccagugcugcccuucaacgacggcguguacuucgccagcaccgagaagucaaacaucauccggggcuggaucuucggcaccacccuggacagcaagacacagagccugcugaucgugaacaacgccaccaacguggugaucaaggugugcgaguuucaguucugcaacgaccccuuccugggcguguacuaccacaagaacaacaagagcuggauggagagcgaguuccggguguacagcagcgcuaacaauugcaccuucgaguacgucagccagcccuuccugauggaccucgagggcaagcagggcaacuucaagaaccugcgggaguucguguucaagaacaucgauggcuacuucaagaucuacagcaagcacacccccaucaaccuggugcgggaccugccccagggauucagcgcccuggagccucugguggaccugcccaucggcaucaacaucaccagguuccagacccugcuggcccugcaccggagcuaccugacccccggcgacagcagcagcggcuggaccgccggcgccgccgcauacuacgugggcuaccugcagccacggaccuuccugcugaaguacaacgagaacggcaccaucaccgacgccguggacugcgcccuggacccccugagcgagaccaagugcacccuaaagagcuucaccguggagaagggcaucuaccagaccagcaacuuccgggugcagcccacugagagcaucgugcgguuccccaacauuaccaaccugugucccuucggcgagguguucaacgccacccgguucgccagcguguacgccuggaaccggaagcggaucagcaacugcguggccgacuacagcgugcuguacaacagcgccagcuucagcaccuucaagugcuacggcgugagcccuaccaagcugaacgaccugugcuucaccaacguguacgcugacagcuucgugauccggggcgacgaggugcggcagaucgcccccggccagaccggcaagaucgccgacuacaacuacaagcugcccgacgacuucaccggcugcgugaucgccuggaacagcaacaaccuggacagcaaggugggcggcaacuacaacuaccuguaccggcuguuccguaagagcaaccugaagccauucgagcgggacaucagcaccgagaucuaccaggccggcagcacccccugcaacgguguggagggcuuuaacugcuacuucccccugcagagcuacggcuuccagcccaccaacggcgugggcuaccagcccuaccgggugguggugcugagcuucgagcugcugcacgcccccgccaccgugugcggcccuaaaaagagcaccaaccuggugaagaacaagugcgugaacuucaauuucaacggccugaccggcaccggcgugcugaccgagagcaacaagaaguuccugcccuuccagcaguucggccgggauaucgccgacaccaccgacgcagugcgggacccccagacccuggagauccuggacaucaccccaugcagcuucggcggcgugagcgugaucacccccggcacaaacaccagcaaccaggucgccgugcuguaccagggagugaacugcaccgaggugcccguggccauccacgccgaccagcugacccccaccuggcggguguacagcaccggcagcaacguguuccagacccgggccggcugccugaucggcgccgagcacgugaacaacuccuacgagugcgacauccccaucggcgcuggcaucugcgccagcuaccagacccagaccaacagcccccggcgggcccggagcguggccagccagagcaucaucgccuacaccaugagcuuaggcgccgagaacagcguggccuacagcaacaacagcaucgcgaucccuaccaacuucaccaucagcgugaccaccgagauacugcccgugagcaugaccaagaccagcguggacuguaccauguacaucugcggcgacagcaccgagugcagcaaccugcugcugcaguacggcagcuucugcacccagcugaaccgggcccugaccggcaucgccguggagcaggacaagaacacccaagagguguucgcccaggugaagcagaucuacaagacucccccaaucaaggacuucggcggcuucaacuucagccagauccugcccgaccccagcaagcccagcaagcggagcuucaucgaggaccugcuguucaacaaggugacccuggccgacgccggcuucaucaagcaguacggcgacugccugggggauaucgccgcucgggaccugaucugcgcccagaaguucaacggccugaccgugcugcccccucugcugaccgacgagaugaucgcccaguacaccagcgcccugcuugccggcaccaucaccagcggcuggaccuucggcgccggcgcagcccugcagauccccuucgccaugcagauggccuaccgguucaacggcaucggcgugacccagaacgugcuguacgagaaccagaagcugaucgccaaccaguucaacagcgccaucggcaagauccaggacagccugagcagcaccgccagcgcccugggcaagcugcaggacguggugaaccagaacgcucaggcccugaacacccuggugaagcagcugagcagcaacuucggcgccaucagcucagugcugaaugacauccugagcaggcuggacaagguggaggccgaggugcagaucgaccggcugaucaccggccggcugcagagccugcagaccuacgugacccagcagcugauccgggccgccgagauccgggccagcgccaaccuggcagccaccaagaugagcgagugcgugcugggccagagcaagcggguggacuuuugcggcaagggcuaccaccugaugagcuucccccagagcgccccacacggcgugguguuccuccacgugacauacguccccgcccaggagaagaacuucaccaccgcccccgccauuugccacgacggcaaggcucacuucccccgggagggaguguucgugagcaacggcacccacugguucgugacccagcggaacuucuacgagccccagaucaucaccaccgacaacaccuucgugagcggcaacugcgacguggugaucggcaucgugaacaacaccguguacgacccccugcagccugagcuggacagcuucaaggaggagcuggacaaguacuucaagaaccacaccagccccgacguggaucugggcgacaucagcggcaucaacgccagcguggugaacauccagaaggagaucgaccggcugaacgagguggccaagaaccugaacgagagccugaucgaccugcaggagcugggcaaguacgagcaguacaucaaguggcccugguacaucuggcugggcuucaucgccggccugaucgccaucgugauggugaccaucaugcugugcugcaugaccagcugcuguagcugccugaagggcugcugcagcugcggcagcugcugcaaguucgacgaggacgacagcgagccagugcugaagggcgugaagcugcacuacaccugaggacuaguuauaagacugacuagcccgaugggccucccaacgggcccuccuccccuccuugcaccgagagaucucaaaggcucuuuucagagccaccaaaaaaaaaaaaaaaaaaaaaaaaaaaaaaaaaaaaaaaaaaaaaaaaaaaaaaaaaaaaaaaaaaaaaaaaaaaaaaaaaaaaaaaaaaaaaaaaaaaaa

SEQ ID NO: 24570 - RNA, 4035 nt, Artificial Sequence
  SARS-CoV-2/Wuhan/WIV05/2019__EPI_ISL_402128 spike protein mRNA gc (1-1273)(Y453F_D614G)
aggagaaagcuuaccauguucguguuccuggugcugcugccccuggugagcagccagugcgugaaccugaccacccggacccagcugcccccugccuacaccaacagcuucacccggggcguguacuaccccgacaagguguuccggagcagcgugcugcacagcacccaggaccuguuccugcccuucuucagcaacgugaccugguuccacgccauccacgugagcggcaccaacggcaccaagcgguucgacaacccagugcugcccuucaacgacggcguguacuucgccagcaccgagaagucaaacaucauccggggcuggaucuucggcaccacccuggacagcaagacacagagccugcugaucgugaacaacgccaccaacguggugaucaaggugugcgaguuucaguucugcaacgaccccuuccugggcguguacuaccacaagaacaacaagagcuggauggagagcgaguuccgggucuacagcagcgcuaacaauugcaccuucgaguacgugagccagcccuuccugauggaccucgagggcaagcagggcaacuucaagaaccugcgggaguucguguucaagaacaucgauggcuacuucaagaucuacagcaagcacacccccaucaaccuggugcgggaccugccccagggauucagcgcccuggagccucugguggaccugcccaucggcaucaacaucaccagguuccagacccugcuggcccugcaccggagcuaccugacccccggcgacagcagcagcggcuggaccgccggcgccgccgcauacuacgugggcuaccugcagccacggaccuuccugcugaaguacaacgagaacggcaccaucaccgacgccguggacugcgcccuggacccccugagcgagaccaagugcacccuaaagagcuucaccguggagaagggcaucuaccagaccagcaacuuccgggugcagcccacugagagcaucgugcgguuccccaacauuaccaaccugugucccuucggcgagguguucaacgccacccgguucgccagcguguacgccuggaaccggaagcggaucagcaacugcguggccgacuacagcgugcuguacaacagcgccagcuucagcaccuucaagugcuacggcgugagcccuaccaagcugaacgaccugugcuucaccaacguguacgcugacagcuucgugauccggggcgacgaggugcggcagaucgcccccggccagaccggcaagaucgccgacuacaacuacaagcugcccgacgacuucaccggcugcgugaucgccuggaacagcaacaaccuggacagcaaggugggcggcaacuacaacuaccuguuccggcuguuccguaagagcaaccugaagccauuugagcgggacaucagcaccgagaucuaccaggccggcagcacccccugcaacgguguggagggcuucaacugcuacuucccccugcagagcuacggcuuccagcccaccaacggcgugggcuaccagcccuaccgggugguggugcugagcuucgagcugcugcacgcccccgccaccgugugcggcccuaaaaagagcaccaaccuggugaagaacaagugcgugaacuucaauuucaacggccugaccggcaccggcgugcugaccgagagcaacaagaaguuccugcccuuccagcaguucggccgggauaucgccgacaccaccgacgcagugcgggacccccagacccuggagauccuggacaucaccccaugcagcuucggcggcgugagcgucaucacccccggcacaaacaccagcaaccagguggccgugcuguaccagggagugaacugcaccgaggugcccguggccauccacgccgaccagcugacccccaccuggcggguguacagcaccggcagcaacguguuccagacccgggccggcugccugaucggcgccgagcacgugaacaacuccuacgagugcgacauccccaucggcgcuggcaucugcgccagcuaccagacccagaccaacagcccccggcgggcccggagcguggccagccagagcaucaucgccuacaccaugagcuuaggcgccgagaacagcguggccuacagcaacaacagcaucgcgaucccuaccaacuucaccaucagcgugaccaccgagauacugcccgugagcaugaccaagaccagcguggacuguaccauguacaucugcggcgacagcaccgagugcagcaaccugcugcugcaguacggcagcuucugcacccagcugaaccgggcccugaccggcaucgccguggagcaggacaagaacacccaagagguguucgcccaggugaagcagaucuacaagacucccccaaucaaggacuucggcggcuucaacuucagccagauccugcccgaccccagcaagcccagcaagcggagcuucaucgaggaccugcuguucaacaaggugacccuggccgacgccggcuucaucaagcaguacggcgacugccugggggauaucgccgcucgggaccugaucugcgcccagaaguucaacggccugaccgugcugcccccucugcugaccgacgagaugaucgcccaguacaccagcgcccugcuugccggcaccaucaccagcggcuggaccuucggcgccggcgcagcccugcagauccccuucgccaugcagauggccuaccgguucaacggcaucggcgugacccagaacgugcuguacgagaaccagaagcugaucgccaaccaguucaacagcgccaucggcaagauccaggacagccugagcagcaccgccagcgcccugggcaagcugcaggacguggugaaccagaacgcucaggcccugaacacccuggugaagcagcugagcagcaacuuuggcgccaucagcucagugcugaaugacauccugagcaggcuggacaagguggaggccgaggugcagaucgaccggcugaucaccggccggcugcagagccugcagaccuacgugacccagcagcugauccgggccgccgagauccgggccagcgccaaccuggcagccaccaagaugagcgagugcgugcugggccagagcaagcggguggacuucugcggcaagggcuaccaccugaugagcuucccccagagcgccccacacggcgugguguuccuccacgucacauacgugcccgcccaggagaagaacuucaccaccgcccccgccauuugccacgacggcaaggcucacuucccccgggagggaguguucgugagcaacggcacccacugguucgugacccagcggaacuucuacgagccccagaucaucaccaccgacaacaccuucgugagcggcaacugcgacguggugaucggcaucgugaacaacaccguguacgacccccugcagccugagcuggacagcuucaaggaggagcuggacaaguacuucaagaaccacaccagccccgacguggaucugggcgacaucagcggcaucaacgccagcguggugaacauccagaaggagaucgaccggcugaacgagguggccaagaaccugaacgagagccugaucgaccugcaggagcugggcaaguacgagcaguacaucaaguggcccugguacaucuggcugggcuucaucgccggccugaucgccaucgugauggugaccaucaugcugugcugcaugaccagcugcuguagcugccugaagggcugcugcagcugcggcagcugcugcaaguucgacgaggacgacagcgagccagugcugaagggcgugaagcugcacuacaccugaggacuaguuauaagacugacuagcccgaugggccucccaacgggcccuccuccccuccuugcaccgagagaucucaaaggcucuuuucagagccaccaaaaaaaaaaaaaaaaaaaaaaaaaaaaaaaaaaaaaaaaaaaaaaaaaaaaaaaaaaaaaaaaaaaaaaaaaaaaaaaaaaaaaaaaaaaaaaaaaaaaa

SEQ ID NO: 24571 - RNA, 4035 nt, Artificial Sequence
  SARS-CoV-2/Wuhan/WIV05/2019__EPI_ISL_402128 spike protein mRNA gc (1-1273)(D614G_I692V)
aggagaaagcuuaccauguucguguuccuggugcugcugccccuggugagcagccagugcgugaaccugaccacccggacccagcugcccccugccuacaccaacagcuucacccggggcguguacuaccccgacaagguguuccggagcagcgugcugcacagcacccaggaccuguuccugcccuucuucagcaacgugaccugguuccacgccauccacgugagcggcaccaacggcaccaagcgguucgacaacccagugcugcccuucaacgacggcguguacuucgccagcaccgagaagucaaacaucauccggggcuggaucuucggcaccacccuggacagcaagacacagagccugcugaucgugaacaacgccaccaacguggugaucaaggugugcgaguuucaguucugcaacgaccccuuccugggcguguacuaccacaagaacaacaagagcuggauggagagcgaguuccgggucuacagcagcgcuaacaauugcaccuucgaguacgugagccagcccuuccugauggaccucgagggcaagcagggcaacuucaagaaccugcgggaguucguguucaagaacaucgauggcuacuucaagaucuacagcaagcacacccccaucaaccuggugcgggaccugccccagggauucagcgcccuggagccucugguggaccugcccaucggcaucaacaucaccagguuccagacccugcuggcccugcaccggagcuaccugacccccggcgacagcagcagcggcuggaccgccggcgccgccgcauacuacgugggcuaccugcagccacggaccuuccugcugaaguacaacgagaacggcaccaucaccgacgccguggacugcgcccuggacccccugagcgagaccaagugcacccuaaagagcuucaccguggagaagggcaucuaccagaccagcaacuuccgggugcagcccacugagagcaucgugcgguuccccaacauuaccaaccugugucccuucggcgagguguucaacgccacccgguucgccagcguguacgccuggaaccggaagcggaucagcaacugcguggccgacuacagcgugcuguacaacagcgccagcuucagcaccuucaagugcuacggcgugagcccuaccaagcugaacgaccugugcuucaccaacguguacgcugacagcuucgugauccggggcgacgaggugcggcagaucgcccccggccagaccggcaagaucgccgacuacaacuacaagcugcccgacgacuucaccggcugcgugaucgccuggaacagcaacaaccuggacagcaaggugggcggcaacuacaacuaccuguaccggcuguuccguaagagcaaccugaagccauucgagcgggacaucagcaccgagaucuaccaggccggcagcacccccugcaacgguguggagggcuuuaacugcuacuucccccugcagagcuacggcuuccagcccaccaacggcgugggcuaccagcccuaccgggugguggugcugagcuucgagcugcugcacgcccccgccaccgugugcggcccuaaaaagagcaccaaccuggugaagaacaagugcgugaacuucaauuucaacggccugaccggcaccggcgugcugaccgagagcaacaagaaguuccugcccuuccagcaguucggccgggauaucgccgacaccaccgacgcagugcgggacccccagacccuggagauccuggacaucaccccaugcagcuucggcggcgugagcgucaucacccccggcacaaacaccagcaaccagguggccgugcuguaccagggagugaacugcaccgaggugcccguggccauccacgccgaccagcugacccccaccuggcggguguacagcaccggcagcaacguguuccagacccgggccggcugccugaucggcgccgagcacgugaacaacuccuacgagugcgacauccccaucggcgcuggcaucugcgccagcuaccagacccagaccaacagcccccggcgggcccggagcguggccagccagagcgugaucgccuacaccaugagcuuaggcgccgagaacagcguggccuacagcaacaacagcaucgcgaucccuaccaacuucaccaucagcgugaccaccgagauccugcccgugagcaugaccaagaccagcguggacuguaccauguacauaugcggcgacagcaccgagugcagcaaccugcugcugcaguacggcagcuucugcacccagcugaaccgggcccugaccggcaucgccguggagcaggacaagaacacccaagagguguucgcccaggugaagcagaucuacaagacucccccaaucaaggacuucggcggcuucaacuucagccagauccugcccgaccccagcaagcccagcaagcggagcuucaucgaggaccugcuguucaacaaggugacccuggccgacgccggcuucaucaagcaguacggcgacugccugggggauaucgccgcucgggaccugaucugcgcccagaaguucaacggccugaccgugcugcccccucugcugaccgacgagaugaucgcccaguacaccagcgcccugcuugccggcaccaucaccagcggcuggaccuucggcgccggcgcagcccugcagauccccuucgccaugcagauggccuaccgguucaacggcaucggcgugacccagaacgugcuguacgagaaccagaagcugaucgccaaccaguucaacagcgccaucggcaagauccaggacagccugagcagcaccgccagcgcccugggcaagcugcaggacguggugaaccagaacgcucaggcccugaacacccuggugaagcagcugagcagcaacuucggcgccaucagcucagugcugaaugacauccugagcaggcuggacaagguggaggccgaggugcagaucgaccggcugaucaccggccggcugcagagccugcagaccuacgugacccagcagcugauccgggccgccgagauccgggccagcgccaaccuggcagccaccaagaugagcgagugcgugcugggccagagcaagcggguggacuuuugcggcaagggcuaccaccugaugagcuucccccagagcgccccacacggcguggucuuccuccacgugacauacgugcccgcccaggagaagaacuucaccaccgcccccgccaucugccacgacggcaaggcucacuucccccgggagggaguguucgugagcaacggcacccacugguucgugacccagcggaacuucuacgagccccagauuaucaccaccgacaacaccuucgugagcggcaacugcgacguggugaucggcaucgugaacaacaccguguacgacccccugcagccugagcuggacagcuucaaggaggagcuggacaaguacuucaagaaccacaccagccccgacguggaucugggcgacaucagcggcaucaacgccagcguggugaacauccagaaggagaucgaccggcugaacgagguggccaagaaccugaacgagagccugaucgaccugcaggagcugggcaaguacgagcaguacaucaaguggcccugguacaucuggcugggcuucaucgccggccugaucgccaucgugauggugaccaucaugcugugcugcaugaccagcugcuguagcugccugaagggcugcugcagcugcggcagcugcugcaaguucgacgaggacgacagcgagccagugcugaagggcgugaagcugcacuacaccugaggacuaguuauaagacugacuagcccgaugggccucccaacgggcccuccuccccuccuugcaccgagagaucucaaaggcucuuuucagagccaccaaaaaaaaaaaaaaaaaaaaaaaaaaaaaaaaaaaaaaaaaaaaaaaaaaaaaaaaaaaaaaaaaaaaaaaaaaaaaaaaaaaaaaaaaaaaaaaaaaaaa

SEQ ID NO: 24572 - RNA, 4035 nt, Artificial Sequence
  SARS-CoV-2/Wuhan/WIV05/2019__EPI_ISL_402128 spike protein mRNA gc (1-1273)(D614G_M1229I)
aggagaaagcuuaccauguucguguuccuggugcugcugccccuggugagcagccagugcgugaaccugaccacccggacccagcugcccccugccuacaccaacagcuucacccggggcguguacuaccccgacaagguguuccggagcagcgugcugcacagcacccaggaccuguuccugcccuucuucagcaacgugaccugguuccacgccauccacgugagcggcaccaacggcaccaagcgguucgacaacccagugcugcccuucaacgacggcguguacuucgccagcaccgagaagucaaacaucauccggggcuggaucuucggcaccacccuggacagcaagacacagagccugcugaucgugaacaacgccaccaacguggugaucaaggugugcgaguuucaguucugcaacgaccccuuccugggcguguacuaccacaagaacaacaagagcuggauggagagcgaguuccgggucuacagcagcgcuaacaauugcaccuucgaguacgugagccagcccuuccugauggaccucgagggcaagcagggcaacuucaagaaccugcgggaguucguguucaagaacaucgauggcuacuucaagaucuacagcaagcacacccccaucaaccuggugcgggaccugccccagggauucagcgcccuggagccucugguggaccugcccaucggcaucaacaucaccagguuccagacccugcuggcccugcaccggagcuaccugacccccggcgacagcagcagcggcuggaccgccggcgccgccgcauacuacgugggcuaccugcagccacggaccuuccugcugaaguacaacgagaacggcaccaucaccgacgccguggacugcgcccuggacccccugagcgagaccaagugcacccuaaagagcuucaccguggagaagggcaucuaccagaccagcaacuuccgggugcagcccacugagagcaucgugcgguuccccaacauuaccaaccugugucccuucggcgagguguucaacgccacccgguucgccagcguguacgccuggaaccggaagcggaucagcaacugcguggccgacuacagcgugcuguacaacagcgccagcuucagcaccuucaagugcuacggcgugagcccuaccaagcugaacgaccugugcuucaccaacguguacgcugacagcuucgugauccggggcgacgaggugcggcagaucgcccccggccagaccggcaagaucgccgacuacaacuacaagcugcccgacgacuucaccggcugcgugaucgccuggaacagcaacaaccuggacagcaaggugggcggcaacuacaacuaccuguaccggcuguuccguaagagcaaccugaagccauucgagcgggacaucagcaccgagaucuaccaggccggcagcacccccugcaacgguguggagggcuuuaacugcuacuucccccugcagagcuacggcuuccagcccaccaacggcgugggcuaccagcccuaccgggugguggugcugagcuucgagcugcugcacgcccccgccaccgugugcggcccuaaaaagagcaccaaccuggugaagaacaagugcgugaacuucaauuucaacggccugaccggcaccggcgugcugaccgagagcaacaagaaguuccugcccuuccagcaguucggccgggauaucgccgacaccaccgacgcagugcgggacccccagacccuggagauccuggacaucaccccaugcagcuucggcggcgugagcgucaucacccccggcacaaacaccagcaaccagguggccgugcuguaccagggagugaacugcaccgaggugcccguggccauccacgccgaccagcugacccccaccuggcggguguacagcaccggcagcaacguguuccagacccgggccggcugccugaucggcgccgagcacgugaacaacuccuacgagugcgacauccccaucggcgcuggcaucugcgccagcuaccagacccagaccaacagcccccggcgggcccggagcguggccagccagagcaucaucgccuacaccaugagcuuaggcgccgagaacagcguggccuacagcaacaacagcaucgcgaucccuaccaacuucaccaucagcgugaccaccgagauacugcccgugagcaugaccaagaccagcguggacuguaccauguacaucugcggcgacagcaccgagugcagcaaccugcugcugcaguacggcagcuucugcacccagcugaaccgggcccugaccggcaucgccguggagcaggacaagaacacccaagagguguucgcccaggugaagcagaucuacaagacucccccaaucaaggacuucggcggcuucaacuucagccagauccugcccgaccccagcaagcccagcaagcggagcuucaucgaggaccugcuguucaacaaggugacccuggccgacgccggcuucaucaagcaguacggcgacugccugggggauaucgccgcucgggaccugaucugcgcccagaaguucaacggccugaccgugcugcccccucugcugaccgacgagaugaucgcccaguacaccagcgcccugcuugccggcaccaucaccagcggcuggaccuucggcgccggcgcagcccugcagauccccuucgccaugcagauggccuaccgguucaacggcaucggcgugacccagaacgugcuguacgagaaccagaagcugaucgccaaccaguucaacagcgccaucggcaagauccaggacagccugagcagcaccgccagcgcccugggcaagcugcaggacguggugaaccagaacgcucaggcccugaacacccuggugaagcagcugagcagcaacuucggcgccaucagcucagugcugaaugacauccugagcaggcuggacaagguggaggccgaggugcagaucgaccggcugaucaccggccggcugcagagccugcagaccuacgugacccagcagcugauccgggccgccgagauccgggccagcgccaaccuggcagccaccaagaugagcgagugcgugcugggccagagcaagcggguggacuuuugcggcaagggcuaccaccugaugagcuucccccagagcgccccacacggcgugguguuccuccacgucacauacgugcccgcccaggagaagaacuucaccaccgcccccgccauuugccacgacggcaaggcucacuucccccgggagggaguguucgugagcaacggcacccacugguucgugacccagcggaacuucuacgagccccagaucaucaccaccgacaacaccuucgugagcggcaacugcgacguggugaucggcaucgugaacaacaccguguacgacccccugcagccugagcuggacagcuucaaggaggagcuggacaaguacuucaagaaccacaccagccccgacguggaucugggcgacaucagcggcaucaacgccagcguggugaacauccagaaggagaucgaccggcugaacgagguggccaagaaccugaacgagagccugaucgaccugcaggagcugggcaaguacgagcaguacaucaaguggcccugguacaucuggcugggcuucaucgccggccugaucgccaucgugaucgugaccaucaugcugugcugcaugaccagcugcuguagcugccugaagggcugcugcagcugcggcagcugcugcaaguucgacgaggacgacagcgagccagugcugaagggcgugaagcugcacuacaccugaggacuaguuauaagacugacuagcccgaugggccucccaacgggcccuccuccccuccuugcaccgagagaucucaaaggcucuuuucagagccaccaaaaaaaaaaaaaaaaaaaaaaaaaaaaaaaaaaaaaaaaaaaaaaaaaaaaaaaaaaaaaaaaaaaaaaaaaaaaaaaaaaaaaaaaaaaaaaaaaaaaa

SEQ ID NO: 24573 - RNA, 4029 nt, Artificial Sequence
  SARS-CoV-2/Wuhan/WIV05/2019__EPI_ISL_402128 spike protein mRNA gc (1-1273)(H69del_V70del_A222V_Y453F_S477N_D614G_I692V)
aggagaaagcuuaccauguucguguuccuggugcugcugccccuggugagcagccagugcgugaaccugaccacccggacccagcugcccccugccuacaccaacagcuucacccggggcguguacuaccccgacaagguguuccggagcagcgugcugcacagcacccaggaccuguuccugcccuucuucagcaacgugaccugguuccacgccaucagcggcaccaacggcaccaagcgguucgacaacccagugcugcccuucaacgacggcguguacuucgccagcaccgagaagucaaacaucauccggggcuggaucuucggcaccacccuggacagcaagacacagagccugcugaucgugaacaacgccaccaacguggugaucaaggugugcgaguuucaguucugcaacgaccccuuccugggcguguacuaccacaagaacaacaagagcuggauggagagcgaguuccggguguacagcagcgcuaacaauugcaccuucgaguacgucagccagcccuuccugauggaccucgagggcaagcagggcaacuucaagaaccugcgggaguucguguucaagaacaucgauggcuacuucaagaucuacagcaagcacacccccaucaaccuggugcgggaccugccccagggauucagcgugcuggagccucugguggaccugcccaucggcaucaacaucaccagguuccagacccugcuggcccugcaccggagcuaccugacccccggcgacagcagcagcggcuggaccgccggcgccgccgccuacuacgugggcuaccugcagccacggaccuuccugcugaaguacaacgagaacggcaccaucaccgacgcaguggacugcgcccuggacccccugagcgagaccaagugcacccuaaagagcuucaccguggagaagggcaucuaccagaccagcaacuuccgggugcagcccacugagagcaucgugcgguuccccaacauuaccaaccugugucccuucggcgagguguucaacgccacccgguucgccagcguguacgccuggaaccggaagcggaucagcaacugcguggccgacuacagcgugcuguacaacagcgccagcuucagcaccuucaagugcuacggcgugagcccuaccaagcugaacgaccugugcuucaccaacguguacgccgacagcuucgugauccggggcgacgaggugcggcagaucgcucccggccagaccggcaagaucgccgacuacaacuacaagcugcccgacgacuucaccggcugcgugaucgccuggaacagcaacaaccuggacagcaaggugggcggcaacuacaacuaccuguuccggcuguuccguaagagcaaccugaagccauuugagcgggacaucagcaccgagaucuaccaggccggcaacacccccugcaacgguguggagggcuucaacugcuacuucccccugcagagcuacggcuuccagcccaccaacggcgugggcuaccagcccuaccgggugguggugcugagcuucgagcugcugcacgcccccgccaccgugugcggcccuaaaaagagcaccaaccuggugaagaacaagugcgugaauuucaacuucaacggccugaccggcaccggcgugcugaccgagagcaacaagaaguuccugcccuuccagcaguucggccgggauaucgccgacaccaccgacgccgugcgggacccccagacccuggagauccuggacaucaccccaugcagcuucggcggcgugagcgucaucacccccggcacaaacaccagcaaccagguggcagugcuguaccagggagugaacugcaccgaggugcccguggccauccacgccgaccagcugacccccaccuggcggguguacagcaccggcagcaacguguuccagacccgggccggcugccugaucggcgccgagcacgugaacaacagcuacgagugcgacauccccaucggcgccggcaucugcgcuuccuaccagacccagaccaacagcccccggcgggcccggagcguggccagccagagcgugaucgccuacaccaugagcuuaggcgccgagaacagcguggccuacagcaacaacagcaucgccaucccuaccaacuucaccaucagcgugaccaccgagauccugcccgugagcaugaccaagaccagcguggacuguaccauguacauaugcggcgacagcaccgagugcagcaaccugcugcugcaguacggcagcuucugcacccagcugaaccgggcgcugaccggcaucgccguggagcaggacaagaacacccaagagguguucgcccaggugaagcagaucuacaagacucccccaaucaaggacuucggcggcuucaacuucagccagauccugcccgaccccagcaagcccagcaagcggagcuucaucgaggaccugcuguucaacaaggugacccuggccgacgccggcuucaucaagcaguacggcgacugccugggggauaucgccgcccgggaccugaucugcgcucagaaguucaacggccugaccgugcugcccccucugcugaccgacgagaugaucgcccaguacaccagcgcccugcuugccggcaccaucaccagcggcuggaccuucggcgccggcgccgcacugcagauccccuucgccaugcagauggccuaccgguucaacggcaucggcgugacccagaacgugcuguacgagaaccagaagcugaucgccaaccaguucaacagcgccaucggcaagauccaggacagccugagcagcaccgccagcgcccugggcaagcugcaggacguggugaaccagaacgcccaggcucugaacacccuggugaagcagcugagcagcaauuuuggcgccaucagcagcgugcugaacgacauccugucaaggcuggacaagguggaggccgaggugcagaucgaccggcugaucaccggccggcugcagagccugcagaccuacgugacccagcagcugauccgggccgccgagauccgggccagcgccaaccuggccgcaaccaagaugagcgagugcgugcugggccagagcaagcggguggacuucugcggcaagggcuaccaccugaugagcuucccccagagcgccccacacggcguggucuuccuccacgugacauacgugcccgcccaggagaagaacuucaccaccgcccccgccaucugccacgacggcaaggcccacuucccccgggagggaguguucgugagcaacggcacccacugguucgugacccagcggaacuucuacgagccccagauuaucaccaccgacaacaccuucgugagcggcaacugcgacguggugaucggcaucgugaacaacaccguguacgacccccugcagccugagcuggacagcuucaaggaggagcuggacaaguacuucaagaaccacaccagccccgacguggaucugggcgacaucagcggcaucaacgcuagcguggugaacauccagaaggagaucgaccggcugaacgagguggccaagaaccugaacgagagccugaucgaccugcaggagcugggcaaguacgagcaguacaucaaguggcccugguacaucuggcugggcuucaucgccggccugaucgccaucgugauggugaccaucaugcugugcugcaugaccagcugcuguagcugccugaagggcugcugcagcugcggcagcugcugcaaguucgacgaggacgacagcgagccagugcugaagggcgugaagcugcacuacaccugaggacuaguuauaagacugacuagcccgaugggccucccaacgggcccuccuccccuccuugcaccgagagaucucaaaggcucuuuucagagccaccaaaaaaaaaaaaaaaaaaaaaaaaaaaaaaaaaaaaaaaaaaaaaaaaaaaaaaaaaaaaaaaaaaaaaaaaaaaaaaaaaaaaaaaaaaaaaaaaaaaaa

SEQ ID NO: 24574 - RNA, 4029 nt, Artificial Sequence
  SARS-CoV-2/Wuhan/WIV05/2019__EPI_ISL_402128 spike protein mRNA gc (1-1273)(H69del_V70del_Y453F_D614G_I692V_M1229I)
aggagaaagcuuaccauguucguguuccuggugcugcugccccuggugagcagccagugcgugaaccugaccacccggacccagcugcccccugccuacaccaacagcuucacccggggcguguacuaccccgacaagguguuccggagcagcgugcugcacagcacccaggaccuguuccugcccuucuucagcaacgugaccugguuccacgccaucagcggcaccaacggcaccaagcgguucgacaacccagugcugcccuucaacgacggcguguacuucgccagcaccgagaagucaaacaucauccggggcuggaucuucggcaccacccuggacagcaagacacagagccugcugaucgugaacaacgccaccaacguggugaucaaggugugcgaguuucaguucugcaacgaccccuuccugggcguguacuaccacaagaacaacaagagcuggauggagagcgaguuccggguguacagcagcgcuaacaauugcaccuucgaguacgucagccagcccuuccugauggaccucgagggcaagcagggcaacuucaagaaccugcgggaguucguguucaagaacaucgauggcuacuucaagaucuacagcaagcacacccccaucaaccuggugcgggaccugccccagggauucagcgcccuggagccucugguggaccugcccaucggcaucaacaucaccagguuccagacccugcuggcccugcaccggagcuaccugacccccggcgacagcagcagcggcuggaccgccggcgccgccgcauacuacgugggcuaccugcagccacggaccuuccugcugaaguacaacgagaacggcaccaucaccgacgccguggacugcgcccuggacccccugagcgagaccaagugcacccuaaagagcuucaccguggagaagggcaucuaccagaccagcaacuuccgggugcagcccacugagagcaucgugcgguuccccaacauuaccaaccugugucccuucggcgagguguucaacgccacccgguucgccagcguguacgccuggaaccggaagcggaucagcaacugcguggccgacuacagcgugcuguacaacagcgccagcuucagcaccuucaagugcuacggcgugagcccuaccaagcugaacgaccugugcuucaccaacguguacgcugacagcuucgugauccggggcgacgaggugcggcagaucgcccccggccagaccggcaagaucgccgacuacaacuacaagcugcccgacgacuucaccggcugcgugaucgccuggaacagcaacaaccuggacagcaaggugggcggcaacuacaacuaccuguuccggcuguuccguaagagcaaccugaagccauuugagcgggacaucagcaccgagaucuaccaggccggcagcacccccugcaacgguguggagggcuucaacugcuacuucccccugcagagcuacggcuuccagcccaccaacggcgugggcuaccagcccuaccgggugguggugcugagcuucgagcugcugcacgcccccgccaccgugugcggcccuaaaaagagcaccaaccuggugaagaacaagugcgugaacuucaauuucaacggccugaccggcaccggcgugcugaccgagagcaacaagaaguuccugcccuuccagcaguucggccgggauaucgccgacaccaccgacgcagugcgggacccccagacccuggagauccuggacaucaccccaugcagcuucggcggcgugagcgugaucacccccggcacaaacaccagcaaccaggucgccgugcuguaccagggagugaacugcaccgaggugcccguggccauccacgccgaccagcugacccccaccuggcggguguacagcaccggcagcaacguguuccagacccgggccggcugccugaucggcgccgagcacgugaacaacuccuacgagugcgacauccccaucggcgcuggcaucugcgccagcuaccagacccagaccaacagcccccggcgggcccggagcguggccagccagagcgugaucgccuacaccaugagcuuaggcgccgagaacagcguggccuacagcaacaacagcaucgcgaucccuaccaacuucaccaucagcgugaccaccgagauccugcccgugagcaugaccaagaccagcguggacuguaccauguacauaugcggcgacagcaccgagugcagcaaccugcugcugcaguacggcagcuucugcacccagcugaaccgggcccugaccggcaucgccguggagcaggacaagaacacccaagagguguucgcccaggugaagcagaucuacaagacucccccaaucaaggacuucggcggcuucaacuucagccagauccugcccgaccccagcaagcccagcaagcggagcuucaucgaggaccugcuguucaacaaggugacccuggccgacgccggcuucaucaagcaguacggcgacugccugggggauaucgccgcucgggaccugaucugcgcccagaaguucaacggccugaccgugcugcccccucugcugaccgacgagaugaucgcccaguacaccagcgcccugcuugccggcaccaucaccagcggcuggaccuucggcgccggcgcagcccugcagauccccuucgccaugcagauggccuaccgguucaacggcaucggcgugacccagaacgugcuguacgagaaccagaagcugaucgccaaccaguucaacagcgccaucggcaagauccaggacagccugagcagcaccgccagcgcccugggcaagcugcaggacguggugaaccagaacgcucaggcccugaacacccuggugaagcagcugagcagcaacuuuggcgccaucagcucagugcugaaugacauccugagcaggcuggacaagguggaggccgaggugcagaucgaccggcugaucaccggccggcugcagagccugcagaccuacgugacccagcagcugauccgggccgccgagauccgggccagcgccaaccuggcagccaccaagaugagcgagugcgugcugggccagagcaagcggguggacuucugcggcaagggcuaccaccugaugagcuucccccagagcgccccacacggcgugguguuccuccacgucacauacgugcccgcccaggagaagaacuucaccaccgcccccgccaucugccacgacggcaaggcucacuucccccgggagggaguguucgugagcaacggcacccacugguucgugacccagcggaacuucuacgagccccagauuaucaccaccgacaacaccuucgugagcggcaacugcgacguggugaucggcaucgugaacaacaccguguacgacccccugcagccugagcuggacagcuucaaggaggagcuggacaaguacuucaagaaccacaccagccccgacguggaucugggcgacaucagcggcaucaacgccagcguggugaacauccagaaggagaucgaccggcugaacgagguggccaagaaccugaacgagagccugaucgaccugcaggagcugggcaaguacgagcaguacaucaaguggcccugguacaucuggcugggcuucaucgccggccugaucgccaucgugaucgugaccaucaugcugugcugcaugaccagcugcuguagcugccugaagggcugcugcagcugcggcagcugcugcaaguucgacgaggacgacagcgagccagugcugaagggcgugaagcugcacuacaccugaggacuaguuauaagacugacuagcccgaugggccucccaacgggcccuccuccccuccuugcaccgagagaucucaaaggcucuuuucagagccaccaaaaaaaaaaaaaaaaaaaaaaaaaaaaaaaaaaaaaaaaaaaaaaaaaaaaaaaaaaaaaaaaaaaaaaaaaaaaaaaaaaaaaaaaaaaaaaaaaaaaa

SEQ ID NO: 24575 - RNA, 4026 nt, Artificial Sequence
  SARS-CoV-2/Wuhan/WIV05/2019__EPI_ISL_402128 spike protein mRNA gc (1-1273)(H69del_V70del_Y144del_N501Y_A570D_D614G_P681H_T716I_S982 A_D1118H)
aggagaaagcuuaccauguucguguuccuggugcugcugccccuggugagcagccagugcgugaaccugaccacccggacccagcugcccccugccuacaccaacagcuucacccggggcguguacuaccccgacaagguguuccggagcagcgugcugcacagcacccaggaccuguuccugcccuucuucagcaacgugaccugguuccacgccaucagcggcaccaacggcaccaagcgguucgacaacccagugcugcccuucaacgacggcguguacuucgccagcaccgagaagucaaacaucauccggggcuggaucuucggcaccacccuggacagcaagacacagagccugcugaucgugaacaacgccaccaacguggugaucaaggugugcgaguuucaguucugcaacgaccccuuccugggcguguaccacaagaacaacaagagcuggauggagagcgaguuccggguguacagcagcgcuaacaauugcaccuucgaguacgucagccagcccuuccugauggaccucgagggcaagcagggcaacuucaagaaccugcgggaguucguguucaagaacaucgauggcuacuucaagaucuacagcaagcacacccccaucaaccuggugcgggaccugccccagggauucagcgcccuggagccucugguggaccugcccaucggcaucaacaucaccagguuccagacccugcuggcccugcaccggagcuaccugacccccggcgacagcagcagcggcuggaccgccggcgccgccgcauacuacgugggcuaccugcagccacggaccuuccugcugaaguacaacgagaacggcaccaucaccgacgccguggacugcgcccuggacccccugagcgagaccaagugcacccuaaagagcuucaccguggagaagggcaucuaccagaccagcaacuuccgggugcagcccacugagagcaucgugcgguuccccaacauuaccaaccugugucccuucggcgagguguucaacgccacccgguucgccagcguguacgccuggaaccggaagcggaucagcaacugcguggccgacuacagcgugcuguacaacagcgccagcuucagcaccuucaagugcuacggcgugagcccuaccaagcugaacgaccugugcuucaccaacguguacgcugacagcuucgugauccggggcgacgaggugcggcagaucgcccccggccagaccggcaagaucgccgacuacaacuacaagcugcccgacgacuucaccggcugcgugaucgccuggaacagcaacaaccuggacagcaaggugggcggcaacuacaacuaccuguaccggcuguuccguaagagcaaccugaagccauucgagcgggacaucagcaccgagaucuaccaggccggcagcacccccugcaacgguguggagggcuuuaacugcuacuucccccugcagagcuacggcuuccagcccaccuacggcgugggcuaccagcccuaccgggugguggugcugagcuucgagcugcugcacgcccccgccaccgugugcggcccuaaaaagagcaccaaccuggugaagaacaagugcgugaacuucaacuucaauggccugaccggcaccggcgugcugaccgagagcaacaagaaguuccugcccuuccagcaguucggccgggauaucgacgacaccaccgacgccgugcgggacccccagacccuggagauccuggacaucaccccaugcagcuucggcggcgugagcgugaucacccccggcacaaacaccagcaaccaggucgcagugcuguaccagggagugaacugcaccgaggugcccguggccauccacgccgaccagcugacccccaccuggcggguguacagcaccggcagcaacguguuccagacccgggccggcugccugaucggcgccgagcacgugaacaacuccuacgagugcgacauccccaucggcgccggcaucugcgcuagcuaccagacccagaccaacagccaccggcgggcccggagcguggccagccagagcaucaucgccuacaccaugagcuuaggcgccgagaacagcguggccuacagcaacaacagcaucgccauccccaucaacuucaccauaagcgugaccaccgagauccugccugugagcaugaccaagaccagcguggacuguaccauguacaucugcggcgacagcaccgagugcagcaaccugcugcugcaguacggcagcuucugcacccagcugaaccgggcgcugaccggcaucgccguggagcaggacaagaacacccaagagguguucgcccaggugaagcagaucuacaagaccccacccaucaaggacuucggcggcuucaacuucagccagauccugcccgaccccagcaagcccagcaagcggagcuucaucgaggaccugcuguucaacaaggugacucuggccgacgccggcuucaucaagcaguacggcgauugccugggggacaucgccgcccgggaccugaucugcgcucagaaguucaacggccugaccgugcugccuccccugcugaccgacgagaugaucgcccaguacaccagcgcccugcuugccggcaccaucaccagcggcuggaccuucggcgccggcgccgcacugcagauccccuucgccaugcagauggccuaccgguucaacggcaucggcgugacccagaacgugcuguacgagaaccagaagcugaucgccaaccaguucaacagcgccaucggcaagauccaggacagccugagcagcaccgccagcgcccugggcaagcugcaggacguggugaaccagaacgcccaggcucugaacacccuggugaagcagcugagcagcaacuucggcgccaucagcucagugcugaacgacauccuggccaggcuggacaagguggaggccgaggugcagaucgaccggcugaucaccggccggcugcagagccugcagaccuacgugacccagcagcugauccgggccgccgagauucgggccagcgccaaucuggcagccaccaagaugagcgagugcgugcugggccagagcaagcggguggacuuuugcggcaagggcuaccaccugaugagcuucccccagagcgcuccccacggcgugguguuccuccacgugaccuacgucccagcccaggagaagaacuucacaaccgcccccgccaucugccacgacggcaaggcccacuucccccgggagggaguguucgugagcaacggcacccacugguucgugacccagcggaacuucuacgagccccagaucaucaccacccacaacaccuucgugagcggcaacugcgacguggugaucggcaucgugaacaacaccguguacgacccccugcagcccgagcuggacagcuucaaggaggagcuggacaaguacuucaagaaccacaccagcccugacguggaucugggcgacaucagcggcaucaacgccagcguggugaacauccagaaggagaucgaccggcugaacgagguggccaagaaccugaacgagagccugaucgaccugcaggagcugggcaaguacgagcaguacaucaaguggcccugguacaucuggcugggcuucaucgccggccugaucgccaucgugauggugaccaucaugcugugcugcaugaccagcugcuguagcugccugaagggcugcugcagcugcggcagcugcugcaaguucgacgaggacgacagcgagcccgugcugaagggcgugaagcugcacuacaccugaggacuaguuauaagacugacuagcccgaugggccucccaacgggcccuccuccccuccuugcaccgagagaucucaaaggcucuuuucagagccaccaaaaaaaaaaaaaaaaaaaaaaaaaaaaaaaaaaaaaaaaaaaaaaaaaaaaaaaaaaaaaaaaaaaaaaaaaaaaaaaaaaaaaaaaaaaaaaaaaaaaa

SEQ ID NO: 24576 - RNA, 4035 nt, Artificial Sequence
  SARS-CoV-2/Wuhan/WIV05/2019__EPI_ISL_402128 spike protein mRNA gc (1-1273)(K417N_E484K_N501Y_D614G)
aggagaaagcuuaccauguucguguuccuggugcugcugccccuggugagcagccagugcgugaaccugaccacccggacccagcugcccccugccuacaccaacagcuucacccggggcguguacuaccccgacaagguguuccggagcagcgugcugcacagcacccaggaccuguuccugcccuucuucagcaacgugaccugguuccacgccauccacgugagcggcaccaacggcaccaagcgguucgacaacccagugcugcccuucaacgacggcguguacuucgccagcaccgagaagucaaacaucauccggggcuggaucuucggcaccacccuggacagcaagacacagagccugcugaucgugaacaacgccaccaacguggugaucaaggugugcgaguuucaguucugcaacgaccccuuccugggcguguacuaccacaagaacaacaagagcuggauggagagcgaguuccgggucuacagcagcgcuaacaauugcaccuucgaguacgugagccagcccuuccugauggaccucgagggcaagcagggcaacuucaagaaccugcgggaguucguguucaagaacaucgauggcuacuucaagaucuacagcaagcacacccccaucaaccuggugcgggaccugccccagggauucagcgcccuggagccucugguggaccugcccaucggcaucaacaucaccagguuccagacccugcuggcccugcaccggagcuaccugacccccggcgacagcagcagcggcuggaccgccggcgccgccgcauacuacgugggcuaccugcagccacggaccuuccugcugaaguacaacgagaacggcaccaucaccgacgccguggacugcgcccuggacccccugagcgagaccaagugcacccuaaagagcuucaccguggagaagggcaucuaccagaccagcaacuuccgggugcagcccacugagagcaucgugcgguuccccaacauuaccaaccugugucccuucggcgagguguucaacgccacccgguucgccagcguguacgccuggaaccggaagcggaucagcaacugcguggccgacuacagcgugcuguacaacagcgccagcuucagcaccuucaagugcuacggcgugagcccuaccaagcugaacgaccugugcuucaccaacguguacgcugacagcuucgugauccggggcgacgaggugcggcagaucgcccccggccagaccggcaacaucgccgacuacaacuacaagcugcccgacgacuucaccggcugcgugaucgccuggaacagcaacaaccuggacagcaaggugggcggcaacuacaacuaccuguaccggcuguuccguaagagcaaccugaagccauucgagcgggacaucagcaccgagaucuaccaggccggcagcacccccugcaacggugugaagggcuuuaacugcuacuucccccugcagagcuacggcuuccagcccaccuacggcgugggcuaccagcccuaccgggugguggugcugagcuucgagcugcugcacgcccccgccaccgugugcggcccuaaaaagagcaccaaccuggugaagaacaagugcgugaacuucaauuucaacggccugaccggcaccggcgugcugaccgagagcaacaagaaguuccugcccuuccagcaguucggccgggauaucgccgacaccaccgacgcagugcgggacccccagacccuggagauccuggacaucaccccaugcagcuucggcggcgugagcgucaucacccccggcacaaacaccagcaaccagguggccgugcuguaccagggagugaacugcaccgaggugcccguggccauccacgccgaccagcugacccccaccuggcggguguacagcaccggcagcaacguguuccagacccgggccggcugccugaucggcgccgagcacgugaacaacuccuacgagugcgacauccccaucggcgcuggcaucugcgccagcuaccagacccagaccaacagcccccggcgggcccggagcguggccagccagagcaucaucgccuacaccaugagcuuaggcgccgagaacagcguggccuacagcaacaacagcaucgcgaucccuaccaacuucaccaucagcgugaccaccgagauacugcccgugagcaugaccaagaccagcguggacuguaccauguacaucugcggcgacagcaccgagugcagcaaccugcugcugcaguacggcagcuucugcacccagcugaaccgggcccugaccggcaucgccguggagcaggacaagaacacccaagagguguucgcccaggugaagcagaucuacaagacucccccaaucaaggacuucggcggcuucaacuucagccagauccugcccgaccccagcaagcccagcaagcggagcuucaucgaggaccugcuguucaacaaggugacccuggccgacgccggcuucaucaagcaguacggcgacugccugggggauaucgccgcucgggaccugaucugcgcccagaaguucaacggccugaccgugcugcccccucugcugaccgacgagaugaucgcccaguacaccagcgcccugcuugccggcaccaucaccagcggcuggaccuucggcgccggcgcagcccugcagauccccuucgccaugcagauggccuaccgguucaacggcaucggcgugacccagaacgugcuguacgagaaccagaagcugaucgccaaccaguucaacagcgccaucggcaagauccaggacagccugagcagcaccgccagcgcccugggcaagcugcaggacguggugaaccagaacgcucaggcccugaacacccuggugaagcagcugagcagcaacuucggcgccaucagcucagugcugaaugacauccugagcaggcuggacaagguggaggccgaggugcagaucgaccggcugaucaccggccggcugcagagccugcagaccuacgugacccagcagcugauccgggccgccgagauccgggccagcgccaaccuggcagccaccaagaugagcgagugcgugcugggccagagcaagcggguggacuuuugcggcaagggcuaccaccugaugagcuucccccagagcgccccacacggcgugguguuccuccacgucacauacgugcccgcccaggagaagaacuucaccaccgcccccgccauuugccacgacggcaaggcucacuucccccgggagggaguguucgugagcaacggcacccacugguucgugacccagcggaacuucuacgagccccagaucaucaccaccgacaacaccuucgugagcggcaacugcgacguggugaucggcaucgugaacaacaccguguacgacccccugcagccugagcuggacagcuucaaggaggagcuggacaaguacuucaagaaccacaccagccccgacguggaucugggcgacaucagcggcaucaacgccagcguggugaacauccagaaggagaucgaccggcugaacgagguggccaagaaccugaacgagagccugaucgaccugcaggagcugggcaaguacgagcaguacaucaaguggcccugguacaucuggcugggcuucaucgccggccugaucgccaucgugauggugaccaucaugcugugcugcaugaccagcugcuguagcugccugaagggcugcugcagcugcggcagcugcugcaaguucgacgaggacgacagcgagccagugcugaagggcgugaagcugcacuacaccugaggacuaguuauaagacugacuagcccgaugggccucccaacgggcccuccuccccuccuugcaccgagagaucucaaaggcucuuuucagagccaccaaaaaaaaaaaaaaaaaaaaaaaaaaaaaaaaaaaaaaaaaaaaaaaaaaaaaaaaaaaaaaaaaaaaaaaaaaaaaaaaaaaaaaaaaaaaaaaaaaaaa

SEQ ID NO: 24577 - RNA, 4026 nt, Artificial Sequence
  SARS-CoV-2/Wuhan/WIV05/2019__EPI_ISL_402128 spike protein mRNA gc (1-1273)(L18F_D80A_D215G_L242del_A243del_L244del_R246I_K417N_E484 K_N501Y_D614G_A701V)
aggagaaagcuuaccauguucguguuccuggugcugcugccccuggugagcagccagugcgugaacuucaccacccggacccagcugcccccugccuacaccaacagcuucacccggggcguguacuaccccgacaagguguuccggagcagcgugcugcacagcacccaggaccuguuccugcccuucuucagcaacgugaccugguuccacgccauccacgugagcggcaccaacggcaccaagcgguucgccaacccagugcugcccuucaacgacggcguguacuucgccagcaccgagaagucaaacaucauccggggcuggaucuuuggcaccacccuggacagcaagacacagagccugcugaucgugaacaacgcuaccaacguggugaucaaggugugcgaguuccaguucugcaacgaccccuuccugggcguguacuaccacaagaacaacaagagcuggauggagagcgaguuccgggucuacagcagcgccaacaauugcaccuucgaguacgugagccagcccuuccugauggaccuggagggcaagcagggcaacuucaagaaccuccgggaguucguguucaagaacaucgacggcuacuucaagaucuacagcaagcacacccccaucaaccuggugcggggacugccccagggcuucagcgcccuggagccucugguggaucugcccaucggcaucaacaucaccagguuccagacccugcacaucagcuaccugacccccggcgacagcagcagcggcuggaccgccggcgccgccgcauacuacgugggcuaccugcagccacggaccuuccugcugaaguacaacgagaacggcaccaucaccgacgccguggacugcgcccuggacccccugagcgagaccaagugcacccuuaagagcuucaccguggagaagggcaucuaccagaccagcaacuuccgggugcagcccacugagagcauugugcgguuccccaacaucaccaaccugugucccuucggcgagguguucaacgccacccgguucgccagcguguacgccuggaaccggaagcggaucagcaacugcguggccgacuacagcgugcuguacaacagcgccagcuucagcaccuucaagugcuacggcgugagcccuaccaagcugaacgaccugugcuucaccaacguguacgcugacagcuucgugauccggggcgacgaggugcggcagaucgcccccggccagaccggcaacaucgccgacuacaacuacaagcugcccgacgacuucaccggcugcgugaucgccuggaacagcaacaaccuggacagcaaggugggcggcaacuacaacuaccuguaccggcuauuccguaagagcaaccugaagccauuugagcgggacaucagcaccgagaucuaccaggccgguagcacccccugcaacggcgugaagggcuucaacugcuacuucccccugcagagcuacggcuuccagcccaccuacggcgugggcuaccagcccuaccgggugguggugcugagcuucgagcugcugcacgcccccgccaccgugugcggcccuaaaaagagcaccaaccuggugaagaacaagugcgugaacuucaauuucaacggccugaccggcaccggcgugcugaccgagagcaacaagaaguuccugcccuuccagcaguucggccgggacaucgccgacaccaccgaugcagugcgggacccccagacccuggagauccuggacaucaccccaugcagcuucggcggcgugagcgucaucacccccggaacaaacaccagcaaccagguggccgugcuguaccagggcgugaacugcaccgaggugcccguggccauccacgccgaccagcugacccccaccuggcggguguacagcaccggcagcaacguguuccagacccgggccggcugccugaucggcgccgagcacgugaacaacuccuacgagugcgacauccccaucggcgcuggcaucugcgccagcuaccagacccagaccaacagcccccggcgggcccggagcguggccagccagagcaucaucgccuacaccaugagccugggcguggagaacagcguggccuacagcaacaacagcaucgccaucccuaccaacuucaccauaagcgugaccaccgagauccugcccgugagcaugaccaagaccagcguggacuguaccauguacaucugcggcgacagcaccgagugcagcaaccuguuacugcaguacggcagcuucugcacccagcugaaccgggcgcugaccggcaucgccguggagcaggacaagaacacccaagagguguucgcccaggugaagcagaucuacaagacucccccaaucaaggacuucggcggcuucaacuucagccagauccugcccgaccccagcaagcccagcaagcggagcuucaucgaggaccugcuguucaacaaggugacccuggccgacgccggcuucaucaagcaguacggggacugccugggcgacaucgccgcccgggaccugaucugcgcucagaaguucaacggccugaccgugcugcccccucugcugaccgaugagaugaucgcccaguacaccagcgcccugcuggccggcaccaucaccagcggcuggaccuucggcgccggcgccgcacugcagauccccuucgccaugcagauggccuaccgguucaacggcaucggcgugacccagaacgugcuguacgagaaccagaagcugaucgccaaccaguucaacagcgccaucggcaagauccaggacagccugagcagcaccgccagcgcccugggcaagcugcaggacguggugaaccagaacgcccaggcucugaacacccuggugaagcagcugagcagcaacuuuggcgccaucagcucagugcugaaugacauccugagccggcuggacaagguggaggccgaggugcagaucgacaggcugaucaccggccggcugcagagccugcagaccuacgugacccagcagcugauccgggccgccgagauucgggccagcgccaaccuggccgcaaccaagaugagcgagugcgugcugggccagagcaagcggguggacuucugcggcaagggcuaccaccugaugagcuucccccagagcgccccacacggcguggucuuccugcacgugacauacgugcccgcccaggagaagaacuucaccaccgcccccgccaucugccacgacggaaaggcccacuucccccgggagggcguguucgugagcaacggcacccacugguucgugacccagcggaacuucuacgagccccagaucaucaccaccgacaacaccuucgugagcggcaacugcgacguggugaucggcaucgugaacaacaccguguacgacccccugcagccugagcuggacagcuucaaggaggagcucgacaaguacuucaagaaccacaccagccccgacguggaccugggcgacaucagcggcaucaacgcuagcguggugaacauccagaaggagaucgaucggcugaacgagguggccaagaaccugaacgagagccugaucgaccugcaggagcugggcaaguacgagcaguacaucaaguggcccugguacaucuggcugggcuucaucgccggccugaucgccaucgugauggugaccaucaugcugugcugcaugaccagcugcuguagcugccugaagggcugcugcagcugcggcagcugcugcaaguucgacgaggacgacagcgagccagugcugaagggcgugaagcugcacuacaccugaggacuaguuauaagacugacuagcccgaugggccucccaacgggcccuccuccccuccuugcaccgagagaucucaaaggcucuuuucagagccaccaaaaaaaaaaaaaaaaaaaaaaaaaaaaaaaaaaaaaaaaaaaaaaaaaaaaaaaaaaaaaaaaaaaaaaaaaaaaaaaaaaaaaaaaaaaaaaaaaaaaa

SEQ ID NO: 24578 - RNA, 4035 nt, Artificial Sequence
  SARS-CoV-2/Wuhan/WIV05/2019__EPI_ISL_402128 spike protein mRNA gc (1-1273)(E484K_D614G)
aggagaaagcuuaccauguucguguuccuggugcugcugccccuggugagcagccagugcgugaaccugaccacccggacccagcugcccccugccuacaccaacagcuucacccggggcguguacuaccccgacaagguguuccggagcagcgugcugcacagcacccaggaccuguuccugcccuucuucagcaacgugaccugguuccacgccauccacgugagcggcaccaacggcaccaagcgguucgacaacccagugcugcccuucaacgacggcguguacuucgccagcaccgagaagucaaacaucauccggggcuggaucuucggcaccacccuggacagcaagacacagagccugcugaucgugaacaacgccaccaacguggugaucaaggugugcgaguuucaguucugcaacgaccccuuccugggcguguacuaccacaagaacaacaagagcuggauggagagcgaguuccgggucuacagcagcgcuaacaauugcaccuucgaguacgugagccagcccuuccugauggaccucgagggcaagcagggcaacuucaagaaccugcgggaguucguguucaagaacaucgauggcuacuucaagaucuacagcaagcacacccccaucaaccuggugcgggaccugccccagggauucagcgcccuggagccucugguggaccugcccaucggcaucaacaucaccagguuccagacccugcuggcccugcaccggagcuaccugacccccggcgacagcagcagcggcuggaccgccggcgccgccgcauacuacgugggcuaccugcagccacggaccuuccugcugaaguacaacgagaacggcaccaucaccgacgccguggacugcgcccuggacccccugagcgagaccaagugcacccuaaagagcuucaccguggagaagggcaucuaccagaccagcaacuuccgggugcagcccacugagagcaucgugcgguuccccaacauuaccaaccugugucccuucggcgagguguucaacgccacccgguucgccagcguguacgccuggaaccggaagcggaucagcaacugcguggccgacuacagcgugcuguacaacagcgccagcuucagcaccuucaagugcuacggcgugagcccuaccaagcugaacgaccugugcuucaccaacguguacgcugacagcuucgugauccggggcgacgaggugcggcagaucgcccccggccagaccggcaagaucgccgacuacaacuacaagcugcccgacgacuucaccggcugcgugaucgccuggaacagcaacaaccuggacagcaaggugggcggcaacuacaacuaccuguaccggcuguuccguaagagcaaccugaagccauucgagcgggacaucagcaccgagaucuaccaggccggcagcacccccugcaacggugugaagggcuuuaacugcuacuucccccugcagagcuacggcuuccagcccaccaacggcgugggcuaccagcccuaccgggugguggugcugagcuucgagcugcugcacgcccccgccaccgugugcggcccuaaaaagagcaccaaccuggugaagaacaagugcgugaacuucaauuucaacggccugaccggcaccggcgugcugaccgagagcaacaagaaguuccugcccuuccagcaguucggccgggauaucgccgacaccaccgacgcagugcgggacccccagacccuggagauccuggacaucaccccaugcagcuucggcggcgugagcgucaucacccccggcacaaacaccagcaaccagguggccgugcuguaccagggagugaacugcaccgaggugcccguggccauccacgccgaccagcugacccccaccuggcggguguacagcaccggcagcaacguguuccagacccgggccggcugccugaucggcgccgagcacgugaacaacuccuacgagugcgacauccccaucggcgcuggcaucugcgccagcuaccagacccagaccaacagcccccggcgggcccggagcguggccagccagagcaucaucgccuacaccaugagcuuaggcgccgagaacagcguggccuacagcaacaacagcaucgcgaucccuaccaacuucaccaucagcgugaccaccgagauacugcccgugagcaugaccaagaccagcguggacuguaccauguacaucugcggcgacagcaccgagugcagcaaccugcugcugcaguacggcagcuucugcacccagcugaaccgggcccugaccggcaucgccguggagcaggacaagaacacccaagagguguucgcccaggugaagcagaucuacaagacucccccaaucaaggacuucggcggcuucaacuucagccagauccugcccgaccccagcaagcccagcaagcggagcuucaucgaggaccugcuguucaacaaggugacccuggccgacgccggcuucaucaagcaguacggcgacugccugggggauaucgccgcucgggaccugaucugcgcccagaaguucaacggccugaccgugcugcccccucugcugaccgacgagaugaucgcccaguacaccagcgcccugcuugccggcaccaucaccagcggcuggaccuucggcgccggcgcagcccugcagauccccuucgccaugcagauggccuaccgguucaacggcaucggcgugacccagaacgugcuguacgagaaccagaagcugaucgccaaccaguucaacagcgccaucggcaagauccaggacagccugagcagcaccgccagcgcccugggcaagcugcaggacguggugaaccagaacgcucaggcccugaacacccuggugaagcagcugagcagcaacuucggcgccaucagcucagugcugaaugacauccugagcaggcuggacaagguggaggccgaggugcagaucgaccggcugaucaccggccggcugcagagccugcagaccuacgugacccagcagcugauccgggccgccgagauccgggccagcgccaaccuggcagccaccaagaugagcgagugcgugcugggccagagcaagcggguggacuuuugcggcaagggcuaccaccugaugagcuucccccagagcgccccacacggcgugguguuccuccacgucacauacgugcccgcccaggagaagaacuucaccaccgcccccgccauuugccacgacggcaaggcucacuucccccgggagggaguguucgugagcaacggcacccacugguucgugacccagcggaacuucuacgagccccagaucaucaccaccgacaacaccuucgugagcggcaacugcgacguggugaucggcaucgugaacaacaccguguacgacccccugcagccugagcuggacagcuucaaggaggagcuggacaaguacuucaagaaccacaccagccccgacguggaucugggcgacaucagcggcaucaacgccagcguggugaacauccagaaggagaucgaccggcugaacgagguggccaagaaccugaacgagagccugaucgaccugcaggagcugggcaaguacgagcaguacaucaaguggcccugguacaucuggcugggcuucaucgccggccugaucgccaucgugauggugaccaucaugcugugcugcaugaccagcugcuguagcugccugaagggcugcugcagcugcggcagcugcugcaaguucgacgaggacgacagcgagccagugcugaagggcgugaagcugcacuacaccugaggacuaguuauaagacugacuagcccgaugggccucccaacgggcccuccuccccuccuugcaccgagagaucucaaaggcucuuuucagagccaccaaaaaaaaaaaaaaaaaaaaaaaaaaaaaaaaaaaaaaaaaaaaaaaaaaaaaaaaaaaaaaaaaaaaaaaaaaaaaaaaaaaaaaaaaaaaaaaaaaaaa

SEQ ID NO: 24579 - RNA, 4035 nt, Artificial Sequence
  SARS-CoV-2/Wuhan/WIV05/2019__EPI_ISL_402128 spike protein mRNA gc (1-1273)(L18F_T20N_P26S_D138Y_R190S_K417T_E484K_N501Y_D614G_H655Y _T1027I)
aggagaaagcuuaccauguucguguuccuggugcugcugccccuggugagcagccagugcgugaacuucaccaaccggacccagcugcccagcgccuacaccaacagcuucacccggggcguguacuacccugacaagguguuccggagcagcgugcugcacagcacccaggaccuguuccugcccuucuucagcaacgugaccugguuccacgccauccacgugagcggcaccaacggcaccaagcgguucgacaaccccgugcugccauucaacgacggcguguacuucgccagcaccgagaagucaaacaucauccggggcuggaucuuuggcaccacccuggacagcaagacccagagccugcugaucgugaacaacgccacaaacguggugaucaaggugugcgaguuccaguucugcaacuaccccuuccugggcguguacuaccacaagaacaacaagagcuggauggagagcgaguuccgggucuacagcagcgcuaauaacugcaccuucgaguacgugagccagcccuuccugauggaccuggagggcaagcagggcaacuucaagaaccucagcgaguucguguucaagaacaucgacggcuacuucaagaucuacagcaagcacacccccaucaaccuggugcgggaucugccccagggauucagcgcccuggagccccugguggaccugccuaucggcaucaacaucacccgguuccagacccugcuggcccugcacaggagcuaccugacccccggcgacagcagcagcggcuggaccgccggcgccgccgcauacuacgugggcuaccugcagccccggaccuuccugcugaaguacaacgagaacggcaccaucaccgacgccguggacugcgcccuggacccacugagcgagaccaagugcacccuaaagagcuucaccguggagaagggcaucuaccagaccagcaacuuccgggugcagcccaccgagagcaucgugcgguuccccaacauuacuaaccugugucccuucggcgagguguucaacgccacccgguucgccagcguguacgccuggaaccggaagcggaucagcaacugcguggccgacuacagcgugcuguacaacagcgccagcuucagcaccuucaagugcuacggcgugagccccaccaagcugaacgaccugugcuucaccaacguguacgcugacagcuucgugauccggggcgacgaggugcggcagaucgccccuggccagaccggcaccaucgccgacuacaacuacaagcugcccgacgacuucaccggcugcgugaucgccuggaacagcaacaaccuggacagcaaggugggcggcaacuacaacuaccuguaccggcuguuccguaagagcaaccugaagcccuuugagcgggacaucagcaccgagaucuaccaggccggcagcaccccaugcaacggugugaagggcuucaacugcuacuucccccugcagagcuacggcuuccagcccaccuacggcgugggcuaccagcccuaccgggugguggugcugagcuucgagcugcugcacgcccccgccaccgugugcggccccaaaaagagcaccaaccuggugaagaacaagugcgugaacuucaauuucaacggccugaccggcaccggcgugcugaccgagagcaacaagaaguuccugccuuuccagcaguucggccgggacaucgccgauaccaccgacgcagugcgggacccccagacccuggagauccuggacaucacccccugcagcuucggcggcgugagcgucaucaccccaggcacaaacaccagcaaccagguggccgugcuguaccagggagugaacugcaccgaggugcccguggccauccacgccgaccagcugacccccaccuggcggguguacuccaccggcagcaacguguuccagacccgggccggcugccugaucggcgccgaguacgugaacaacagcuacgagugcgacauccccaucggcgcuggcaucugcgccagcuaccagacccagaccaacagcccccggcgggcccggagcguggccagccagagcaucaucgccuacaccaugagccugggcgccgagaacagcguggccuacagcaacaacagcaucgcgauccccaccaacuucaccaucagcgugaccaccgagauauuaccugugagcaugaccaagaccagcguggacuguaccauguacaucugcggcgacagcaccgagugcagcaaccugcugcugcaguacggcagcuucugcacccagcugaaccgggcccugaccggcaucgccguggagcaggacaagaacacccaagagguguucgcccaggugaagcagaucuacaagacuccacccaucaaggacuucggcggcuucaacuucagccagauccugcccgaccccagcaagcccagcaagcggagcuucaucgaggaccugcuguucaacaaggugacccuggccgacgccggcuucaucaagcaguacggcgacugccugggggacaucgccgcucgggaucugaucugcgcccagaaguucaacggccugaccgugcugccuccccugcugaccgacgagaugaucgcccaguacaccagcgcccugcuggccggcaccaucaccagcggcuggaccuucggcgccggcgcagcccuucagauccccuucgccaugcagauggccuaccgguucaacggcaucggcgugacccagaacgugcuguacgagaaccagaagcugaucgccaaccaguucaacagcgccaucggcaagauccaggacagccugagcagcaccgccagcgcccugggcaagcugcaggacguggugaaccagaacgcucaggcccugaacacccuggugaagcagcugagcucaaacuuuggcgccaucagcagcgugcugaaugacauccugagccggcuggacaagguggaggccgaggugcagaucgacaggcugaucaccggccggcugcagagccugcagaccuacgugacccagcagcugauccgggccgccgagauccgggccagcgccaaccuggcagccauuaagaugagcgagugcgugcugggccagagcaagcggguggacuucugcggcaagggcuaccaccugaugagcuucccccagagcgcuccccacggcgugguguuccugcacgucaccuacgugccagcccaggagaagaacuucacaaccgcccccgccaucugccacgacggcaaggcccacuucccccgggagggaguguucgugagcaacggcacccacugguucgugacccagcggaacuucuacgagccccagaucaucaccaccgacaacaccuucgugagcggcaacugcgacguggugaucggcaucgugaacaacaccguguacgacccccuccagcccgagcuggacagcuucaaggaggagcuggacaaguacuucaagaaccacaccagcccugacguggaccugggcgauaucagcggcaucaacgccagcguggugaacauccagaaggagaucgaccggcugaacgagguggccaagaaccugaacgagagccugaucgaccugcaggagcugggcaaguacgagcaguacaucaaguggcccugguacaucuggcugggcuucaucgccggccugaucgccaucgugauggugaccaucaugcugugcugcaugaccagcugcuguagcugccugaagggcugcugcagcugcggcagcugcugcaaguucgacgaggacgacagcgagcccgugcugaagggcgugaagcugcacuacaccugaggacuaguuauaagacugacuagcccgaugggccucccaacgggcccuccuccccuccuugcaccgagagaucucaaaggcucuuuucagagccaccaaaaaaaaaaaaaaaaaaaaaaaaaaaaaaaaaaaaaaaaaaaaaaaaaaaaaaaaaaaaaaaaaaaaaaaaaaaaaaaaaaaaaaaaaaaaaaaaaaaaa

SEQ ID NO: 24580 - RNA, 4035 nt, Artificial Sequence
  SARS-CoV-2/Wuhan/WIV05/2019__EPI_ISL_402128 spike protein mRNA gc (1-1273)(S13I_W152C_L452R_D614G)
aggagaaagcuuaccauguucguguuccuggugcugcugccccuggugagcauccagugcgugaaccugaccacccggacccagcugcccccugccuacaccaacagcuucacccggggcguguacuaccccgacaagguguuccggagcagcgugcugcacagcacccaggaccuguuccugcccuucuucagcaacgugaccugguuccacgccauccacgugagcggcaccaacggcaccaagcgguucgacaacccagugcugcccuucaacgacggcguguacuucgccagcaccgagaagucaaacaucauccggggcuggaucuucggcaccacccuggacagcaagacacagagccugcugaucgugaacaacgccaccaacguggugaucaaggugugcgaguuucaguucugcaacgaccccuuccugggcguguacuaccacaagaacaacaagagcugcauggagagcgaguuccgggucuacagcagcgcuaacaauugcaccuucgaguacgugagccagcccuuccugauggaccucgagggcaagcagggcaacuucaagaaccugcgggaguucguguucaagaacaucgauggcuacuucaagaucuacagcaagcacacccccaucaaccuggugcgggaccugccccagggauucagcgcccuggagccucugguggaccugcccaucggcaucaacaucaccagguuccagacccugcuggcccugcaccggagcuaccugacccccggcgacagcagcagcggcuggaccgccggcgccgccgcauacuacgugggcuaccugcagccacggaccuuccugcugaaguacaacgagaacggcaccaucaccgacgccguggacugcgcccuggacccccugagcgagaccaaguguacccuaaagagcuucaccguggagaagggcaucuaccagaccagcaacuuccgggugcagcccacugagagcauugugcgguuccccaacaucaccaaccugugccccuucggcgagguguucaacgccacccgguucgccagcguguacgccuggaaccggaagcggaucagcaacugcguggccgacuacagcgugcuguacaacagcgccagcuucagcaccuucaagugcuacggcgugagcccuaccaagcugaacgaccugugcuucaccaacguguacgcugacagcuucgugauccggggcgacgaggugcggcagaucgcccccggccagaccggcaagaucgccgacuacaacuacaagcugcccgacgacuucaccggcugcgugaucgccuggaacagcaacaaccuggacagcaaggugggcggcaacuacaacuaccgguaccggcuguuccguaagagcaaccugaagccauucgagcgggacaucagcaccgagaucuaccaggccggcagcacccccugcaacgguguggagggcuuuaacugcuacuucccccugcagagcuacggcuuccagcccaccaacggcgugggcuaccagcccuaccgggugguggugcugagcuucgagcugcugcacgcccccgccaccgugugcggcccuaaaaagagcaccaaccuggugaagaacaagugcgugaacuucaauuucaacggccugaccggcaccggcgugcugaccgagagcaacaagaaguuccugcccuuccagcaguucggccgggauaucgccgacaccaccgacgcagugcgggacccccagacccuggagauccuggacaucaccccaugcagcuucggcggcgugagcgucaucacccccggcacaaacaccagcaaccagguggccgugcuguaccagggagugaacugcaccgaggugcccguggccauccacgccgaccagcugacccccaccuggcggguguacagcaccggcagcaacguguuccagacccgggccggcugccugaucggcgccgagcacgugaacaacagcuacgagugcgacauccccaucggcgcuggcaucugugccuccuaccagacccagaccaacagcccccggcgggcccggagcguggccagccagagcaucaucgccuacaccaugagccugggcgccgagaacagcguggccuacagcaacaacagcaucgcgaucccuaccaacuucaccauaagcgugaccaccgagaucuuacccgugagcaugaccaagaccagcguggacugcaccauguacaucugcggcgacagcaccgagugcagcaaccugcugcugcaguacggcagcuucugcacccagcugaaccgggcccugaccggcaucgccguggagcaggacaagaacacccaagagguguucgcccaggugaagcagaucuacaagacucccccaaucaaggacuucggcggcuucaacuucagccagauccugcccgaccccagcaagcccagcaagcggagcuucaucgaggaccugcuguucaacaaggugacccuggccgacgccggcuucaucaagcaguacggcgacugccugggggauaucgccgcucgggaccugaucugcgcccagaaguucaacggccugaccgugcugcccccucugcugaccgacgagaugaucgcccaguacaccagcgcccugcuggccggcaccaucaccagcggcuggaccuucggcgccggcgcagcccuucagauccccuucgccaugcagauggccuacagguucaacggcaucggcgugacccagaacgugcuguacgagaaccagaagcugaucgccaaccaguucaacagcgccaucggcaagauccaggacagccugagcagcaccgccagcgcccugggcaagcugcaggacguggugaaccagaacgcucaggcccugaacacccuggugaagcagcugagcagcaacuucggcgccaucagcagcgugcugaaugacauccugucacggcuggacaagguggaggccgaggugcagaucgaccggcugaucaccggccggcugcagagccugcagaccuacgugacccagcagcugauccgggccgccgagauucgggccagcgccaaccuggcagccaccaagaugagcgagugcgugcugggccagagcaagcggguggacuuuugcggcaagggcuaccaccugaugagcuucccccagagcgccccacacggcgugguguuccugcacgucacauacgugcccgcccaggagaagaacuucaccaccgcccccgccaucugccacgacggcaaggcucacuucccccgggagggaguguucgugagcaacggcacccacugguucgugacccagcggaacuucuacgagccccagaucaucaccaccgacaacaccuucgugagcggcaacugcgacguggugaucggcaucgugaacaacaccguguacgacccccuccagccugagcuggacagcuucaaggaggagcuggacaaguacuucaagaaccacaccagccccgacguggaucugggcgacaucagcggcaucaacgccagcguggugaacauccagaaggagaucgaccggcugaacgagguggccaagaaccugaacgagagccugaucgaccugcaggagcugggcaaguacgagcaguacaucaaguggcccugguacaucuggcugggcuucaucgccggccugaucgccaucgugauggugaccaucaugcugugcugcaugaccagcuguugcagcugccugaagggcugcugcagcugcggcagcugcugcaaguucgacgaggacgacagcgagccagugcugaagggcgugaagcugcacuacaccugaggacuaguuauaagacugacuagcccgaugggccucccaacgggcccuccuccccuccuugcaccgagagaucucaaaggcucuuuucagagccaccaaaaaaaaaaaaaaaaaaaaaaaaaaaaaaaaaaaaaaaaaaaaaaaaaaaaaaaaaaaaaaaaaaaaaaaaaaaaaaaaaaaaaaaaaaaaaaaaaaaaa

SEQ ID NO: 24581 - RNA, 4035 nt, Artificial Sequence
  SARS-CoV-2/Wuhan/WIV05/2019__EPI_ISL_402128 spike protein mRNA gc mod (1-1273)
aggagaaagcuuaccauguucguguuucuggugcugcugccccugguguccagccagugugugaaccugaccaccagaacacagcugccuccagccuacaccaacagcuucaccagaggcguguacuaccccgacaagguguucagauccagcgugcugcacucuacccaggaccuguuccugccuuucuucagcaacgugaccugguuccacgccauccacguguccggcaccaauggcaccaagagauucgacaaccccgugcugcccuucaacgacgggguguacuuugccagcaccgagaaguccaacaucaucagaggcuggaucuucggcaccacacuggacagcaagacccagagccugcugaucgugaacaacgccaccaacguggucaucaaagugugcgaguuccaguucugcaacgaccccuuccugggcgucuacuaccacaagaacaacaagagcuggauggaaagcgaguuccggguguacagcagcgccaacaacugcaccuucgaguacgugucccagccuuuccugauggaccuggaaggcaagcagggcaacuucaagaaccugcgcgaguucguguucaagaacaucgacggcuacuucaaaaucuacagcaagcacaccccuaucaaccucgugcgggaucugccucagggcuucucugcucuggaaccccugguggaucugcccaucggcaucaacaucacccgguuucagacacugcuggcccugcacagaagcuaccugacaccuggcgauagcagcagcggauggacagcuggugccgccgcuuacuaugugggcuaccugcagccuagaaccuuccugcugaaguacaacgagaacggcaccaucaccgacgccguggauugugcucuggauccucugagcgagacaaagugcacccugaaguccuucaccguggaaaagggcaucuaccagaccagcaacuuccgggugcagcccaccgaauccaucgugcgguuccccaauaucaccaaucugugccccuucggcgagguguucaaugccaccagauucgccucuguguacgccuggaaccggaagcggaucagcaauugcguggccgacuacuccgugcuguacaacuccgccagcuucagcaccuucaagugcuacggcguguccccuaccaagcugaacgaccugugcuucacaaacguguacgccgacagcuucgugauccggggagaugaagugcggcagauugccccuggacagacaggcaagaucgccgacuacaacuacaagcugcccgacgacuucaccggcugugugauugccuggaacagcaacaaccuggacuccaaagucggcggcaacuacaauuaccuguaccggcuguuccggaaguccaaucugaagcccuucgagcgggacaucagcaccgaaaucuaucaggccggcagcaccccuugcaacggcguggaaggcuucaacugcuacuucccacugcaguccuacggcuuucagcccacaaauggcgugggcuaucagcccuacagagugguggugcugagcuucgaacugcugcaugcuccugccacagugugcggcccuaagaaaagcaccaaucucgugaagaacaaaugcgugaacuucaacuucaacggccugaccggcaccggcgugcugacagagagcaacaagaaguuccugccauuccagcaguuuggccgggauaucgccgauaccacagacgccguuagagauccccagacacuggaaauccuggacaucaccccaugcagcuucggcggagugucugugaucaccccuggcaccaacaccagcaaucagguggcagugcuguaccaggacgugaacuguaccgaagugcccguggccauucacgccgaucagcugacaccuacauggcggguguacuccaccggcagcaauguguuucagaccagagccggcugucugaucggagccgagcacgugaacaauagcuacgagugcgacauccccaucggcgcuggcaucugugccagcuaccagacacagacaaacagccccagacgggcuagaagcguggccagccagagcaucauugccuacacaaugucucugggcgccgagaacagcguggccuacuccaacaacucuaucgcuauccccaccaacuucaccaucagcgugaccaccgagauccugccuguguccaugaccaagaccagcguggacugcaccauguacaucugcggcgauuccaccgagugcuccaaccugcugcugcaguacggcagcuucugcacccagcugaauagagcccugacagggaucgccguggaacaggacaagaacacccaagagguguucgcccaagugaagcaaaucuacaagaccccuccuaucaaggacuucggcggcuucaauuucagccagauucugcccgauccuagcaagcccagcaagcggagcuucaucgaggaccugcuguucaacaaagugacacuggccgacgccggcuucaucaagcaguauggcgauugucugggcgacauugccgccagggaucugauuugcgcccagaaguuuaacggacugacagugcugccuccucugcugaccgaugagaugaucgcccaguacacaucugcccugcuggccggcacaaucacaagcggcuggacauuuggagcuggcgccgcucugcagauccccuuugcuaugcagauggccuaccgguucaacggcaucggagugacccagaaugugcuguacgagaaccagaagcugaucgccaaccaguucaacagcgccaucggcaagauccaggacagccugagcagcacagcaagcgcccugggaaagcugcaggacguggucaaccagaaugcccaggcacugaacacccuggucaagcagcuguccuccaacuucggcgccaucagcucugugcugaacgauauccugagcagacuggacaaggucgaggccgaggugcagaucgacagacugaucacaggcagacugcagagccuccagacauacgugacccagcagcugaucagagccgccgagauuagagccucugccaaucuggccgccaccaagaugucugagugugugcugggccagagcaagagaguggacuuuugcggcaagggcuaccaccugaugagcuucccucagucugccccucacggcgugguguuucugcacgugacauaugugcccgcucaagagaagaauuucaccaccgcuccagccaucugccacgacggcaaagcccacuuuccuagagaaggcguguucguguccaacggcacccauugguucgugacacagcggaacuucuacgagccccagaucaucaccaccgacaacaccuucgugucuggcaacugcgacguugugaucggcauugugaacaauaccguguacgacccucugcagcccgagcuggacagcuucaaagaggaacuggacaaguacuuuaagaaccacacaagccccgacguggaccugggcgauaucagcggaaucaaugccagcgucgugaacauccagaaagagaucgaccggcugaacgagguggccaagaaucugaacgagagccugaucgaccugcaagaacuggggaaguacgagcaguacaucaaguggcccugguacaucuggcugggcuuuaucgccggacugauugccaucgugauggucacaaucaugcuguguugcaugaccagcugcuguagcugccugaagggcuguuguagcuguggcagcugcugcaaguucgacgaggacgauucugagcccgugcugaagggcgugaaacugcacuacaccugaggacuaguuauaagacugacuagcccgaugggccucccaacgggcccuccuccccuccuugcaccgagagaucucaaaggcucuuuucagagccaccaaaaaaaaaaaaaaaaaaaaaaaaaaaaaaaaaaaaaaaaaaaaaaaaaaaaaaaaaaaaaaaaaaaaaaaaaaaaaaaaaaaaaaaaaaaaaaaaaaaaa

SEQ ID NO: 24582 - RNA, 4035 nt, Artificial Sequence
  SARS-CoV-2/Wuhan/WIV05/2019__EPI_ISL_402128 spike protein mRNA gc mod (1-1273)(D614G)
aggagaaagcuuaccauguucguguuucuggugcugcugccccugguguccagccagugugugaaccugaccaccagaacacagcugccuccagccuacaccaacagcuucaccagaggcguguacuaccccgacaagguguucagauccagcgugcugcacucuacccaggaccuguuccugccuuucuucagcaacgugaccugguuccacgccauccacguguccggcaccaauggcaccaagagauucgacaaccccgugcugcccuucaacgacgggguguacuuugccagcaccgagaaguccaacaucaucagaggcuggaucuucggcaccacacuggacagcaagacccagagccugcugaucgugaacaacgccaccaacguggucaucaaagugugcgaguuccaguucugcaacgaccccuuccugggcgucuacuaccacaagaacaacaagagcuggauggaaagcgaguuccggguguacagcagcgccaacaacugcaccuucgaguacgugucccagccuuuccugauggaccuggaaggcaagcagggcaacuucaagaaccugcgcgaguucguguucaagaacaucgacggcuacuucaaaaucuacagcaagcacaccccuaucaaccucgugcgggaucugccucagggcuucucugcucuggaaccccugguggaucugcccaucggcaucaacaucacccgguuucagacacugcuggcccugcacagaagcuaccugacaccuggcgauagcagcagcggauggacagcuggugccgccgcuuacuaugugggcuaccugcagccuagaaccuuccugcugaaguacaacgagaacggcaccaucaccgacgccguggauugugcucuggauccucugagcgagacaaagugcacccugaaguccuucaccguggaaaagggcaucuaccagaccagcaacuuccgggugcagcccaccgaauccaucgugcgguuccccaauaucaccaaucugugccccuucggcgagguguucaaugccaccagauucgccucuguguacgccuggaaccggaagcggaucagcaauugcguggccgacuacuccgugcuguacaacuccgccagcuucagcaccuucaagugcuacggcguguccccuaccaagcugaacgaccugugcuucacaaacguguacgccgacagcuucgugauccggggagaugaagugcggcagauugccccuggacagacaggcaagaucgccgacuacaacuacaagcugcccgacgacuucaccggcugugugauugccuggaacagcaacaaccuggacuccaaagucggcggcaacuacaauuaccuguaccggcuguuccggaaguccaaucugaagcccuucgagcgggacaucagcaccgaaaucuaucaggccggcagcaccccuugcaacggcguggaaggcuucaacugcuacuucccacugcaguccuacggcuuucagcccacaaauggcgugggcuaucagcccuacagagugguggugcugagcuucgaacugcugcaugcuccugccacagugugcggcccuaagaaaagcaccaaucucgugaagaacaaaugcgugaacuucaacuucaacggccugaccggcaccggcgugcugacagagagcaacaagaaguuccugccauuccagcaguuuggccgggauaucgccgauaccacagacgccguuagagauccccagacacuggaaauccuggacaucaccccaugcagcuucggcggagugucugugaucaccccuggcaccaacaccagcaaucagguggcagugcuguaccagggcgugaacuguaccgaagugcccguggccauucacgccgaucagcugacaccuacauggcggguguacuccaccggcagcaauguguuucagaccagagccggcugucugaucggagccgagcacgugaacaauagcuacgagugcgacauccccaucggcgcuggcaucugugccagcuaccagacacagacaaacagccccagacgggcuagaagcguggccagccagagcaucauugccuacacaaugucucugggcgccgagaacagcguggccuacuccaacaacucuaucgcuauccccaccaacuucaccaucagcgugaccaccgagauccugccuguguccaugaccaagaccagcguggacugcaccauguacaucugcggcgauuccaccgagugcuccaaccugcugcugcaguacggcagcuucugcacccagcugaauagagcccugacagggaucgccguggaacaggacaagaacacccaagagguguucgcccaagugaagcaaaucuacaagaccccuccuaucaaggacuucggcggcuucaauuucagccagauucugcccgauccuagcaagcccagcaagcggagcuucaucgaggaccugcuguucaacaaagugacacuggccgacgccggcuucaucaagcaguauggcgauugucugggcgacauugccgccagggaucugauuugcgcccagaaguuuaacggacugacagugcugccuccucugcugaccgaugagaugaucgcccaguacacaucugcccugcuggccggcacaaucacaagcggcuggacauuuggagcuggcgccgcucugcagauccccuuugcuaugcagauggccuaccgguucaacggcaucggagugacccagaaugugcuguacgagaaccagaagcugaucgccaaccaguucaacagcgccaucggcaagauccaggacagccugagcagcacagcaagcgcccugggaaagcugcaggacguggucaaccagaaugcccaggcacugaacacccuggucaagcagcuguccuccaacuucggcgccaucagcucugugcugaacgauauccugagcagacuggacaaggucgaggccgaggugcagaucgacagacugaucacaggcagacugcagagccuccagacauacgugacccagcagcugaucagagccgccgagauuagagccucugccaaucuggccgccaccaagaugucugagugugugcugggccagagcaagagaguggacuuuugcggcaagggcuaccaccugaugagcuucccucagucugccccucacggcgugguguuucugcacgugacauaugugcccgcucaagagaagaauuucaccaccgcuccagccaucugccacgacggcaaagcccacuuuccuagagaaggcguguucguguccaacggcacccauugguucgugacacagcggaacuucuacgagccccagaucaucaccaccgacaacaccuucgugucuggcaacugcgacguugugaucggcauugugaacaauaccguguacgacccucugcagcccgagcuggacagcuucaaagaggaacuggacaaguacuuuaagaaccacacaagccccgacguggaccugggcgauaucagcggaaucaaugccagcgucgugaacauccagaaagagaucgaccggcugaacgagguggccaagaaucugaacgagagccugaucgaccugcaagaacuggggaaguacgagcaguacaucaaguggcccugguacaucuggcugggcuuuaucgccggacugauugccaucgugauggucacaaucaugcuguguugcaugaccagcugcuguagcugccugaagggcuguuguagcuguggcagcugcugcaaguucgacgaggacgauucugagcccgugcugaagggcgugaaacugcacuacaccugaggacuaguuauaagacugacuagcccgaugggccucccaacgggcccuccuccccuccuugcaccgagagaucucaaaggcucuuuucagagccaccaaaaaaaaaaaaaaaaaaaaaaaaaaaaaaaaaaaaaaaaaaaaaaaaaaaaaaaaaaaaaaaaaaaaaaaaaaaaaaaaaaaaaaaaaaaaaaaaaaaaa

SEQ ID NO: 24583 - RNA, 4035 nt, Artificial Sequence
  SARS-CoV-2/Wuhan/WIV05/2019__EPI_ISL_402128 spike protein mRNA gc mod (1-1273)(A222V_D614G)
aggagaaagcuuaccauguucguguuucuggugcugcugccccugguguccagccagugugugaaccugaccaccagaacacagcugccuccagccuacaccaacagcuucaccagaggcguguacuaccccgacaagguguucagauccagcgugcugcacucuacccaggaccuguuccugccuuucuucagcaacgugaccugguuccacgccauccacguguccggcaccaauggcaccaagagauucgacaaccccgugcugcccuucaacgacgggguguacuuugccagcaccgagaaguccaacaucaucagaggcuggaucuucggcaccacacuggacagcaagacccagagccugcugaucgugaacaacgccaccaacguggucaucaaagugugcgaguuccaguucugcaacgaccccuuccugggcgucuacuaccacaagaacaacaagagcuggauggaaagcgaguuccggguguacagcagcgccaacaacugcaccuucgaguacgugucccagccuuuccugauggaccuggaaggcaagcagggcaacuucaagaaccugcgcgaguucguguucaagaacaucgacggcuacuucaaaaucuacagcaagcacaccccuaucaaccucgugcgggaucugccucagggcuucucugugcuggaaccccugguggaucugcccaucggcaucaacaucacccgguuucagacacugcuggcccugcacagaagcuaccugacaccuggcgauagcagcagcggauggacagcuggugccgccgcuuacuaugugggcuaccugcagccuagaaccuuccugcugaaguacaacgagaacggcaccaucaccgacgccguggauugugcucuggauccucugagcgagacaaagugcacccugaaguccuucaccguggaaaagggcaucuaccagaccagcaacuuccgggugcagcccaccgaauccaucgugcgguuccccaauaucaccaaucugugccccuucggcgagguguucaaugccaccagauucgccucuguguacgccuggaaccggaagcggaucagcaauugcguggccgacuacuccgugcuguacaacuccgccagcuucagcaccuucaagugcuacggcguguccccuaccaagcugaacgaccugugcuucacaaacguguacgccgacagcuucgugauccggggagaugaagugcggcagauugccccuggacagacaggcaagaucgccgacuacaacuacaagcugcccgacgacuucaccggcugugugauugccuggaacagcaacaaccuggacuccaaagucggcggcaacuacaauuaccuguaccggcuguuccggaaguccaaucugaagcccuucgagcgggacaucagcaccgaaaucuaucaggccggcagcaccccuugcaacggcguggaaggcuucaacugcuacuucccacugcaguccuacggcuuucagcccacaaauggcgugggcuaucagcccuacagagugguggugcugagcuucgaacugcugcaugcuccugccacagugugcggcccuaagaaaagcaccaaucucgugaagaacaaaugcgugaacuucaacuucaacggccugaccggcaccggcgugcugacagagagcaacaagaaguuccugccauuccagcaguuuggccgggauaucgccgauaccacagacgccguuagagauccccagacacuggaaauccuggacaucaccccaugcagcuucggcggagugucugugaucaccccuggcaccaacaccagcaaucagguggcagugcuguaccagggcgugaacuguaccgaagugcccguggccauucacgccgaucagcugacaccuacauggcggguguacuccaccggcagcaauguguuucagaccagagccggcugucugaucggagccgagcacgugaacaauagcuacgagugcgacauccccaucggcgcuggcaucugugccagcuaccagacacagacaaacagccccagacgggcuagaagcguggccagccagagcaucauugccuacacaaugucucugggcgccgagaacagcguggccuacuccaacaacucuaucgcuauccccaccaacuucaccaucagcgugaccaccgagauccugccuguguccaugaccaagaccagcguggacugcaccauguacaucugcggcgauuccaccgagugcuccaaccugcugcugcaguacggcagcuucugcacccagcugaauagagcccugacagggaucgccguggaacaggacaagaacacccaagagguguucgcccaagugaagcaaaucuacaagaccccuccuaucaaggacuucggcggcuucaauuucagccagauucugcccgauccuagcaagcccagcaagcggagcuucaucgaggaccugcuguucaacaaagugacacuggccgacgccggcuucaucaagcaguauggcgauugucugggcgacauugccgccagggaucugauuugcgcccagaaguuuaacggacugacagugcugccuccucugcugaccgaugagaugaucgcccaguacacaucugcccugcuggccggcacaaucacaagcggcuggacauuuggagcuggcgccgcucugcagauccccuuugcuaugcagauggccuaccgguucaacggcaucggagugacccagaaugugcuguacgagaaccagaagcugaucgccaaccaguucaacagcgccaucggcaagauccaggacagccugagcagcacagcaagcgcccugggaaagcugcaggacguggucaaccagaaugcccaggcacugaacacccuggucaagcagcuguccuccaacuucggcgccaucagcucugugcugaacgauauccugagcagacuggacaaggucgaggccgaggugcagaucgacagacugaucacaggcagacugcagagccuccagacauacgugacccagcagcugaucagagccgccgagauuagagccucugccaaucuggccgccaccaagaugucugagugugugcugggccagagcaagagaguggacuuuugcggcaagggcuaccaccugaugagcuucccucagucugccccucacggcgugguguuucugcacgugacauaugugcccgcucaagagaagaauuucaccaccgcuccagccaucugccacgacggcaaagcccacuuuccuagagaaggcguguucguguccaacggcacccauugguucgugacacagcggaacuucuacgagccccagaucaucaccaccgacaacaccuucgugucuggcaacugcgacguugugaucggcauugugaacaauaccguguacgacccucugcagcccgagcuggacagcuucaaagaggaacuggacaaguacuuuaagaaccacacaagccccgacguggaccugggcgauaucagcggaaucaaugccagcgucgugaacauccagaaagagaucgaccggcugaacgagguggccaagaaucugaacgagagccugaucgaccugcaagaacuggggaaguacgagcaguacaucaaguggcccugguacaucuggcugggcuuuaucgccggacugauugccaucgugauggucacaaucaugcuguguugcaugaccagcugcuguagcugccugaagggcuguuguagcuguggcagcugcugcaaguucgacgaggacgauucugagcccgugcugaagggcgugaaacugcacuacaccugaggacuaguuauaagacugacuagcccgaugggccucccaacgggcccuccuccccuccuugcaccgagagaucucaaaggcucuuuucagagccaccaaaaaaaaaaaaaaaaaaaaaaaaaaaaaaaaaaaaaaaaaaaaaaaaaaaaaaaaaaaaaaaaaaaaaaaaaaaaaaaaaaaaaaaaaaaaaaaaaaaaa

SEQ ID NO: 24584 - RNA, 4035 nt, Artificial Sequence
  SARS-CoV-2/Wuhan/WIV05/2019__EPI_ISL_402128 spike protein mRNA gc mod (1-1273)(N439K_D614G)
aggagaaagcuuaccauguucguguuucuggugcugcugccccugguguccagccagugugugaaccugaccaccagaacacagcugccuccagccuacaccaacagcuucaccagaggcguguacuaccccgacaagguguucagauccagcgugcugcacucuacccaggaccuguuccugccuuucuucagcaacgugaccugguuccacgccauccacguguccggcaccaauggcaccaagagauucgacaaccccgugcugcccuucaacgacgggguguacuuugccagcaccgagaaguccaacaucaucagaggcuggaucuucggcaccacacuggacagcaagacccagagccugcugaucgugaacaacgccaccaacguggucaucaaagugugcgaguuccaguucugcaacgaccccuuccugggcgucuacuaccacaagaacaacaagagcuggauggaaagcgaguuccggguguacagcagcgccaacaacugcaccuucgaguacgugucccagccuuuccugauggaccuggaaggcaagcagggcaacuucaagaaccugcgcgaguucguguucaagaacaucgacggcuacuucaaaaucuacagcaagcacaccccuaucaaccucgugcgggaucugccucagggcuucucugcucuggaaccccugguggaucugcccaucggcaucaacaucacccgguuucagacacugcuggcccugcacagaagcuaccugacaccuggcgauagcagcagcggauggacagcuggugccgccgcuuacuaugugggcuaccugcagccuagaaccuuccugcugaaguacaacgagaacggcaccaucaccgacgccguggauugugcucuggauccucugagcgagacaaagugcacccugaaguccuucaccguggaaaagggcaucuaccagaccagcaacuuccgggugcagcccaccgaauccaucgugcgguuccccaauaucaccaaucugugccccuucggcgagguguucaaugccaccagauucgccucuguguacgccuggaaccggaagcggaucagcaauugcguggccgacuacuccgugcuguacaacuccgccagcuucagcaccuucaagugcuacggcguguccccuaccaagcugaacgaccugugcuucacaaacguguacgccgacagcuucgugauccggggagaugaagugcggcagauugccccuggacagacaggcaagaucgccgacuacaacuacaagcugcccgacgacuucaccggcugugugauugccuggaacagcaagaaccuggacuccaaagucggcggcaacuacaauuaccuguaccggcuguuccggaaguccaaucugaagcccuucgagcgggacaucagcaccgaaaucuaucaggccggcagcaccccuugcaacggcguggaaggcuucaacugcuacuucccacugcaguccuacggcuuucagcccacaaauggcgugggcuaucagcccuacagagugguggugcugagcuucgaacugcugcaugcuccugccacagugugcggcccuaagaaaagcaccaaucucgugaagaacaaaugcgugaacuucaacuucaacggccugaccggcaccggcgugcugacagagagcaacaagaaguuccugccauuccagcaguuuggccgggauaucgccgauaccacagacgccguuagagauccccagacacuggaaauccuggacaucaccccaugcagcuucggcggagugucugugaucaccccuggcaccaacaccagcaaucagguggcagugcuguaccagggcgugaacuguaccgaagugcccguggccauucacgccgaucagcugacaccuacauggcggguguacuccaccggcagcaauguguuucagaccagagccggcugucugaucggagccgagcacgugaacaauagcuacgagugcgacauccccaucggcgcuggcaucugugccagcuaccagacacagacaaacagccccagacgggcuagaagcguggccagccagagcaucauugccuacacaaugucucugggcgccgagaacagcguggccuacuccaacaacucuaucgcuauccccaccaacuucaccaucagcgugaccaccgagauccugccuguguccaugaccaagaccagcguggacugcaccauguacaucugcggcgauuccaccgagugcuccaaccugcugcugcaguacggcagcuucugcacccagcugaauagagcccugacagggaucgccguggaacaggacaagaacacccaagagguguucgcccaagugaagcaaaucuacaagaccccuccuaucaaggacuucggcggcuucaauuucagccagauucugcccgauccuagcaagcccagcaagcggagcuucaucgaggaccugcuguucaacaaagugacacuggccgacgccggcuucaucaagcaguauggcgauugucugggcgacauugccgccagggaucugauuugcgcccagaaguuuaacggacugacagugcugccuccucugcugaccgaugagaugaucgcccaguacacaucugcccugcuggccggcacaaucacaagcggcuggacauuuggagcuggcgccgcucugcagauccccuuugcuaugcagauggccuaccgguucaacggcaucggagugacccagaaugugcuguacgagaaccagaagcugaucgccaaccaguucaacagcgccaucggcaagauccaggacagccugagcagcacagcaagcgcccugggaaagcugcaggacguggucaaccagaaugcccaggcacugaacacccuggucaagcagcuguccuccaacuucggcgccaucagcucugugcugaacgauauccugagcagacuggacaaggucgaggccgaggugcagaucgacagacugaucacaggcagacugcagagccuccagacauacgugacccagcagcugaucagagccgccgagauuagagccucugccaaucuggccgccaccaagaugucugagugugugcugggccagagcaagagaguggacuuuugcggcaagggcuaccaccugaugagcuucccucagucugccccucacggcgugguguuucugcacgugacauaugugcccgcucaagagaagaauuucaccaccgcuccagccaucugccacgacggcaaagcccacuuuccuagagaaggcguguucguguccaacggcacccauugguucgugacacagcggaacuucuacgagccccagaucaucaccaccgacaacaccuucgugucuggcaacugcgacguugugaucggcauugugaacaauaccguguacgacccucugcagcccgagcuggacagcuucaaagaggaacuggacaaguacuuuaagaaccacacaagccccgacguggaccugggcgauaucagcggaaucaaugccagcgucgugaacauccagaaagagaucgaccggcugaacgagguggccaagaaucugaacgagagccugaucgaccugcaagaacuggggaaguacgagcaguacaucaaguggcccugguacaucuggcugggcuuuaucgccggacugauugccaucgugauggucacaaucaugcuguguugcaugaccagcugcuguagcugccugaagggcuguuguagcuguggcagcugcugcaaguucgacgaggacgauucugagcccgugcugaagggcgugaaacugcacuacaccugaggacuaguuauaagacugacuagcccgaugggccucccaacgggcccuccuccccuccuugcaccgagagaucucaaaggcucuuuucagagccaccaaaaaaaaaaaaaaaaaaaaaaaaaaaaaaaaaaaaaaaaaaaaaaaaaaaaaaaaaaaaaaaaaaaaaaaaaaaaaaaaaaaaaaaaaaaaaaaaaaaaa

SEQ ID NO: 24585 - RNA, 4035 nt, Artificial Sequence
  SARS-CoV-2/Wuhan/WIV05/2019__EPI_ISL_402128 spike protein mRNA gc mod (1-1273)(S477N_D614G)
aggagaaagcuuaccauguucguguuucuggugcugcugccccugguguccagccagugugugaaccugaccaccagaacacagcugccuccagccuacaccaacagcuucaccagaggcguguacuaccccgacaagguguucagauccagcgugcugcacucuacccaggaccuguuccugccuuucuucagcaacgugaccugguuccacgccauccacguguccggcaccaauggcaccaagagauucgacaaccccgugcugcccuucaacgacgggguguacuuugccagcaccgagaaguccaacaucaucagaggcuggaucuucggcaccacacuggacagcaagacccagagccugcugaucgugaacaacgccaccaacguggucaucaaagugugcgaguuccaguucugcaacgaccccuuccugggcgucuacuaccacaagaacaacaagagcuggauggaaagcgaguuccggguguacagcagcgccaacaacugcaccuucgaguacgugucccagccuuuccugauggaccuggaaggcaagcagggcaacuucaagaaccugcgcgaguucguguucaagaacaucgacggcuacuucaaaaucuacagcaagcacaccccuaucaaccucgugcgggaucugccucagggcuucucugcucuggaaccccugguggaucugcccaucggcaucaacaucacccgguuucagacacugcuggcccugcacagaagcuaccugacaccuggcgauagcagcagcggauggacagcuggugccgccgcuuacuaugugggcuaccugcagccuagaaccuuccugcugaaguacaacgagaacggcaccaucaccgacgccguggauugugcucuggauccucugagcgagacaaagugcacccugaaguccuucaccguggaaaagggcaucuaccagaccagcaacuuccgggugcagcccaccgaauccaucgugcgguuccccaauaucaccaaucugugccccuucggcgagguguucaaugccaccagauucgccucuguguacgccuggaaccggaagcggaucagcaauugcguggccgacuacuccgugcuguacaacuccgccagcuucagcaccuucaagugcuacggcguguccccuaccaagcugaacgaccugugcuucacaaacguguacgccgacagcuucgugauccggggagaugaagugcggcagauugccccuggacagacaggcaagaucgccgacuacaacuacaagcugcccgacgacuucaccggcugugugauugccuggaacagcaacaaccuggacuccaaagucggcggcaacuacaauuaccuguaccggcuguuccggaaguccaaucugaagcccuucgagcgggacaucagcaccgaaaucuaucaggccggcaacaccccuugcaacggcguggaaggcuucaacugcuacuucccacugcaguccuacggcuuucagcccacaaauggcgugggcuaucagcccuacagagugguggugcugagcuucgaacugcugcaugcuccugccacagugugcggcccuaagaaaagcaccaaucucgugaagaacaaaugcgugaacuucaacuucaacggccugaccggcaccggcgugcugacagagagcaacaagaaguuccugccauuccagcaguuuggccgggauaucgccgauaccacagacgccguuagagauccccagacacuggaaauccuggacaucaccccaugcagcuucggcggagugucugugaucaccccuggcaccaacaccagcaaucagguggcagugcuguaccagggcgugaacuguaccgaagugcccguggccauucacgccgaucagcugacaccuacauggcggguguacuccaccggcagcaauguguuucagaccagagccggcugucugaucggagccgagcacgugaacaauagcuacgagugcgacauccccaucggcgcuggcaucugugccagcuaccagacacagacaaacagccccagacgggcuagaagcguggccagccagagcaucauugccuacacaaugucucugggcgccgagaacagcguggccuacuccaacaacucuaucgcuauccccaccaacuucaccaucagcgugaccaccgagauccugccuguguccaugaccaagaccagcguggacugcaccauguacaucugcggcgauuccaccgagugcuccaaccugcugcugcaguacggcagcuucugcacccagcugaauagagcccugacagggaucgccguggaacaggacaagaacacccaagagguguucgcccaagugaagcaaaucuacaagaccccuccuaucaaggacuucggcggcuucaauuucagccagauucugcccgauccuagcaagcccagcaagcggagcuucaucgaggaccugcuguucaacaaagugacacuggccgacgccggcuucaucaagcaguauggcgauugucugggcgacauugccgccagggaucugauuugcgcccagaaguuuaacggacugacagugcugccuccucugcugaccgaugagaugaucgcccaguacacaucugcccugcuggccggcacaaucacaagcggcuggacauuuggagcuggcgccgcucugcagauccccuuugcuaugcagauggccuaccgguucaacggcaucggagugacccagaaugugcuguacgagaaccagaagcugaucgccaaccaguucaacagcgccaucggcaagauccaggacagccugagcagcacagcaagcgcccugggaaagcugcaggacguggucaaccagaaugcccaggcacugaacacccuggucaagcagcuguccuccaacuucggcgccaucagcucugugcugaacgauauccugagcagacuggacaaggucgaggccgaggugcagaucgacagacugaucacaggcagacugcagagccuccagacauacgugacccagcagcugaucagagccgccgagauuagagccucugccaaucuggccgccaccaagaugucugagugugugcugggccagagcaagagaguggacuuuugcggcaagggcuaccaccugaugagcuucccucagucugccccucacggcgugguguuucugcacgugacauaugugcccgcucaagagaagaauuucaccaccgcuccagccaucugccacgacggcaaagcccacuuuccuagagaaggcguguucguguccaacggcacccauugguucgugacacagcggaacuucuacgagccccagaucaucaccaccgacaacaccuucgugucuggcaacugcgacguugugaucggcauugugaacaauaccguguacgacccucugcagcccgagcuggacagcuucaaagaggaacuggacaaguacuuuaagaaccacacaagccccgacguggaccugggcgauaucagcggaaucaaugccagcgucgugaacauccagaaagagaucgaccggcugaacgagguggccaagaaucugaacgagagccugaucgaccugcaagaacuggggaaguacgagcaguacaucaaguggcccugguacaucuggcugggcuuuaucgccggacugauugccaucgugauggucacaaucaugcuguguugcaugaccagcugcuguagcugccugaagggcuguuguagcuguggcagcugcugcaaguucgacgaggacgauucugagcccgugcugaagggcgugaaacugcacuacaccugaggacuaguuauaagacugacuagcccgaugggccucccaacgggcccuccuccccuccuugcaccgagagaucucaaaggcucuuuucagagccaccaaaaaaaaaaaaaaaaaaaaaaaaaaaaaaaaaaaaaaaaaaaaaaaaaaaaaaaaaaaaaaaaaaaaaaaaaaaaaaaaaaaaaaaaaaaaaaaaaaaaa

SEQ ID NO: 24586 - RNA, 4035 nt, Artificial Sequence
  SARS-CoV-2/Wuhan/WIV05/2019__EPI_ISL_402128 spike protein mRNA gc mod (1-1273)(N501Y_D614G)
aggagaaagcuuaccauguucguguuucuggugcugcugccccugguguccagccagugugugaaccugaccaccagaacacagcugccuccagccuacaccaacagcuucaccagaggcguguacuaccccgacaagguguucagauccagcgugcugcacucuacccaggaccuguuccugccuuucuucagcaacgugaccugguuccacgccauccacguguccggcaccaauggcaccaagagauucgacaaccccgugcugcccuucaacgacgggguguacuuugccagcaccgagaaguccaacaucaucagaggcuggaucuucggcaccacacuggacagcaagacccagagccugcugaucgugaacaacgccaccaacguggucaucaaagugugcgaguuccaguucugcaacgaccccuuccugggcgucuacuaccacaagaacaacaagagcuggauggaaagcgaguuccggguguacagcagcgccaacaacugcaccuucgaguacgugucccagccuuuccugauggaccuggaaggcaagcagggcaacuucaagaaccugcgcgaguucguguucaagaacaucgacggcuacuucaaaaucuacagcaagcacaccccuaucaaccucgugcgggaucugccucagggcuucucugcucuggaaccccugguggaucugcccaucggcaucaacaucacccgguuucagacacugcuggcccugcacagaagcuaccugacaccuggcgauagcagcagcggauggacagcuggugccgccgcuuacuaugugggcuaccugcagccuagaaccuuccugcugaaguacaacgagaacggcaccaucaccgacgccguggauugugcucuggauccucugagcgagacaaagugcacccugaaguccuucaccguggaaaagggcaucuaccagaccagcaacuuccgggugcagcccaccgaauccaucgugcgguuccccaauaucaccaaucugugccccuucggcgagguguucaaugccaccagauucgccucuguguacgccuggaaccggaagcggaucagcaauugcguggccgacuacuccgugcuguacaacuccgccagcuucagcaccuucaagugcuacggcguguccccuaccaagcugaacgaccugugcuucacaaacguguacgccgacagcuucgugauccggggagaugaagugcggcagauugccccuggacagacaggcaagaucgccgacuacaacuacaagcugcccgacgacuucaccggcugugugauugccuggaacagcaacaaccuggacuccaaagucggcggcaacuacaauuaccuguaccggcuguuccggaaguccaaucugaagcccuucgagcgggacaucagcaccgaaaucuaucaggccggcagcaccccuugcaacggcguggaaggcuucaacugcuacuucccacugcaguccuacggcuuucagcccacauacggcgugggcuaucagcccuacagagugguggugcugagcuucgaacugcugcaugcuccugccacagugugcggcccuaagaaaagcaccaaucucgugaagaacaaaugcgugaacuucaacuucaacggccugaccggcaccggcgugcugacagagagcaacaagaaguuccugccauuccagcaguuuggccgggauaucgccgauaccacagacgccguuagagauccccagacacuggaaauccuggacaucaccccaugcagcuucggcggagugucugugaucaccccuggcaccaacaccagcaaucagguggcagugcuguaccagggcgugaacuguaccgaagugcccguggccauucacgccgaucagcugacaccuacauggcggguguacuccaccggcagcaauguguuucagaccagagccggcugucugaucggagccgagcacgugaacaauagcuacgagugcgacauccccaucggcgcuggcaucugugccagcuaccagacacagacaaacagccccagacgggcuagaagcguggccagccagagcaucauugccuacacaaugucucugggcgccgagaacagcguggccuacuccaacaacucuaucgcuauccccaccaacuucaccaucagcgugaccaccgagauccugccuguguccaugaccaagaccagcguggacugcaccauguacaucugcggcgauuccaccgagugcuccaaccugcugcugcaguacggcagcuucugcacccagcugaauagagcccugacagggaucgccguggaacaggacaagaacacccaagagguguucgcccaagugaagcaaaucuacaagaccccuccuaucaaggacuucggcggcuucaauuucagccagauucugcccgauccuagcaagcccagcaagcggagcuucaucgaggaccugcuguucaacaaagugacacuggccgacgccggcuucaucaagcaguauggcgauugucugggcgacauugccgccagggaucugauuugcgcccagaaguuuaacggacugacagugcugccuccucugcugaccgaugagaugaucgcccaguacacaucugcccugcuggccggcacaaucacaagcggcuggacauuuggagcuggcgccgcucugcagauccccuuugcuaugcagauggccuaccgguucaacggcaucggagugacccagaaugugcuguacgagaaccagaagcugaucgccaaccaguucaacagcgccaucggcaagauccaggacagccugagcagcacagcaagcgcccugggaaagcugcaggacguggucaaccagaaugcccaggcacugaacacccuggucaagcagcuguccuccaacuucggcgccaucagcucugugcugaacgauauccugagcagacuggacaaggucgaggccgaggugcagaucgacagacugaucacaggcagacugcagagccuccagacauacgugacccagcagcugaucagagccgccgagauuagagccucugccaaucuggccgccaccaagaugucugagugugugcugggccagagcaagagaguggacuuuugcggcaagggcuaccaccugaugagcuucccucagucugccccucacggcgugguguuucugcacgugacauaugugcccgcucaagagaagaauuucaccaccgcuccagccaucugccacgacggcaaagcccacuuuccuagagaaggcguguucguguccaacggcacccauugguucgugacacagcggaacuucuacgagccccagaucaucaccaccgacaacaccuucgugucuggcaacugcgacguugugaucggcauugugaacaauaccguguacgacccucugcagcccgagcuggacagcuucaaagaggaacuggacaaguacuuuaagaaccacacaagccccgacguggaccugggcgauaucagcggaaucaaugccagcgucgugaacauccagaaagagaucgaccggcugaacgagguggccaagaaucugaacgagagccugaucgaccugcaagaacuggggaaguacgagcaguacaucaaguggcccugguacaucuggcugggcuuuaucgccggacugauugccaucgugauggucacaaucaugcuguguugcaugaccagcugcuguagcugccugaagggcuguuguagcuguggcagcugcugcaaguucgacgaggacgauucugagcccgugcugaagggcgugaaacugcacuacaccugaggacuaguuauaagacugacuagcccgaugggccucccaacgggcccuccuccccuccuugcaccgagagaucucaaaggcucuuuucagagccaccaaaaaaaaaaaaaaaaaaaaaaaaaaaaaaaaaaaaaaaaaaaaaaaaaaaaaaaaaaaaaaaaaaaaaaaaaaaaaaaaaaaaaaaaaaaaaaaaaaaaa

SEQ ID NO: 24587 - RNA, 4029 nt, Artificial Sequence
  SARS-CoV-2/Wuhan/WIV05/2019__EPI_ISL_402128 spike protein mRNA gc mod (1-1273)(H69del_V70del_D614G)
aggagaaagcuuaccauguucguguuucuggugcugcugccccugguguccagccagugugugaaccugaccaccagaacacagcugccuccagccuacaccaacagcuucaccagaggcguguacuaccccgacaagguguucagauccagcgugcugcacucuacccaggaccuguuccugccuuucuucagcaacgugaccugguuccacgccaucuccggcaccaauggcaccaagagauucgacaaccccgugcugcccuucaacgacgggguguacuuugccagcaccgagaaguccaacaucaucagaggcuggaucuucggcaccacacuggacagcaagacccagagccugcugaucgugaacaacgccaccaacguggucaucaaagugugcgaguuccaguucugcaacgaccccuuccugggcgucuacuaccacaagaacaacaagagcuggauggaaagcgaguuccggguguacagcagcgccaacaacugcaccuucgaguacgugucccagccuuuccugauggaccuggaaggcaagcagggcaacuucaagaaccugcgcgaguucguguucaagaacaucgacggcuacuucaaaaucuacagcaagcacaccccuaucaaccucgugcgggaucugccucagggcuucucugcucuggaaccccugguggaucugcccaucggcaucaacaucacccgguuucagacacugcuggcccugcacagaagcuaccugacaccuggcgauagcagcagcggauggacagcuggugccgccgcuuacuaugugggcuaccugcagccuagaaccuuccugcugaaguacaacgagaacggcaccaucaccgacgccguggauugugcucuggauccucugagcgagacaaagugcacccugaaguccuucaccguggaaaagggcaucuaccagaccagcaacuuccgggugcagcccaccgaauccaucgugcgguuccccaauaucaccaaucugugccccuucggcgagguguucaaugccaccagauucgccucuguguacgccuggaaccggaagcggaucagcaauugcguggccgacuacuccgugcuguacaacuccgccagcuucagcaccuucaagugcuacggcguguccccuaccaagcugaacgaccugugcuucacaaacguguacgccgacagcuucgugauccggggagaugaagugcggcagauugccccuggacagacaggcaagaucgccgacuacaacuacaagcugcccgacgacuucaccggcugugugauugccuggaacagcaacaaccuggacuccaaagucggcggcaacuacaauuaccuguaccggcuguuccggaaguccaaucugaagcccuucgagcgggacaucagcaccgaaaucuaucaggccggcagcaccccuugcaacggcguggaaggcuucaacugcuacuucccacugcaguccuacggcuuucagcccacaaauggcgugggcuaucagcccuacagagugguggugcugagcuucgaacugcugcaugcuccugccacagugugcggcccuaagaaaagcaccaaucucgugaagaacaaaugcgugaacuucaacuucaacggccugaccggcaccggcgugcugacagagagcaacaagaaguuccugccauuccagcaguuuggccgggauaucgccgauaccacagacgccguuagagauccccagacacuggaaauccuggacaucaccccaugcagcuucggcggagugucugugaucaccccuggcaccaacaccagcaaucagguggcagugcuguaccagggcgugaacuguaccgaagugcccguggccauucacgccgaucagcugacaccuacauggcggguguacuccaccggcagcaauguguuucagaccagagccggcugucugaucggagccgagcacgugaacaauagcuacgagugcgacauccccaucggcgcuggcaucugugccagcuaccagacacagacaaacagccccagacgggcuagaagcguggccagccagagcaucauugccuacacaaugucucugggcgccgagaacagcguggccuacuccaacaacucuaucgcuauccccaccaacuucaccaucagcgugaccaccgagauccugccuguguccaugaccaagaccagcguggacugcaccauguacaucugcggcgauuccaccgagugcuccaaccugcugcugcaguacggcagcuucugcacccagcugaauagagcccugacagggaucgccguggaacaggacaagaacacccaagagguguucgcccaagugaagcaaaucuacaagaccccuccuaucaaggacuucggcggcuucaauuucagccagauucugcccgauccuagcaagcccagcaagcggagcuucaucgaggaccugcuguucaacaaagugacacuggccgacgccggcuucaucaagcaguauggcgauugucugggcgacauugccgccagggaucugauuugcgcccagaaguuuaacggacugacagugcugccuccucugcugaccgaugagaugaucgcccaguacacaucugcccugcuggccggcacaaucacaagcggcuggacauuuggagcuggcgccgcucugcagauccccuuugcuaugcagauggccuaccgguucaacggcaucggagugacccagaaugugcuguacgagaaccagaagcugaucgccaaccaguucaacagcgccaucggcaagauccaggacagccugagcagcacagcaagcgcccugggaaagcugcaggacguggucaaccagaaugcccaggcacugaacacccuggucaagcagcuguccuccaacuucggcgccaucagcucugugcugaacgauauccugagcagacuggacaaggucgaggccgaggugcagaucgacagacugaucacaggcagacugcagagccuccagacauacgugacccagcagcugaucagagccgccgagauuagagccucugccaaucuggccgccaccaagaugucugagugugugcugggccagagcaagagaguggacuuuugcggcaagggcuaccaccugaugagcuucccucagucugccccucacggcgugguguuucugcacgugacauaugugcccgcucaagagaagaauuucaccaccgcuccagccaucugccacgacggcaaagcccacuuuccuagagaaggcguguucguguccaacggcacccauugguucgugacacagcggaacuucuacgagccccagaucaucaccaccgacaacaccuucgugucuggcaacugcgacguugugaucggcauugugaacaauaccguguacgacccucugcagcccgagcuggacagcuucaaagaggaacuggacaaguacuuuaagaaccacacaagccccgacguggaccugggcgauaucagcggaaucaaugccagcgucgugaacauccagaaagagaucgaccggcugaacgagguggccaagaaucugaacgagagccugaucgaccugcaagaacuggggaaguacgagcaguacaucaaguggcccugguacaucuggcugggcuuuaucgccggacugauugccaucgugauggucacaaucaugcuguguugcaugaccagcugcuguagcugccugaagggcuguuguagcuguggcagcugcugcaaguucgacgaggacgauucugagcccgugcugaagggcgugaaacugcacuacaccugaggacuaguuauaagacugacuagcccgaugggccucccaacgggcccuccuccccuccuugcaccgagagaucucaaaggcucuuuucagagccaccaaaaaaaaaaaaaaaaaaaaaaaaaaaaaaaaaaaaaaaaaaaaaaaaaaaaaaaaaaaaaaaaaaaaaaaaaaaaaaaaaaaaaaaaaaaaaaaaaaaaa

SEQ ID NO: 24588 - RNA, 4035 nt, Artificial Sequence
  SARS-CoV-2/Wuhan/WIV05/2019__EPI_ISL_402128 spike protein mRNA gc mod (1-1273)(Y453F_D614G)
aggagaaagcuuaccauguucguguuucuggugcugcugccccugguguccagccagugugugaaccugaccaccagaacacagcugccuccagccuacaccaacagcuucaccagaggcguguacuaccccgacaagguguucagauccagcgugcugcacucuacccaggaccuguuccugccuuucuucagcaacgugaccugguuccacgccauccacguguccggcaccaauggcaccaagagauucgacaaccccgugcugcccuucaacgacgggguguacuuugccagcaccgagaaguccaacaucaucagaggcuggaucuucggcaccacacuggacagcaagacccagagccugcugaucgugaacaacgccaccaacguggucaucaaagugugcgaguuccaguucugcaacgaccccuuccugggcgucuacuaccacaagaacaacaagagcuggauggaaagcgaguuccggguguacagcagcgccaacaacugcaccuucgaguacgugucccagccuuuccugauggaccuggaaggcaagcagggcaacuucaagaaccugcgcgaguucguguucaagaacaucgacggcuacuucaaaaucuacagcaagcacaccccuaucaaccucgugcgggaucugccucagggcuucucugcucuggaaccccugguggaucugcccaucggcaucaacaucacccgguuucagacacugcuggcccugcacagaagcuaccugacaccuggcgauagcagcagcggauggacagcuggugccgccgcuuacuaugugggcuaccugcagccuagaaccuuccugcugaaguacaacgagaacggcaccaucaccgacgccguggauugugcucuggauccucugagcgagacaaagugcacccugaaguccuucaccguggaaaagggcaucuaccagaccagcaacuuccgggugcagcccaccgaauccaucgugcgguuccccaauaucaccaaucugugccccuucggcgagguguucaaugccaccagauucgccucuguguacgccuggaaccggaagcggaucagcaauugcguggccgacuacuccgugcuguacaacuccgccagcuucagcaccuucaagugcuacggcguguccccuaccaagcugaacgaccugugcuucacaaacguguacgccgacagcuucgugauccggggagaugaagugcggcagauugccccuggacagacaggcaagaucgccgacuacaacuacaagcugcccgacgacuucaccggcugugugauugccuggaacagcaacaaccuggacuccaaagucggcggcaacuacaauuaccuguuccggcuguuccggaaguccaaucugaagcccuucgagcgggacaucagcaccgaaaucuaucaggccggcagcaccccuugcaacggcguggaaggcuucaacugcuacuucccacugcaguccuacggcuuucagcccacaaauggcgugggcuaucagcccuacagagugguggugcugagcuucgaacugcugcaugcuccugccacagugugcggcccuaagaaaagcaccaaucucgugaagaacaaaugcgugaacuucaacuucaacggccugaccggcaccggcgugcugacagagagcaacaagaaguuccugccauuccagcaguuuggccgggauaucgccgauaccacagacgccguuagagauccccagacacuggaaauccuggacaucaccccaugcagcuucggcggagugucugugaucaccccuggcaccaacaccagcaaucagguggcagugcuguaccagggcgugaacuguaccgaagugcccguggccauucacgccgaucagcugacaccuacauggcggguguacuccaccggcagcaauguguuucagaccagagccggcugucugaucggagccgagcacgugaacaauagcuacgagugcgacauccccaucggcgcuggcaucugugccagcuaccagacacagacaaacagccccagacgggcuagaagcguggccagccagagcaucauugccuacacaaugucucugggcgccgagaacagcguggccuacuccaacaacucuaucgcuauccccaccaacuucaccaucagcgugaccaccgagauccugccuguguccaugaccaagaccagcguggacugcaccauguacaucugcggcgauuccaccgagugcuccaaccugcugcugcaguacggcagcuucugcacccagcugaauagagcccugacagggaucgccguggaacaggacaagaacacccaagagguguucgcccaagugaagcaaaucuacaagaccccuccuaucaaggacuucggcggcuucaauuucagccagauucugcccgauccuagcaagcccagcaagcggagcuucaucgaggaccugcuguucaacaaagugacacuggccgacgccggcuucaucaagcaguauggcgauugucugggcgacauugccgccagggaucugauuugcgcccagaaguuuaacggacugacagugcugccuccucugcugaccgaugagaugaucgcccaguacacaucugcccugcuggccggcacaaucacaagcggcuggacauuuggagcuggcgccgcucugcagauccccuuugcuaugcagauggccuaccgguucaacggcaucggagugacccagaaugugcuguacgagaaccagaagcugaucgccaaccaguucaacagcgccaucggcaagauccaggacagccugagcagcacagcaagcgcccugggaaagcugcaggacguggucaaccagaaugcccaggcacugaacacccuggucaagcagcuguccuccaacuucggcgccaucagcucugugcugaacgauauccugagcagacuggacaaggucgaggccgaggugcagaucgacagacugaucacaggcagacugcagagccuccagacauacgugacccagcagcugaucagagccgccgagauuagagccucugccaaucuggccgccaccaagaugucugagugugugcugggccagagcaagagaguggacuuuugcggcaagggcuaccaccugaugagcuucccucagucugccccucacggcgugguguuucugcacgugacauaugugcccgcucaagagaagaauuucaccaccgcuccagccaucugccacgacggcaaagcccacuuuccuagagaaggcguguucguguccaacggcacccauugguucgugacacagcggaacuucuacgagccccagaucaucaccaccgacaacaccuucgugucuggcaacugcgacguugugaucggcauugugaacaauaccguguacgacccucugcagcccgagcuggacagcuucaaagaggaacuggacaaguacuuuaagaaccacacaagccccgacguggaccugggcgauaucagcggaaucaaugccagcgucgugaacauccagaaagagaucgaccggcugaacgagguggccaagaaucugaacgagagccugaucgaccugcaagaacuggggaaguacgagcaguacaucaaguggcccugguacaucuggcugggcuuuaucgccggacugauugccaucgugauggucacaaucaugcuguguugcaugaccagcugcuguagcugccugaagggcuguuguagcuguggcagcugcugcaaguucgacgaggacgauucugagcccgugcugaagggcgugaaacugcacuacaccugaggacuaguuauaagacugacuagcccgaugggccucccaacgggcccuccuccccuccuugcaccgagagaucucaaaggcucuuuucagagccaccaaaaaaaaaaaaaaaaaaaaaaaaaaaaaaaaaaaaaaaaaaaaaaaaaaaaaaaaaaaaaaaaaaaaaaaaaaaaaaaaaaaaaaaaaaaaaaaaaaaaa

SEQ ID NO: 24589 - RNA, 4035 nt, Artificial Sequence
  SARS-CoV-2/Wuhan/WIV05/2019__EPI_ISL_402128 spike protein mRNA gc mod (1-1273)(D614G_I692V)
aggagaaagcuuaccauguucguguuucuggugcugcugccccugguguccagccagugugugaaccugaccaccagaacacagcugccuccagccuacaccaacagcuucaccagaggcguguacuaccccgacaagguguucagauccagcgugcugcacucuacccaggaccuguuccugccuuucuucagcaacgugaccugguuccacgccauccacguguccggcaccaauggcaccaagagauucgacaaccccgugcugcccuucaacgacgggguguacuuugccagcaccgagaaguccaacaucaucagaggcuggaucuucggcaccacacuggacagcaagacccagagccugcugaucgugaacaacgccaccaacguggucaucaaagugugcgaguuccaguucugcaacgaccccuuccugggcgucuacuaccacaagaacaacaagagcuggauggaaagcgaguuccggguguacagcagcgccaacaacugcaccuucgaguacgugucccagccuuuccugauggaccuggaaggcaagcagggcaacuucaagaaccugcgcgaguucguguucaagaacaucgacggcuacuucaaaaucuacagcaagcacaccccuaucaaccucgugcgggaucugccucagggcuucucugcucuggaaccccugguggaucugcccaucggcaucaacaucacccgguuucagacacugcuggcccugcacagaagcuaccugacaccuggcgauagcagcagcggauggacagcuggugccgccgcuuacuaugugggcuaccugcagccuagaaccuuccugcugaaguacaacgagaacggcaccaucaccgacgccguggauugugcucuggauccucugagcgagacaaagugcacccugaaguccuucaccguggaaaagggcaucuaccagaccagcaacuuccgggugcagcccaccgaauccaucgugcgguuccccaauaucaccaaucugugccccuucggcgagguguucaaugccaccagauucgccucuguguacgccuggaaccggaagcggaucagcaauugcguggccgacuacuccgugcuguacaacuccgccagcuucagcaccuucaagugcuacggcguguccccuaccaagcugaacgaccugugcuucacaaacguguacgccgacagcuucgugauccggggagaugaagugcggcagauugccccuggacagacaggcaagaucgccgacuacaacuacaagcugcccgacgacuucaccggcugugugauugccuggaacagcaacaaccuggacuccaaagucggcggcaacuacaauuaccuguaccggcuguuccggaaguccaaucugaagcccuucgagcgggacaucagcaccgaaaucuaucaggccggcagcaccccuugcaacggcguggaaggcuucaacugcuacuucccacugcaguccuacggcuuucagcccacaaauggcgugggcuaucagcccuacagagugguggugcugagcuucgaacugcugcaugcuccugccacagugugcggcccuaagaaaagcaccaaucucgugaagaacaaaugcgugaacuucaacuucaacggccugaccggcaccggcgugcugacagagagcaacaagaaguuccugccauuccagcaguuuggccgggauaucgccgauaccacagacgccguuagagauccccagacacuggaaauccuggacaucaccccaugcagcuucggcggagugucugugaucaccccuggcaccaacaccagcaaucagguggcagugcuguaccagggcgugaacuguaccgaagugcccguggccauucacgccgaucagcugacaccuacauggcggguguacuccaccggcagcaauguguuucagaccagagccggcugucugaucggagccgagcacgugaacaauagcuacgagugcgacauccccaucggcgcuggcaucugugccagcuaccagacacagacaaacagccccagacgggcuagaagcguggccagccagagcgugauugccuacacaaugucucugggcgccgagaacagcguggccuacuccaacaacucuaucgcuauccccaccaacuucaccaucagcgugaccaccgagauccugccuguguccaugaccaagaccagcguggacugcaccauguacaucugcggcgauuccaccgagugcuccaaccugcugcugcaguacggcagcuucugcacccagcugaauagagcccugacagggaucgccguggaacaggacaagaacacccaagagguguucgcccaagugaagcaaaucuacaagaccccuccuaucaaggacuucggcggcuucaauuucagccagauucugcccgauccuagcaagcccagcaagcggagcuucaucgaggaccugcuguucaacaaagugacacuggccgacgccggcuucaucaagcaguauggcgauugucugggcgacauugccgccagggaucugauuugcgcccagaaguuuaacggacugacagugcugccuccucugcugaccgaugagaugaucgcccaguacacaucugcccugcuggccggcacaaucacaagcggcuggacauuuggagcuggcgccgcucugcagauccccuuugcuaugcagauggccuaccgguucaacggcaucggagugacccagaaugugcuguacgagaaccagaagcugaucgccaaccaguucaacagcgccaucggcaagauccaggacagccugagcagcacagcaagcgcccugggaaagcugcaggacguggucaaccagaaugcccaggcacugaacacccuggucaagcagcuguccuccaacuucggcgccaucagcucugugcugaacgauauccugagcagacuggacaaggucgaggccgaggugcagaucgacagacugaucacaggcagacugcagagccuccagacauacgugacccagcagcugaucagagccgccgagauuagagccucugccaaucuggccgccaccaagaugucugagugugugcugggccagagcaagagaguggacuuuugcggcaagggcuaccaccugaugagcuucccucagucugccccucacggcgugguguuucugcacgugacauaugugcccgcucaagagaagaauuucaccaccgcuccagccaucugccacgacggcaaagcccacuuuccuagagaaggcguguucguguccaacggcacccauugguucgugacacagcggaacuucuacgagccccagaucaucaccaccgacaacaccuucgugucuggcaacugcgacguugugaucggcauugugaacaauaccguguacgacccucugcagcccgagcuggacagcuucaaagaggaacuggacaaguacuuuaagaaccacacaagccccgacguggaccugggcgauaucagcggaaucaaugccagcgucgugaacauccagaaagagaucgaccggcugaacgagguggccaagaaucugaacgagagccugaucgaccugcaagaacuggggaaguacgagcaguacaucaaguggcccugguacaucuggcugggcuuuaucgccggacugauugccaucgugauggucacaaucaugcuguguugcaugaccagcugcuguagcugccugaagggcuguuguagcuguggcagcugcugcaaguucgacgaggacgauucugagcccgugcugaagggcgugaaacugcacuacaccugaggacuaguuauaagacugacuagcccgaugggccucccaacgggcccuccuccccuccuugcaccgagagaucucaaaggcucuuuucagagccaccaaaaaaaaaaaaaaaaaaaaaaaaaaaaaaaaaaaaaaaaaaaaaaaaaaaaaaaaaaaaaaaaaaaaaaaaaaaaaaaaaaaaaaaaaaaaaaaaaaaaa

SEQ ID NO: 24590 - RNA, 4035 nt, Artificial Sequence
  SARS-CoV-2/Wuhan/WIV05/2019__EPI_ISL_402128 spike protein mRNA gc mod (1-1273)(D614G_M1229I)
aggagaaagcuuaccauguucguguuucuggugcugcugccccugguguccagccagugugugaaccugaccaccagaacacagcugccuccagccuacaccaacagcuucaccagaggcguguacuaccccgacaagguguucagauccagcgugcugcacucuacccaggaccuguuccugccuuucuucagcaacgugaccugguuccacgccauccacguguccggcaccaauggcaccaagagauucgacaaccccgugcugcccuucaacgacgggguguacuuugccagcaccgagaaguccaacaucaucagaggcuggaucuucggcaccacacuggacagcaagacccagagccugcugaucgugaacaacgccaccaacguggucaucaaagugugcgaguuccaguucugcaacgaccccuuccugggcgucuacuaccacaagaacaacaagagcuggauggaaagcgaguuccggguguacagcagcgccaacaacugcaccuucgaguacgugucccagccuuuccugauggaccuggaaggcaagcagggcaacuucaagaaccugcgcgaguucguguucaagaacaucgacggcuacuucaaaaucuacagcaagcacaccccuaucaaccucgugcgggaucugccucagggcuucucugcucuggaaccccugguggaucugcccaucggcaucaacaucacccgguuucagacacugcuggcccugcacagaagcuaccugacaccuggcgauagcagcagcggauggacagcuggugccgccgcuuacuaugugggcuaccugcagccuagaaccuuccugcugaaguacaacgagaacggcaccaucaccgacgccguggauugugcucuggauccucugagcgagacaaagugcacccugaaguccuucaccguggaaaagggcaucuaccagaccagcaacuuccgggugcagcccaccgaauccaucgugcgguuccccaauaucaccaaucugugccccuucggcgagguguucaaugccaccagauucgccucuguguacgccuggaaccggaagcggaucagcaauugcguggccgacuacuccgugcuguacaacuccgccagcuucagcaccuucaagugcuacggcguguccccuaccaagcugaacgaccugugcuucacaaacguguacgccgacagcuucgugauccggggagaugaagugcggcagauugccccuggacagacaggcaagaucgccgacuacaacuacaagcugcccgacgacuucaccggcugugugauugccuggaacagcaacaaccuggacuccaaagucggcggcaacuacaauuaccuguaccggcuguuccggaaguccaaucugaagcccuucgagcgggacaucagcaccgaaaucuaucaggccggcagcaccccuugcaacggcguggaaggcuucaacugcuacuucccacugcaguccuacggcuuucagcccacaaauggcgugggcuaucagcccuacagagugguggugcugagcuucgaacugcugcaugcuccugccacagugugcggcccuaagaaaagcaccaaucucgugaagaacaaaugcgugaacuucaacuucaacggccugaccggcaccggcgugcugacagagagcaacaagaaguuccugccauuccagcaguuuggccgggauaucgccgauaccacagacgccguuagagauccccagacacuggaaauccuggacaucaccccaugcagcuucggcggagugucugugaucaccccuggcaccaacaccagcaaucagguggcagugcuguaccagggcgugaacuguaccgaagugcccguggccauucacgccgaucagcugacaccuacauggcggguguacuccaccggcagcaauguguuucagaccagagccggcugucugaucggagccgagcacgugaacaauagcuacgagugcgacauccccaucggcgcuggcaucugugccagcuaccagacacagacaaacagccccagacgggcuagaagcguggccagccagagcaucauugccuacacaaugucucugggcgccgagaacagcguggccuacuccaacaacucuaucgcuauccccaccaacuucaccaucagcgugaccaccgagauccugccuguguccaugaccaagaccagcguggacugcaccauguacaucugcggcgauuccaccgagugcuccaaccugcugcugcaguacggcagcuucugcacccagcugaauagagcccugacagggaucgccguggaacaggacaagaacacccaagagguguucgcccaagugaagcaaaucuacaagaccccuccuaucaaggacuucggcggcuucaauuucagccagauucugcccgauccuagcaagcccagcaagcggagcuucaucgaggaccugcuguucaacaaagugacacuggccgacgccggcuucaucaagcaguauggcgauugucugggcgacauugccgccagggaucugauuugcgcccagaaguuuaacggacugacagugcugccuccucugcugaccgaugagaugaucgcccaguacacaucugcccugcuggccggcacaaucacaagcggcuggacauuuggagcuggcgccgcucugcagauccccuuugcuaugcagauggccuaccgguucaacggcaucggagugacccagaaugugcuguacgagaaccagaagcugaucgccaaccaguucaacagcgccaucggcaagauccaggacagccugagcagcacagcaagcgcccugggaaagcugcaggacguggucaaccagaaugcccaggcacugaacacccuggucaagcagcuguccuccaacuucggcgccaucagcucugugcugaacgauauccugagcagacuggacaaggucgaggccgaggugcagaucgacagacugaucacaggcagacugcagagccuccagacauacgugacccagcagcugaucagagccgccgagauuagagccucugccaaucuggccgccaccaagaugucugagugugugcugggccagagcaagagaguggacuuuugcggcaagggcuaccaccugaugagcuucccucagucugccccucacggcgugguguuucugcacgugacauaugugcccgcucaagagaagaauuucaccaccgcuccagccaucugccacgacggcaaagcccacuuuccuagagaaggcguguucguguccaacggcacccauugguucgugacacagcggaacuucuacgagccccagaucaucaccaccgacaacaccuucgugucuggcaacugcgacguugugaucggcauugugaacaauaccguguacgacccucugcagcccgagcuggacagcuucaaagaggaacuggacaaguacuuuaagaaccacacaagccccgacguggaccugggcgauaucagcggaaucaaugccagcgucgugaacauccagaaagagaucgaccggcugaacgagguggccaagaaucugaacgagagccugaucgaccugcaagaacuggggaaguacgagcaguacaucaaguggcccugguacaucuggcugggcuuuaucgccggacugauugccaucgugaucgucacaaucaugcuguguugcaugaccagcugcuguagcugccugaagggcuguuguagcuguggcagcugcugcaaguucgacgaggacgauucugagcccgugcugaagggcgugaaacugcacuacaccugaggacuaguuauaagacugacuagcccgaugggccucccaacgggcccuccuccccuccuugcaccgagagaucucaaaggcucuuuucagagccaccaaaaaaaaaaaaaaaaaaaaaaaaaaaaaaaaaaaaaaaaaaaaaaaaaaaaaaaaaaaaaaaaaaaaaaaaaaaaaaaaaaaaaaaaaaaaaaaaaaaaa

SEQ ID NO: 24591 - RNA, 4029 nt, Artificial Sequence
  SARS-CoV-2/Wuhan/WIV05/2019__EPI_ISL_402128 spike protein mRNA gc mod (1-1273)(H69del_V70del_A222V_Y453F_S477N_D614G_I692V)
aggagaaagcuuaccauguucguguuucuggugcugcugccccugguguccagccagugugugaaccugaccaccagaacacagcugccuccagccuacaccaacagcuucaccagaggcguguacuaccccgacaagguguucagauccagcgugcugcacucuacccaggaccuguuccugccuuucuucagcaacgugaccugguuccacgccaucuccggcaccaauggcaccaagagauucgacaaccccgugcugcccuucaacgacgggguguacuuugccagcaccgagaaguccaacaucaucagaggcuggaucuucggcaccacacuggacagcaagacccagagccugcugaucgugaacaacgccaccaacguggucaucaaagugugcgaguuccaguucugcaacgaccccuuccugggcgucuacuaccacaagaacaacaagagcuggauggaaagcgaguuccggguguacagcagcgccaacaacugcaccuucgaguacgugucccagccuuuccugauggaccuggaaggcaagcagggcaacuucaagaaccugcgcgaguucguguucaagaacaucgacggcuacuucaaaaucuacagcaagcacaccccuaucaaccucgugcgggaucugccucagggcuucucugugcuggaaccccugguggaucugcccaucggcaucaacaucacccgguuucagacacugcuggcccugcacagaagcuaccugacaccuggcgauagcagcagcggauggacagcuggugccgccgcuuacuaugugggcuaccugcagccuagaaccuuccugcugaaguacaacgagaacggcaccaucaccgacgccguggauugugcucuggauccucugagcgagacaaagugcacccugaaguccuucaccguggaaaagggcaucuaccagaccagcaacuuccgggugcagcccaccgaauccaucgugcgguuccccaauaucaccaaucugugccccuucggcgagguguucaaugccaccagauucgccucuguguacgccuggaaccggaagcggaucagcaauugcguggccgacuacuccgugcuguacaacuccgccagcuucagcaccuucaagugcuacggcguguccccuaccaagcugaacgaccugugcuucacaaacguguacgccgacagcuucgugauccggggagaugaagugcggcagauugccccuggacagacaggcaagaucgccgacuacaacuacaagcugcccgacgacuucaccggcugugugauugccuggaacagcaacaaccuggacuccaaagucggcggcaacuacaauuaccuguuccggcuguuccggaaguccaaucugaagcccuucgagcgggacaucagcaccgaaaucuaucaggccggcaacaccccuugcaacggcguggaaggcuucaacugcuacuucccacugcaguccuacggcuuucagcccacaaauggcgugggcuaucagcccuacagagugguggugcugagcuucgaacugcugcaugcuccugccacagugugcggcccuaagaaaagcaccaaucucgugaagaacaaaugcgugaacuucaacuucaacggccugaccggcaccggcgugcugacagagagcaacaagaaguuccugccauuccagcaguuuggccgggauaucgccgauaccacagacgccguuagagauccccagacacuggaaauccuggacaucaccccaugcagcuucggcggagugucugugaucaccccuggcaccaacaccagcaaucagguggcagugcuguaccagggcgugaacuguaccgaagugcccguggccauucacgccgaucagcugacaccuacauggcggguguacuccaccggcagcaauguguuucagaccagagccggcugucugaucggagccgagcacgugaacaauagcuacgagugcgacauccccaucggcgcuggcaucugugccagcuaccagacacagacaaacagccccagacgggcuagaagcguggccagccagagcgugauugccuacacaaugucucugggcgccgagaacagcguggccuacuccaacaacucuaucgcuauccccaccaacuucaccaucagcgugaccaccgagauccugccuguguccaugaccaagaccagcguggacugcaccauguacaucugcggcgauuccaccgagugcuccaaccugcugcugcaguacggcagcuucugcacccagcugaauagagcccugacagggaucgccguggaacaggacaagaacacccaagagguguucgcccaagugaagcaaaucuacaagaccccuccuaucaaggacuucggcggcuucaauuucagccagauucugcccgauccuagcaagcccagcaagcggagcuucaucgaggaccugcuguucaacaaagugacacuggccgacgccggcuucaucaagcaguauggcgauugucugggcgacauugccgccagggaucugauuugcgcccagaaguuuaacggacugacagugcugccuccucugcugaccgaugagaugaucgcccaguacacaucugcccugcuggccggcacaaucacaagcggcuggacauuuggagcuggcgccgcucugcagauccccuuugcuaugcagauggccuaccgguucaacggcaucggagugacccagaaugugcuguacgagaaccagaagcugaucgccaaccaguucaacagcgccaucggcaagauccaggacagccugagcagcacagcaagcgcccugggaaagcugcaggacguggucaaccagaaugcccaggcacugaacacccuggucaagcagcuguccuccaacuucggcgccaucagcucugugcugaacgauauccugagcagacuggacaaggucgaggccgaggugcagaucgacagacugaucacaggcagacugcagagccuccagacauacgugacccagcagcugaucagagccgccgagauuagagccucugccaaucuggccgccaccaagaugucugagugugugcugggccagagcaagagaguggacuuuugcggcaagggcuaccaccugaugagcuucccucagucugccccucacggcgugguguuucugcacgugacauaugugcccgcucaagagaagaauuucaccaccgcuccagccaucugccacgacggcaaagcccacuuuccuagagaaggcguguucguguccaacggcacccauugguucgugacacagcggaacuucuacgagccccagaucaucaccaccgacaacaccuucgugucuggcaacugcgacguugugaucggcauugugaacaauaccguguacgacccucugcagcccgagcuggacagcuucaaagaggaacuggacaaguacuuuaagaaccacacaagccccgacguggaccugggcgauaucagcggaaucaaugccagcgucgugaacauccagaaagagaucgaccggcugaacgagguggccaagaaucugaacgagagccugaucgaccugcaagaacuggggaaguacgagcaguacaucaaguggcccugguacaucuggcugggcuuuaucgccggacugauugccaucgugauggucacaaucaugcuguguugcaugaccagcugcuguagcugccugaagggcuguuguagcuguggcagcugcugcaaguucgacgaggacgauucugagcccgugcugaagggcgugaaacugcacuacaccugaggacuaguuauaagacugacuagcccgaugggccucccaacgggcccuccuccccuccuugcaccgagagaucucaaaggcucuuuucagagccaccaaaaaaaaaaaaaaaaaaaaaaaaaaaaaaaaaaaaaaaaaaaaaaaaaaaaaaaaaaaaaaaaaaaaaaaaaaaaaaaaaaaaaaaaaaaaaaaaaaaaa

SEQ ID NO: 24592 - RNA, 4029 nt, Artificial Sequence
  SARS-CoV-2/Wuhan/WIV05/2019__EPI_ISL_402128 spike protein mRNA gc mod (1-1273)(H69del_V70del_Y453F_D614G_I692V_M1229I)
aggagaaagcuuaccauguucguguuucuggugcugcugccccugguguccagccagugugugaaccugaccaccagaacacagcugccuccagccuacaccaacagcuucaccagaggcguguacuaccccgacaagguguucagauccagcgugcugcacucuacccaggaccuguuccugccuuucuucagcaacgugaccugguuccacgccaucuccggcaccaauggcaccaagagauucgacaaccccgugcugcccuucaacgacgggguguacuuugccagcaccgagaaguccaacaucaucagaggcuggaucuucggcaccacacuggacagcaagacccagagccugcugaucgugaacaacgccaccaacguggucaucaaagugugcgaguuccaguucugcaacgaccccuuccugggcgucuacuaccacaagaacaacaagagcuggauggaaagcgaguuccggguguacagcagcgccaacaacugcaccuucgaguacgugucccagccuuuccugauggaccuggaaggcaagcagggcaacuucaagaaccugcgcgaguucguguucaagaacaucgacggcuacuucaaaaucuacagcaagcacaccccuaucaaccucgugcgggaucugccucagggcuucucugcucuggaaccccugguggaucugcccaucggcaucaacaucacccgguuucagacacugcuggcccugcacagaagcuaccugacaccuggcgauagcagcagcggauggacagcuggugccgccgcuuacuaugugggcuaccugcagccuagaaccuuccugcugaaguacaacgagaacggcaccaucaccgacgccguggauugugcucuggauccucugagcgagacaaagugcacccugaaguccuucaccguggaaaagggcaucuaccagaccagcaacuuccgggugcagcccaccgaauccaucgugcgguuccccaauaucaccaaucugugccccuucggcgagguguucaaugccaccagauucgccucuguguacgccuggaaccggaagcggaucagcaauugcguggccgacuacuccgugcuguacaacuccgccagcuucagcaccuucaagugcuacggcguguccccuaccaagcugaacgaccugugcuucacaaacguguacgccgacagcuucgugauccggggagaugaagugcggcagauugccccuggacagacaggcaagaucgccgacuacaacuacaagcugcccgacgacuucaccggcugugugauugccuggaacagcaacaaccuggacuccaaagucggcggcaacuacaauuaccuguuccggcuguuccggaaguccaaucugaagcccuucgagcgggacaucagcaccgaaaucuaucaggccggcagcaccccuugcaacggcguggaaggcuucaacugcuacuucccacugcaguccuacggcuuucagcccacaaauggcgugggcuaucagcccuacagagugguggugcugagcuucgaacugcugcaugcuccugccacagugugcggcccuaagaaaagcaccaaucucgugaagaacaaaugcgugaacuucaacuucaacggccugaccggcaccggcgugcugacagagagcaacaagaaguuccugccauuccagcaguuuggccgggauaucgccgauaccacagacgccguuagagauccccagacacuggaaauccuggacaucaccccaugcagcuucggcggagugucugugaucaccccuggcaccaacaccagcaaucagguggcagugcuguaccagggcgugaacuguaccgaagugcccguggccauucacgccgaucagcugacaccuacauggcggguguacuccaccggcagcaauguguuucagaccagagccggcugucugaucggagccgagcacgugaacaauagcuacgagugcgacauccccaucggcgcuggcaucugugccagcuaccagacacagacaaacagccccagacgggcuagaagcguggccagccagagcgugauugccuacacaaugucucugggcgccgagaacagcguggccuacuccaacaacucuaucgcuauccccaccaacuucaccaucagcgugaccaccgagauccugccuguguccaugaccaagaccagcguggacugcaccauguacaucugcggcgauuccaccgagugcuccaaccugcugcugcaguacggcagcuucugcacccagcugaauagagcccugacagggaucgccguggaacaggacaagaacacccaagagguguucgcccaagugaagcaaaucuacaagaccccuccuaucaaggacuucggcggcuucaauuucagccagauucugcccgauccuagcaagcccagcaagcggagcuucaucgaggaccugcuguucaacaaagugacacuggccgacgccggcuucaucaagcaguauggcgauugucugggcgacauugccgccagggaucugauuugcgcccagaaguuuaacggacugacagugcugccuccucugcugaccgaugagaugaucgcccaguacacaucugcccugcuggccggcacaaucacaagcggcuggacauuuggagcuggcgccgcucugcagauccccuuugcuaugcagauggccuaccgguucaacggcaucggagugacccagaaugugcuguacgagaaccagaagcugaucgccaaccaguucaacagcgccaucggcaagauccaggacagccugagcagcacagcaagcgcccugggaaagcugcaggacguggucaaccagaaugcccaggcacugaacacccuggucaagcagcuguccuccaacuucggcgccaucagcucugugcugaacgauauccugagcagacuggacaaggucgaggccgaggugcagaucgacagacugaucacaggcagacugcagagccuccagacauacgugacccagcagcugaucagagccgccgagauuagagccucugccaaucuggccgccaccaagaugucugagugugugcugggccagagcaagagaguggacuuuugcggcaagggcuaccaccugaugagcuucccucagucugccccucacggcgugguguuucugcacgugacauaugugcccgcucaagagaagaauuucaccaccgcuccagccaucugccacgacggcaaagcccacuuuccuagagaaggcguguucguguccaacggcacccauugguucgugacacagcggaacuucuacgagccccagaucaucaccaccgacaacaccuucgugucuggcaacugcgacguugugaucggcauugugaacaauaccguguacgacccucugcagcccgagcuggacagcuucaaagaggaacuggacaaguacuuuaagaaccacacaagccccgacguggaccugggcgauaucagcggaaucaaugccagcgucgugaacauccagaaagagaucgaccggcugaacgagguggccaagaaucugaacgagagccugaucgaccugcaagaacuggggaaguacgagcaguacaucaaguggcccugguacaucuggcugggcuuuaucgccggacugauugccaucgugaucgucacaaucaugcuguguugcaugaccagcugcuguagcugccugaagggcuguuguagcuguggcagcugcugcaaguucgacgaggacgauucugagcccgugcugaagggcgugaaacugcacuacaccugaggacuaguuauaagacugacuagcccgaugggccucccaacgggcccuccuccccuccuugcaccgagagaucucaaaggcucuuuucagagccaccaaaaaaaaaaaaaaaaaaaaaaaaaaaaaaaaaaaaaaaaaaaaaaaaaaaaaaaaaaaaaaaaaaaaaaaaaaaaaaaaaaaaaaaaaaaaaaaaaaaaa

SEQ ID NO: 24593 - RNA, 4026 nt, Artificial Sequence
  SARS-CoV-2/Wuhan/WIV05/2019__EPI_ISL_402128 spike protein mRNA gc mod (1-1273)(H69del_V70del_Y144del_N501Y_A570D_D614G_P681H_T716I_S982 A_D1118H)
aggagaaagcuuaccauguucguguuucuggugcugcugccccugguguccagccagugugugaaccugaccaccagaacacagcugccuccagccuacaccaacagcuucaccagaggcguguacuaccccgacaagguguucagauccagcgugcugcacucuacccaggaccuguuccugccuuucuucagcaacgugaccugguuccacgccaucuccggcaccaauggcaccaagagauucgacaaccccgugcugcccuucaacgacgggguguacuuugccagcaccgagaaguccaacaucaucagaggcuggaucuucggcaccacacuggacagcaagacccagagccugcugaucgugaacaacgccaccaacguggucaucaaagugugcgaguuccaguucugcaacgaccccuuccugggcgucuaccacaagaacaacaagagcuggauggaaagcgaguuccggguguacagcagcgccaacaacugcaccuucgaguacgugucccagccuuuccugauggaccuggaaggcaagcagggcaacuucaagaaccugcgcgaguucguguucaagaacaucgacggcuacuucaaaaucuacagcaagcacaccccuaucaaccucgugcgggaucugccucagggcuucucugcucuggaaccccugguggaucugcccaucggcaucaacaucacccgguuucagacacugcuggcccugcacagaagcuaccugacaccuggcgauagcagcagcggauggacagcuggugccgccgcuuacuaugugggcuaccugcagccuagaaccuuccugcugaaguacaacgagaacggcaccaucaccgacgccguggauugugcucuggauccucugagcgagacaaagugcacccugaaguccuucaccguggaaaagggcaucuaccagaccagcaacuuccgggugcagcccaccgaauccaucgugcgguuccccaauaucaccaaucugugccccuucggcgagguguucaaugccaccagauucgccucuguguacgccuggaaccggaagcggaucagcaauugcguggccgacuacuccgugcuguacaacuccgccagcuucagcaccuucaagugcuacggcguguccccuaccaagcugaacgaccugugcuucacaaacguguacgccgacagcuucgugauccggggagaugaagugcggcagauugccccuggacagacaggcaagaucgccgacuacaacuacaagcugcccgacgacuucaccggcugugugauugccuggaacagcaacaaccuggacuccaaagucggcggcaacuacaauuaccuguaccggcuguuccggaaguccaaucugaagcccuucgagcgggacaucagcaccgaaaucuaucaggccggcagcaccccuugcaacggcguggaaggcuucaacugcuacuucccacugcaguccuacggcuuucagcccacauacggcgugggcuaucagcccuacagagugguggugcugagcuucgaacugcugcaugcuccugccacagugugcggcccuaagaaaagcaccaaucucgugaagaacaaaugcgugaacuucaacuucaacggccugaccggcaccggcgugcugacagagagcaacaagaaguuccugccauuccagcaguuuggccgggauaucgacgauaccacagacgccguuagagauccccagacacuggaaauccuggacaucaccccaugcagcuucggcggagugucugugaucaccccuggcaccaacaccagcaaucagguggcagugcuguaccagggcgugaacuguaccgaagugcccguggccauucacgccgaucagcugacaccuacauggcggguguacuccaccggcagcaauguguuucagaccagagccggcugucugaucggagccgagcacgugaacaauagcuacgagugcgacauccccaucggcgcuggcaucugugccagcuaccagacacagacaaacagccacagacgggcuagaagcguggccagccagagcaucauugccuacacaaugucucugggcgccgagaacagcguggccuacuccaacaacucuaucgcuauccccaucaacuucaccaucagcgugaccaccgagauccugccuguguccaugaccaagaccagcguggacugcaccauguacaucugcggcgauuccaccgagugcuccaaccugcugcugcaguacggcagcuucugcacccagcugaauagagcccugacagggaucgccguggaacaggacaagaacacccaagagguguucgcccaagugaagcaaaucuacaagaccccuccuaucaaggacuucggcggcuucaauuucagccagauucugcccgauccuagcaagcccagcaagcggagcuucaucgaggaccugcuguucaacaaagugacacuggccgacgccggcuucaucaagcaguauggcgauugucugggcgacauugccgccagggaucugauuugcgcccagaaguuuaacggacugacagugcugccuccucugcugaccgaugagaugaucgcccaguacacaucugcccugcuggccggcacaaucacaagcggcuggacauuuggagcuggcgccgcucugcagauccccuuugcuaugcagauggccuaccgguucaacggcaucggagugacccagaaugugcuguacgagaaccagaagcugaucgccaaccaguucaacagcgccaucggcaagauccaggacagccugagcagcacagcaagcgcccugggaaagcugcaggacguggucaaccagaaugcccaggcacugaacacccuggucaagcagcuguccuccaacuucggcgccaucagcucugugcugaacgauauccuggccagacuggacaaggucgaggccgaggugcagaucgacagacugaucacaggcagacugcagagccuccagacauacgugacccagcagcugaucagagccgccgagauuagagccucugccaaucuggccgccaccaagaugucugagugugugcugggccagagcaagagaguggacuuuugcggcaagggcuaccaccugaugagcuucccucagucugccccucacggcgugguguuucugcacgugacauaugugcccgcucaagagaagaauuucaccaccgcuccagccaucugccacgacggcaaagcccacuuuccuagagaaggcguguucguguccaacggcacccauugguucgugacacagcggaacuucuacgagccccagaucaucaccacccacaacaccuucgugucuggcaacugcgacguugugaucggcauugugaacaauaccguguacgacccucugcagcccgagcuggacagcuucaaagaggaacuggacaaguacuuuaagaaccacacaagccccgacguggaccugggcgauaucagcggaaucaaugccagcgucgugaacauccagaaagagaucgaccggcugaacgagguggccaagaaucugaacgagagccugaucgaccugcaagaacuggggaaguacgagcaguacaucaaguggcccugguacaucuggcugggcuuuaucgccggacugauugccaucgugauggucacaaucaugcuguguugcaugaccagcugcuguagcugccugaagggcuguuguagcuguggcagcugcugcaaguucgacgaggacgauucugagcccgugcugaagggcgugaaacugcacuacaccugaggacuaguuauaagacugacuagcccgaugggccucccaacgggcccuccuccccuccuugcaccgagagaucucaaaggcucuuuucagagccaccaaaaaaaaaaaaaaaaaaaaaaaaaaaaaaaaaaaaaaaaaaaaaaaaaaaaaaaaaaaaaaaaaaaaaaaaaaaaaaaaaaaaaaaaaaaaaaaaaaaaa

SEQ ID NO: 24594 - RNA, 4035 nt, Artificial Sequence
  SARS-CoV-2/Wuhan/WIV05/2019__EPI_ISL_402128 spike protein mRNA gc mod (1-1273)(K417N_E484K_N501Y_D614G)
aggagaaagcuuaccauguucguguuucuggugcugcugccccugguguccagccagugugugaaccugaccaccagaacacagcugccuccagccuacaccaacagcuucaccagaggcguguacuaccccgacaagguguucagauccagcgugcugcacucuacccaggaccuguuccugccuuucuucagcaacgugaccugguuccacgccauccacguguccggcaccaauggcaccaagagauucgacaaccccgugcugcccuucaacgacgggguguacuuugccagcaccgagaaguccaacaucaucagaggcuggaucuucggcaccacacuggacagcaagacccagagccugcugaucgugaacaacgccaccaacguggucaucaaagugugcgaguuccaguucugcaacgaccccuuccugggcgucuacuaccacaagaacaacaagagcuggauggaaagcgaguuccggguguacagcagcgccaacaacugcaccuucgaguacgugucccagccuuuccugauggaccuggaaggcaagcagggcaacuucaagaaccugcgcgaguucguguucaagaacaucgacggcuacuucaaaaucuacagcaagcacaccccuaucaaccucgugcgggaucugccucagggcuucucugcucuggaaccccugguggaucugcccaucggcaucaacaucacccgguuucagacacugcuggcccugcacagaagcuaccugacaccuggcgauagcagcagcggauggacagcuggugccgccgcuuacuaugugggcuaccugcagccuagaaccuuccugcugaaguacaacgagaacggcaccaucaccgacgccguggauugugcucuggauccucugagcgagacaaagugcacccugaaguccuucaccguggaaaagggcaucuaccagaccagcaacuuccgggugcagcccaccgaauccaucgugcgguuccccaauaucaccaaucugugccccuucggcgagguguucaaugccaccagauucgccucuguguacgccuggaaccggaagcggaucagcaauugcguggccgacuacuccgugcuguacaacuccgccagcuucagcaccuucaagugcuacggcguguccccuaccaagcugaacgaccugugcuucacaaacguguacgccgacagcuucgugauccggggagaugaagugcggcagauugccccuggacagacaggcaacaucgccgacuacaacuacaagcugcccgacgacuucaccggcugugugauugccuggaacagcaacaaccuggacuccaaagucggcggcaacuacaauuaccuguaccggcuguuccggaaguccaaucugaagcccuucgagcgggacaucagcaccgaaaucuaucaggccggcagcaccccuugcaacggcgugaagggcuucaacugcuacuucccacugcaguccuacggcuuucagcccacauacggcgugggcuaucagcccuacagagugguggugcugagcuucgaacugcugcaugcuccugccacagugugcggcccuaagaaaagcaccaaucucgugaagaacaaaugcgugaacuucaacuucaacggccugaccggcaccggcgugcugacagagagcaacaagaaguuccugccauuccagcaguuuggccgggauaucgccgauaccacagacgccguuagagauccccagacacuggaaauccuggacaucaccccaugcagcuucggcggagugucugugaucaccccuggcaccaacaccagcaaucagguggcagugcuguaccagggcgugaacuguaccgaagugcccguggccauucacgccgaucagcugacaccuacauggcggguguacuccaccggcagcaauguguuucagaccagagccggcugucugaucggagccgagcacgugaacaauagcuacgagugcgacauccccaucggcgcuggcaucugugccagcuaccagacacagacaaacagccccagacgggcuagaagcguggccagccagagcaucauugccuacacaaugucucugggcgccgagaacagcguggccuacuccaacaacucuaucgcuauccccaccaacuucaccaucagcgugaccaccgagauccugccuguguccaugaccaagaccagcguggacugcaccauguacaucugcggcgauuccaccgagugcuccaaccugcugcugcaguacggcagcuucugcacccagcugaauagagcccugacagggaucgccguggaacaggacaagaacacccaagagguguucgcccaagugaagcaaaucuacaagaccccuccuaucaaggacuucggcggcuucaauuucagccagauucugcccgauccuagcaagcccagcaagcggagcuucaucgaggaccugcuguucaacaaagugacacuggccgacgccggcuucaucaagcaguauggcgauugucugggcgacauugccgccagggaucugauuugcgcccagaaguuuaacggacugacagugcugccuccucugcugaccgaugagaugaucgcccaguacacaucugcccugcuggccggcacaaucacaagcggcuggacauuuggagcuggcgccgcucugcagauccccuuugcuaugcagauggccuaccgguucaacggcaucggagugacccagaaugugcuguacgagaaccagaagcugaucgccaaccaguucaacagcgccaucggcaagauccaggacagccugagcagcacagcaagcgcccugggaaagcugcaggacguggucaaccagaaugcccaggcacugaacacccuggucaagcagcuguccuccaacuucggcgccaucagcucugugcugaacgauauccugagcagacuggacaaggucgaggccgaggugcagaucgacagacugaucacaggcagacugcagagccuccagacauacgugacccagcagcugaucagagccgccgagauuagagccucugccaaucuggccgccaccaagaugucugagugugugcugggccagagcaagagaguggacuuuugcggcaagggcuaccaccugaugagcuucccucagucugccccucacggcgugguguuucugcacgugacauaugugcccgcucaagagaagaauuucaccaccgcuccagccaucugccacgacggcaaagcccacuuuccuagagaaggcguguucguguccaacggcacccauugguucgugacacagcggaacuucuacgagccccagaucaucaccaccgacaacaccuucgugucuggcaacugcgacguugugaucggcauugugaacaauaccguguacgacccucugcagcccgagcuggacagcuucaaagaggaacuggacaaguacuuuaagaaccacacaagccccgacguggaccugggcgauaucagcggaaucaaugccagcgucgugaacauccagaaagagaucgaccggcugaacgagguggccaagaaucugaacgagagccugaucgaccugcaagaacuggggaaguacgagcaguacaucaaguggcccugguacaucuggcugggcuuuaucgccggacugauugccaucgugauggucacaaucaugcuguguugcaugaccagcugcuguagcugccugaagggcuguuguagcuguggcagcugcugcaaguucgacgaggacgauucugagcccgugcugaagggcgugaaacugcacuacaccugaggacuaguuauaagacugacuagcccgaugggccucccaacgggcccuccuccccuccuugcaccgagagaucucaaaggcucuuuucagagccaccaaaaaaaaaaaaaaaaaaaaaaaaaaaaaaaaaaaaaaaaaaaaaaaaaaaaaaaaaaaaaaaaaaaaaaaaaaaaaaaaaaaaaaaaaaaaaaaaaaaaa

SEQ ID NO: 24595 - RNA, 4026 nt, Artificial Sequence
  SARS-CoV-2/Wuhan/WIV05/2019__EPI_ISL_402128 spike protein mRNA gc mod (1-1273)(L18F_D80A_D215G_L242del_A243del_L244del_R246I_K417N_E484 K_N501Y_D614G_A701V)
aggagaaagcuuaccauguucguguuucuggugcugcugccccugguguccagccagugugugaacuucaccaccagaacacagcugccuccagccuacaccaacagcuucaccagaggcguguacuaccccgacaagguguucagauccagcgugcugcacucuacccaggaccuguuccugccuuucuucagcaacgugaccugguuccacgccauccacguguccggcaccaauggcaccaagagauucgccaaccccgugcugcccuucaacgacgggguguacuuugccagcaccgagaaguccaacaucaucagaggcuggaucuucggcaccacacuggacagcaagacccagagccugcugaucgugaacaacgccaccaacguggucaucaaagugugcgaguuccaguucugcaacgaccccuuccugggcgucuacuaccacaagaacaacaagagcuggauggaaagcgaguuccggguguacagcagcgccaacaacugcaccuucgaguacgugucccagccuuuccugauggaccuggaaggcaagcagggcaacuucaagaaccugcgcgaguucguguucaagaacaucgacggcuacuucaaaaucuacagcaagcacaccccuaucaaccucgugcggggccugccucagggcuucucugcucuggaaccccugguggaucugcccaucggcaucaacaucacccgguuucagacacugcacaucagcuaccugacaccuggcgauagcagcagcggauggacagcuggugccgccgcuuacuaugugggcuaccugcagccuagaaccuuccugcugaaguacaacgagaacggcaccaucaccgacgccguggauugugcucuggauccucugagcgagacaaagugcacccugaaguccuucaccguggaaaagggcaucuaccagaccagcaacuuccgggugcagcccaccgaauccaucgugcgguuccccaauaucaccaaucugugccccuucggcgagguguucaaugccaccagauucgccucuguguacgccuggaaccggaagcggaucagcaauugcguggccgacuacuccgugcuguacaacuccgccagcuucagcaccuucaagugcuacggcguguccccuaccaagcugaacgaccugugcuucacaaacguguacgccgacagcuucgugauccggggagaugaagugcggcagauugccccuggacagacaggcaacaucgccgacuacaacuacaagcugcccgacgacuucaccggcugugugauugccuggaacagcaacaaccuggacuccaaagucggcggcaacuacaauuaccuguaccggcuguuccggaaguccaaucugaagcccuucgagcgggacaucagcaccgaaaucuaucaggccggcagcaccccuugcaacggcgugaagggcuucaacugcuacuucccacugcaguccuacggcuuucagcccacauacggcgugggcuaucagcccuacagagugguggugcugagcuucgaacugcugcaugcuccugccacagugugcggcccuaagaaaagcaccaaucucgugaagaacaaaugcgugaacuucaacuucaacggccugaccggcaccggcgugcugacagagagcaacaagaaguuccugccauuccagcaguuuggccgggauaucgccgauaccacagacgccguuagagauccccagacacuggaaauccuggacaucaccccaugcagcuucggcggagugucugugaucaccccuggcaccaacaccagcaaucagguggcagugcuguaccagggcgugaacuguaccgaagugcccguggccauucacgccgaucagcugacaccuacauggcggguguacuccaccggcagcaauguguuucagaccagagccggcugucugaucggagccgagcacgugaacaauagcuacgagugcgacauccccaucggcgcuggcaucugugccagcuaccagacacagacaaacagccccagacgggcuagaagcguggccagccagagcaucauugccuacacaaugucucugggcguggagaacagcguggccuacuccaacaacucuaucgcuauccccaccaacuucaccaucagcgugaccaccgagauccugccuguguccaugaccaagaccagcguggacugcaccauguacaucugcggcgauuccaccgagugcuccaaccugcugcugcaguacggcagcuucugcacccagcugaauagagcccugacagggaucgccguggaacaggacaagaacacccaagagguguucgcccaagugaagcaaaucuacaagaccccuccuaucaaggacuucggcggcuucaauuucagccagauucugcccgauccuagcaagcccagcaagcggagcuucaucgaggaccugcuguucaacaaagugacacuggccgacgccggcuucaucaagcaguauggcgauugucugggcgacauugccgccagggaucugauuugcgcccagaaguuuaacggacugacagugcugccuccucugcugaccgaugagaugaucgcccaguacacaucugcccugcuggccggcacaaucacaagcggcuggacauuuggagcuggcgccgcucugcagauccccuuugcuaugcagauggccuaccgguucaacggcaucggagugacccagaaugugcuguacgagaaccagaagcugaucgccaaccaguucaacagcgccaucggcaagauccaggacagccugagcagcacagcaagcgcccugggaaagcugcaggacguggucaaccagaaugcccaggcacugaacacccuggucaagcagcuguccuccaacuucggcgccaucagcucugugcugaacgauauccugagcagacuggacaaggucgaggccgaggugcagaucgacagacugaucacaggcagacugcagagccuccagacauacgugacccagcagcugaucagagccgccgagauuagagccucugccaaucuggccgccaccaagaugucugagugugugcugggccagagcaagagaguggacuuuugcggcaagggcuaccaccugaugagcuucccucagucugccccucacggcgugguguuucugcacgugacauaugugcccgcucaagagaagaauuucaccaccgcuccagccaucugccacgacggcaaagcccacuuuccuagagaaggcguguucguguccaacggcacccauugguucgugacacagcggaacuucuacgagccccagaucaucaccaccgacaacaccuucgugucuggcaacugcgacguugugaucggcauugugaacaauaccguguacgacccucugcagcccgagcuggacagcuucaaagaggaacuggacaaguacuuuaagaaccacacaagccccgacguggaccugggcgauaucagcggaaucaaugccagcgucgugaacauccagaaagagaucgaccggcugaacgagguggccaagaaucugaacgagagccugaucgaccugcaagaacuggggaaguacgagcaguacaucaaguggcccugguacaucuggcugggcuuuaucgccggacugauugccaucgugauggucacaaucaugcuguguugcaugaccagcugcuguagcugccugaagggcuguuguagcuguggcagcugcugcaaguucgacgaggacgauucugagcccgugcugaagggcgugaaacugcacuacaccugaggacuaguuauaagacugacuagcccgaugggccucccaacgggcccuccuccccuccuugcaccgagagaucucaaaggcucuuuucagagccaccaaaaaaaaaaaaaaaaaaaaaaaaaaaaaaaaaaaaaaaaaaaaaaaaaaaaaaaaaaaaaaaaaaaaaaaaaaaaaaaaaaaaaaaaaaaaaaaaaaaaa

SEQ ID NO: 24596 - RNA, 4035 nt, Artificial Sequence
  SARS-CoV-2/Wuhan/WIV05/2019__EPI_ISL_402128 spike protein mRNA gc mod (1-1273)(E484K_D614G)
aggagaaagcuuaccauguucguguuucuggugcugcugccccugguguccagccagugugugaaccugaccaccagaacacagcugccuccagccuacaccaacagcuucaccagaggcguguacuaccccgacaagguguucagauccagcgugcugcacucuacccaggaccuguuccugccuuucuucagcaacgugaccugguuccacgccauccacguguccggcaccaauggcaccaagagauucgacaaccccgugcugcccuucaacgacgggguguacuuugccagcaccgagaaguccaacaucaucagaggcuggaucuucggcaccacacuggacagcaagacccagagccugcugaucgugaacaacgccaccaacguggucaucaaagugugcgaguuccaguucugcaacgaccccuuccugggcgucuacuaccacaagaacaacaagagcuggauggaaagcgaguuccggguguacagcagcgccaacaacugcaccuucgaguacgugucccagccuuuccugauggaccuggaaggcaagcagggcaacuucaagaaccugcgcgaguucguguucaagaacaucgacggcuacuucaaaaucuacagcaagcacaccccuaucaaccucgugcgggaucugccucagggcuucucugcucuggaaccccugguggaucugcccaucggcaucaacaucacccgguuucagacacugcuggcccugcacagaagcuaccugacaccuggcgauagcagcagcggauggacagcuggugccgccgcuuacuaugugggcuaccugcagccuagaaccuuccugcugaaguacaacgagaacggcaccaucaccgacgccguggauugugcucuggauccucugagcgagacaaagugcacccugaaguccuucaccguggaaaagggcaucuaccagaccagcaacuuccgggugcagcccaccgaauccaucgugcgguuccccaauaucaccaaucugugccccuucggcgagguguucaaugccaccagauucgccucuguguacgccuggaaccggaagcggaucagcaauugcguggccgacuacuccgugcuguacaacuccgccagcuucagcaccuucaagugcuacggcguguccccuaccaagcugaacgaccugugcuucacaaacguguacgccgacagcuucgugauccggggagaugaagugcggcagauugccccuggacagacaggcaagaucgccgacuacaacuacaagcugcccgacgacuucaccggcugugugauugccuggaacagcaacaaccuggacuccaaagucggcggcaacuacaauuaccuguaccggcuguuccggaaguccaaucugaagcccuucgagcgggacaucagcaccgaaaucuaucaggccggcagcaccccuugcaacggcgugaagggcuucaacugcuacuucccacugcaguccuacggcuuucagcccacaaauggcgugggcuaucagcccuacagagugguggugcugagcuucgaacugcugcaugcuccugccacagugugcggcccuaagaaaagcaccaaucucgugaagaacaaaugcgugaacuucaacuucaacggccugaccggcaccggcgugcugacagagagcaacaagaaguuccugccauuccagcaguuuggccgggauaucgccgauaccacagacgccguuagagauccccagacacuggaaauccuggacaucaccccaugcagcuucggcggagugucugugaucaccccuggcaccaacaccagcaaucagguggcagugcuguaccagggcgugaacuguaccgaagugcccguggccauucacgccgaucagcugacaccuacauggcggguguacuccaccggcagcaauguguuucagaccagagccggcugucugaucggagccgagcacgugaacaauagcuacgagugcgacauccccaucggcgcuggcaucugugccagcuaccagacacagacaaacagccccagacgggcuagaagcguggccagccagagcaucauugccuacacaaugucucugggcgccgagaacagcguggccuacuccaacaacucuaucgcuauccccaccaacuucaccaucagcgugaccaccgagauccugccuguguccaugaccaagaccagcguggacugcaccauguacaucugcggcgauuccaccgagugcuccaaccugcugcugcaguacggcagcuucugcacccagcugaauagagcccugacagggaucgccguggaacaggacaagaacacccaagagguguucgcccaagugaagcaaaucuacaagaccccuccuaucaaggacuucggcggcuucaauuucagccagauucugcccgauccuagcaagcccagcaagcggagcuucaucgaggaccugcuguucaacaaagugacacuggccgacgccggcuucaucaagcaguauggcgauugucugggcgacauugccgccagggaucugauuugcgcccagaaguuuaacggacugacagugcugccuccucugcugaccgaugagaugaucgcccaguacacaucugcccugcuggccggcacaaucacaagcggcuggacauuuggagcuggcgccgcucugcagauccccuuugcuaugcagauggccuaccgguucaacggcaucggagugacccagaaugugcuguacgagaaccagaagcugaucgccaaccaguucaacagcgccaucggcaagauccaggacagccugagcagcacagcaagcgcccugggaaagcugcaggacguggucaaccagaaugcccaggcacugaacacccuggucaagcagcuguccuccaacuucggcgccaucagcucugugcugaacgauauccugagcagacuggacaaggucgaggccgaggugcagaucgacagacugaucacaggcagacugcagagccuccagacauacgugacccagcagcugaucagagccgccgagauuagagccucugccaaucuggccgccaccaagaugucugagugugugcugggccagagcaagagaguggacuuuugcggcaagggcuaccaccugaugagcuucccucagucugccccucacggcgugguguuucugcacgugacauaugugcccgcucaagagaagaauuucaccaccgcuccagccaucugccacgacggcaaagcccacuuuccuagagaaggcguguucguguccaacggcacccauugguucgugacacagcggaacuucuacgagccccagaucaucaccaccgacaacaccuucgugucuggcaacugcgacguugugaucggcauugugaacaauaccguguacgacccucugcagcccgagcuggacagcuucaaagaggaacuggacaaguacuuuaagaaccacacaagccccgacguggaccugggcgauaucagcggaaucaaugccagcgucgugaacauccagaaagagaucgaccggcugaacgagguggccaagaaucugaacgagagccugaucgaccugcaagaacuggggaaguacgagcaguacaucaaguggcccugguacaucuggcugggcuuuaucgccggacugauugccaucgugauggucacaaucaugcuguguugcaugaccagcugcuguagcugccugaagggcuguuguagcuguggcagcugcugcaaguucgacgaggacgauucugagcccgugcugaagggcgugaaacugcacuacaccugaggacuaguuauaagacugacuagcccgaugggccucccaacgggcccuccuccccuccuugcaccgagagaucucaaaggcucuuuucagagccaccaaaaaaaaaaaaaaaaaaaaaaaaaaaaaaaaaaaaaaaaaaaaaaaaaaaaaaaaaaaaaaaaaaaaaaaaaaaaaaaaaaaaaaaaaaaaaaaaaaaaa

SEQ ID NO: 24597 - RNA, 4035 nt, Artificial Sequence
  SARS-CoV-2/Wuhan/WIV05/2019__EPI_ISL_402128 spike protein mRNA gc mod (1-1273)(L18F_T20N_P26S_D138Y_R190S_K417T_E484K_N501Y_D614G_H655Y _T1027I)
aggagaaagcuuaccauguucguguuucuggugcugcugccccugguguccagccagugugugaacuucaccaacagaacacagcugccuagcgccuacaccaacagcuucaccagaggcguguacuaccccgacaagguguucagauccagcgugcugcacucuacccaggaccuguuccugccuuucuucagcaacgugaccugguuccacgccauccacguguccggcaccaauggcaccaagagauucgacaaccccgugcugcccuucaacgacgggguguacuuugccagcaccgagaaguccaacaucaucagaggcuggaucuucggcaccacacuggacagcaagacccagagccugcugaucgugaacaacgccaccaacguggucaucaaagugugcgaguuccaguucugcaacuaccccuuccugggcgucuacuaccacaagaacaacaagagcuggauggaaagcgaguuccggguguacagcagcgccaacaacugcaccuucgaguacgugucccagccuuuccugauggaccuggaaggcaagcagggcaacuucaagaaccugagcgaguucguguucaagaacaucgacggcuacuucaaaaucuacagcaagcacaccccuaucaaccucgugcgggaucugccucagggcuucucugcucuggaaccccugguggaucugcccaucggcaucaacaucacccgguuucagacacugcuggcccugcacagaagcuaccugacaccuggcgauagcagcagcggauggacagcuggugccgccgcuuacuaugugggcuaccugcagccuagaaccuuccugcugaaguacaacgagaacggcaccaucaccgacgccguggauugugcucuggauccucugagcgagacaaagugcacccugaaguccuucaccguggaaaagggcaucuaccagaccagcaacuuccgggugcagcccaccgaauccaucgugcgguuccccaauaucaccaaucugugccccuucggcgagguguucaaugccaccagauucgccucuguguacgccuggaaccggaagcggaucagcaauugcguggccgacuacuccgugcuguacaacuccgccagcuucagcaccuucaagugcuacggcguguccccuaccaagcugaacgaccugugcuucacaaacguguacgccgacagcuucgugauccggggagaugaagugcggcagauugccccuggacagacaggcaccaucgccgacuacaacuacaagcugcccgacgacuucaccggcugugugauugccuggaacagcaacaaccuggacuccaaagucggcggcaacuacaauuaccuguaccggcuguuccggaaguccaaucugaagcccuucgagcgggacaucagcaccgaaaucuaucaggccggcagcaccccuugcaacggcgugaagggcuucaacugcuacuucccacugcaguccuacggcuuucagcccacauacggcgugggcuaucagcccuacagagugguggugcugagcuucgaacugcugcaugcuccugccacagugugcggcccuaagaaaagcaccaaucucgugaagaacaaaugcgugaacuucaacuucaacggccugaccggcaccggcgugcugacagagagcaacaagaaguuccugccauuccagcaguuuggccgggauaucgccgauaccacagacgccguuagagauccccagacacuggaaauccuggacaucaccccaugcagcuucggcggagugucugugaucaccccuggcaccaacaccagcaaucagguggcagugcuguaccagggcgugaacuguaccgaagugcccguggccauucacgccgaucagcugacaccuacauggcggguguacuccaccggcagcaauguguuucagaccagagccggcugucugaucggagccgaguacgugaacaauagcuacgagugcgacauccccaucggcgcuggcaucugugccagcuaccagacacagacaaacagccccagacgggcuagaagcguggccagccagagcaucauugccuacacaaugucucugggcgccgagaacagcguggccuacuccaacaacucuaucgcuauccccaccaacuucaccaucagcgugaccaccgagauccugccuguguccaugaccaagaccagcguggacugcaccauguacaucugcggcgauuccaccgagugcuccaaccugcugcugcaguacggcagcuucugcacccagcugaauagagcccugacagggaucgccguggaacaggacaagaacacccaagagguguucgcccaagugaagcaaaucuacaagaccccuccuaucaaggacuucggcggcuucaauuucagccagauucugcccgauccuagcaagcccagcaagcggagcuucaucgaggaccugcuguucaacaaagugacacuggccgacgccggcuucaucaagcaguauggcgauugucugggcgacauugccgccagggaucugauuugcgcccagaaguuuaacggacugacagugcugccuccucugcugaccgaugagaugaucgcccaguacacaucugcccugcuggccggcacaaucacaagcggcuggacauuuggagcuggcgccgcucugcagauccccuuugcuaugcagauggccuaccgguucaacggcaucggagugacccagaaugugcuguacgagaaccagaagcugaucgccaaccaguucaacagcgccaucggcaagauccaggacagccugagcagcacagcaagcgcccugggaaagcugcaggacguggucaaccagaaugcccaggcacugaacacccuggucaagcagcuguccuccaacuucggcgccaucagcucugugcugaacgauauccugagcagacuggacaaggucgaggccgaggugcagaucgacagacugaucacaggcagacugcagagccuccagacauacgugacccagcagcugaucagagccgccgagauuagagccucugccaaucuggccgccaucaagaugucugagugugugcugggccagagcaagagaguggacuuuugcggcaagggcuaccaccugaugagcuucccucagucugccccucacggcgugguguuucugcacgugacauaugugcccgcucaagagaagaauuucaccaccgcuccagccaucugccacgacggcaaagcccacuuuccuagagaaggcguguucguguccaacggcacccauugguucgugacacagcggaacuucuacgagccccagaucaucaccaccgacaacaccuucgugucuggcaacugcgacguugugaucggcauugugaacaauaccguguacgacccucugcagcccgagcuggacagcuucaaagaggaacuggacaaguacuuuaagaaccacacaagccccgacguggaccugggcgauaucagcggaaucaaugccagcgucgugaacauccagaaagagaucgaccggcugaacgagguggccaagaaucugaacgagagccugaucgaccugcaagaacuggggaaguacgagcaguacaucaaguggcccugguacaucuggcugggcuuuaucgccggacugauugccaucgugauggucacaaucaugcuguguugcaugaccagcugcuguagcugccugaagggcuguuguagcuguggcagcugcugcaaguucgacgaggacgauucugagcccgugcugaagggcgugaaacugcacuacaccugaggacuaguuauaagacugacuagcccgaugggccucccaacgggcccuccuccccuccuugcaccgagagaucucaaaggcucuuuucagagccaccaaaaaaaaaaaaaaaaaaaaaaaaaaaaaaaaaaaaaaaaaaaaaaaaaaaaaaaaaaaaaaaaaaaaaaaaaaaaaaaaaaaaaaaaaaaaaaaaaaaaa

SEQ ID NO: 24598 - RNA, 4035 nt, Artificial Sequence
  SARS-CoV-2/Wuhan/WIV05/2019__EPI_ISL_402128 spike protein mRNA gc mod (1-1273)(S13I_W152C_L452R_D614G)
aggagaaagcuuaccauguucguguuucuggugcugcugccccugguguccauccagugugugaaccugaccaccagaacacagcugccuccagccuacaccaacagcuucaccagaggcguguacuaccccgacaagguguucagauccagcgugcugcacucuacccaggaccuguuccugccuuucuucagcaacgugaccugguuccacgccauccacguguccggcaccaauggcaccaagagauucgacaaccccgugcugcccuucaacgacgggguguacuuugccagcaccgagaaguccaacaucaucagaggcuggaucuucggcaccacacuggacagcaagacccagagccugcugaucgugaacaacgccaccaacguggucaucaaagugugcgaguuccaguucugcaacgaccccuuccugggcgucuacuaccacaagaacaacaagagcugcauggaaagcgaguuccggguguacagcagcgccaacaacugcaccuucgaguacgugucccagccuuuccugauggaccuggaaggcaagcagggcaacuucaagaaccugcgcgaguucguguucaagaacaucgacggcuacuucaaaaucuacagcaagcacaccccuaucaaccucgugcgggaucugccucagggcuucucugcucuggaaccccugguggaucugcccaucggcaucaacaucacccgguuucagacacugcuggcccugcacagaagcuaccugacaccuggcgauagcagcagcggauggacagcuggugccgccgcuuacuaugugggcuaccugcagccuagaaccuuccugcugaaguacaacgagaacggcaccaucaccgacgccguggauugugcucuggauccucugagcgagacaaagugcacccugaaguccuucaccguggaaaagggcaucuaccagaccagcaacuuccgggugcagcccaccgaauccaucgugcgguuccccaauaucaccaaucugugccccuucggcgagguguucaaugccaccagauucgccucuguguacgccuggaaccggaagcggaucagcaauugcguggccgacuacuccgugcuguacaacuccgccagcuucagcaccuucaagugcuacggcguguccccuaccaagcugaacgaccugugcuucacaaacguguacgccgacagcuucgugauccggggagaugaagugcggcagauugccccuggacagacaggcaagaucgccgacuacaacuacaagcugcccgacgacuucaccggcugugugauugccuggaacagcaacaaccuggacuccaaagucggcggcaacuacaauuaccgcuaccggcuguuccggaaguccaaucugaagcccuucgagcgggacaucagcaccgaaaucuaucaggccggcagcaccccuugcaacggcguggaaggcuucaacugcuacuucccacugcaguccuacggcuuucagcccacaaauggcgugggcuaucagcccuacagagugguggugcugagcuucgaacugcugcaugcuccugccacagugugcggcccuaagaaaagcaccaaucucgugaagaacaaaugcgugaacuucaacuucaacggccugaccggcaccggcgugcugacagagagcaacaagaaguuccugccauuccagcaguuuggccgggauaucgccgauaccacagacgccguuagagauccccagacacuggaaauccuggacaucaccccaugcagcuucggcggagugucugugaucaccccuggcaccaacaccagcaaucagguggcagugcuguaccagggcgugaacuguaccgaagugcccguggccauucacgccgaucagcugacaccuacauggcggguguacuccaccggcagcaauguguuucagaccagagccggcugucugaucggagccgagcacgugaacaauagcuacgagugcgacauccccaucggcgcuggcaucugugccagcuaccagacacagacaaacagccccagacgggcuagaagcguggccagccagagcaucauugccuacacaaugucucugggcgccgagaacagcguggccuacuccaacaacucuaucgcuauccccaccaacuucaccaucagcgugaccaccgagauccugccuguguccaugaccaagaccagcguggacugcaccauguacaucugcggcgauuccaccgagugcuccaaccugcugcugcaguacggcagcuucugcacccagcugaauagagcccugacagggaucgccguggaacaggacaagaacacccaagagguguucgcccaagugaagcaaaucuacaagaccccuccuaucaaggacuucggcggcuucaauuucagccagauucugcccgauccuagcaagcccagcaagcggagcuucaucgaggaccugcuguucaacaaagugacacuggccgacgccggcuucaucaagcaguauggcgauugucugggcgacauugccgccagggaucugauuugcgcccagaaguuuaacggacugacagugcugccuccucugcugaccgaugagaugaucgcccaguacacaucugcccugcuggccggcacaaucacaagcggcuggacauuuggagcuggcgccgcucugcagauccccuuugcuaugcagauggccuaccgguucaacggcaucggagugacccagaaugugcuguacgagaaccagaagcugaucgccaaccaguucaacagcgccaucggcaagauccaggacagccugagcagcacagcaagcgcccugggaaagcugcaggacguggucaaccagaaugcccaggcacugaacacccuggucaagcagcuguccuccaacuucggcgccaucagcucugugcugaacgauauccugagcagacuggacaaggucgaggccgaggugcagaucgacagacugaucacaggcagacugcagagccuccagacauacgugacccagcagcugaucagagccgccgagauuagagccucugccaaucuggccgccaccaagaugucugagugugugcugggccagagcaagagaguggacuuuugcggcaagggcuaccaccugaugagcuucccucagucugccccucacggcgugguguuucugcacgugacauaugugcccgcucaagagaagaauuucaccaccgcuccagccaucugccacgacggcaaagcccacuuuccuagagaaggcguguucguguccaacggcacccauugguucgugacacagcggaacuucuacgagccccagaucaucaccaccgacaacaccuucgugucuggcaacugcgacguugugaucggcauugugaacaauaccguguacgacccucugcagcccgagcuggacagcuucaaagaggaacuggacaaguacuuuaagaaccacacaagccccgacguggaccugggcgauaucagcggaaucaaugccagcgucgugaacauccagaaagagaucgaccggcugaacgagguggccaagaaucugaacgagagccugaucgaccugcaagaacuggggaaguacgagcaguacaucaaguggcccugguacaucuggcugggcuuuaucgccggacugauugccaucgugauggucacaaucaugcuguguugcaugaccagcugcuguagcugccugaagggcuguuguagcuguggcagcugcugcaaguucgacgaggacgauucugagcccgugcugaagggcgugaaacugcacuacaccugaggacuaguuauaagacugacuagcccgaugggccucccaacgggcccuccuccccuccuugcaccgagagaucucaaaggcucuuuucagagccaccaaaaaaaaaaaaaaaaaaaaaaaaaaaaaaaaaaaaaaaaaaaaaaaaaaaaaaaaaaaaaaaaaaaaaaaaaaaaaaaaaaaaaaaaaaaaaaaaaaaaa

SEQ ID NO: 24599 - RNA, 4035 nt, Artificial Sequence
  SARS-CoV-2/Wuhan/WIV05/2019__EPI_ISL_402128 spike protein mRNA gc mod (1-1273)
aggagaaagcuuaccauguucguguuccuggugcugcugccucugguguccagccagugugugaaccugaccaccagaacacagcugccuccagccuacaccaacagcuuuaccagaggcguguacuaccccgacaagguguucagauccagcgugcugcacucuacccaggaccuguuccugccuuucuucagcaacgugaccugguuccacgccauccacguguccggcaccaauggcaccaagagauucgacaaccccgugcugcccuucaacgacgggguguacuuugccagcaccgagaaguccaacaucaucagaggcuggaucuucggcaccacacuggacagcaagacccagagccugcugaucgugaacaacgccaccaacguggucaucaaagugugcgaguuccaguucugcaacgaccccuuccugggcgucuacuaccacaagaacaacaagagcuggauggaaagcgaguuccggguguacagcagcgccaacaacugcaccuucgaguacgugucccagccuuuccugauggaccuggaaggcaagcagggcaacuucaagaaccugcgcgaguucguguuuaagaacaucgacggcuacuucaagaucuacagcaagcacaccccuaucaaccucgugcgggaucugccucagggcuucucugcucuggaaccccugguggaucugcccaucggcaucaacaucacccgguuucagacacugcuggcccugcacagaagcuaccugacaccuggcgauagcagcagcggauggacagcuggugccgccgcuuacuaugugggcuaccugcagccuagaaccuuccugcugaaguacaacgagaacggcaccaucaccgacgccguggauugugcucuggauccucugagcgagacaaagugcacccugaaguccuucaccguggaaaagggcaucuaccagaccagcaacuuccgggugcagcccaccgaauccaucgugcgguuccccaauaucaccaaucugugccccuucggcgagguguucaaugccaccagauucgccucuguguacgccuggaaccggaagcggaucagcaauugcguggccgacuacuccgugcuguacaacuccgccagcuucagcaccuucaagugcuacggcguguccccuaccaagcugaacgaccugugcuucacaaacguguacgccgacagcuucgugauccggggagaugaagugcggcagauugccccuggacagacaggcaagaucgccgacuacaacuacaagcugcccgacgacuucaccggcugugugauugccuggaacagcaacaaccuggacuccaaagucggcggcaacuacaauuaccuguaccggcuguuccggaaguccaaucugaagcccuucgagcgggacaucuccaccgagaucuaucaggccggcagcaccccuuguaacggcguggaaggcuucaacugcuacuucccacugcaguccuacggcuuucagcccacaaauggcgugggcuaucagcccuacagagugguggugcugagcuucgaacugcugcaugccccugccacagugugcggcccuaagaaaagcaccaaucucgugaagaacaaaugcgugaacuucaacuucaacggccugaccggcaccggcgugcugacagagagcaacaagaaguuccugccauuccagcaguuuggccgggauaucgccgauaccacagacgccguuagagauccccagacacuggaaauccuggacaucaccccuugcagcuucggcggagugucugugaucaccccuggcaccaacaccagcaaucagguggcagugcuguaccaggacgugaacuguaccgaagugcccguggccauucacgccgaucagcugacaccuacauggcggguguacuccaccggcagcaauguguuucagaccagagccggcugucugaucggagccgagcacgugaacaauagcuacgagugcgacauccccaucggcgcuggaaucugcgccagcuaccagacacagacaaacagcccucggagagccagaagcguggccagccagagcaucauugccuacacaaugucucugggcgccgagaacagcguggccuacuccaacaacucuaucgcuauccccaccaacuucaccaucagcgugaccacagagauccugccuguguccaugaccaagaccagcguggacugcaccauguacaucugcggcgauuccaccgagugcuccaaccugcugcugcaguacggcagcuucugcacccagcugaauagagcccugacagggaucgccguggaacaggacaagaacacccaagagguguucgcccaagugaagcagaucuacaagaccccuccuaucaaggacuucggcggcuucaauuucagccagauucugcccgauccuagcaagcccagcaagcggagcuucaucgaggaccugcuguucaacaaagugacacuggccgacgccggcuucaucaagcaguauggcgauugucugggcgacauugccgccagggaucugauuugcgcccagaaguuuaacggacugacagugcugccuccucugcugaccgaugagaugaucgcccaguacacaucugcccugcuggccggcacaaucacaagcggcuggacauuuggagcaggcgccgcucugcagauccccuuugcuaugcagauggccuaccgguucaacggcaucggagugacccagaaugugcuguacgagaaccagaagcugaucgccaaccaguucaacagcgccaucggcaagauccaggacagccugagcagcacagcaagcgcccugggaaagcugcaggacguggucaaccagaaugcccaggcacugaacacccuggucaagcagcuguccuccaacuucggcgccaucagcucugugcugaacgauauccugagcagacuggacaaggucgaggccgaggugcagaucgacagacugaucacaggcagacugcagagccuccagacauacgugacccagcagcugaucagagccgccgagauuagagccucugccaaucuggccgccaccaagaugucugagugugugcugggccagagcaagagaguggacuuuugcggcaagggcuaccaccugaugagcuucccucagucugccccucacggcgugguguuucugcacgugacauaugugcccgcucaagagaagaauuucaccaccgcuccagccaucugccacgacggcaaagcccacuuuccuagagaaggcguguucguguccaacggcacccauugguucgugacacagcggaacuucuacgagccccagaucaucaccaccgacaacaccuucgugucuggcaacugcgacgucgugaucggcauugugaacaauaccguguacgacccucugcagcccgagcuggacagcuucaaagaggaacuggacaaguacuuuaagaaccacacaagccccgacguggaccugggcgauaucagcggaaucaaugccagcgucgugaacauccagaaagagaucgaccggcugaacgagguggccaagaaucugaacgagagccugaucgaccugcaagaacuggggaaguacgagcaguacaucaaguggcccugguacaucuggcugggcuuuaucgccggacugauugccaucgugauggucacaaucaugcuguguugcaugaccagcugcuguagcugccugaagggcuguuguagcuguggcagcugcugcaaguucgacgaggacgauucugagcccgugcugaagggcgugaaacugcacuacacaugaggacuaguuauaagacugacuagcccgaugggccucccaacgggcccuccuccccuccuugcaccgagagaucucaaaggcucuuuucagagccaccaaaaaaaaaaaaaaaaaaaaaaaaaaaaaaaaaaaaaaaaaaaaaaaaaaaaaaaaaaaaaaaaaaaaaaaaaaaaaaaaaaaaaaaaaaaaaaaaaaaaa

SEQ ID NO: 24600 - RNA, 4035 nt, Artificial Sequence
  SARS-CoV-2/Wuhan/WIV05/2019__EPI_ISL_402128 spike protein mRNA gc mod (1-1273)(D614G)
aggagaaagcuuaccauguucguguuccuggugcugcugccucugguguccagccagugugugaaccugaccaccagaacacagcugccuccagccuacaccaacagcuuuaccagaggcguguacuaccccgacaagguguucagauccagcgugcugcacucuacccaggaccuguuccugccuuucuucagcaacgugaccugguuccacgccauccacguguccggcaccaauggcaccaagagauucgacaaccccgugcugcccuucaacgacgggguguacuuugccagcaccgagaaguccaacaucaucagaggcuggaucuucggcaccacacuggacagcaagacccagagccugcugaucgugaacaacgccaccaacguggucaucaaagugugcgaguuccaguucugcaacgaccccuuccugggcgucuacuaccacaagaacaacaagagcuggauggaaagcgaguuccggguguacagcagcgccaacaacugcaccuucgaguacgugucccagccuuuccugauggaccuggaaggcaagcagggcaacuucaagaaccugcgcgaguucguguuuaagaacaucgacggcuacuucaagaucuacagcaagcacaccccuaucaaccucgugcgggaucugccucagggcuucucugcucuggaaccccugguggaucugcccaucggcaucaacaucacccgguuucagacacugcuggcccugcacagaagcuaccugacaccuggcgauagcagcagcggauggacagcuggugccgccgcuuacuaugugggcuaccugcagccuagaaccuuccugcugaaguacaacgagaacggcaccaucaccgacgccguggauugugcucuggauccucugagcgagacaaagugcacccugaaguccuucaccguggaaaagggcaucuaccagaccagcaacuuccgggugcagcccaccgaauccaucgugcgguuccccaauaucaccaaucugugccccuucggcgagguguucaaugccaccagauucgccucuguguacgccuggaaccggaagcggaucagcaauugcguggccgacuacuccgugcuguacaacuccgccagcuucagcaccuucaagugcuacggcguguccccuaccaagcugaacgaccugugcuucacaaacguguacgccgacagcuucgugauccggggagaugaagugcggcagauugccccuggacagacaggcaagaucgccgacuacaacuacaagcugcccgacgacuucaccggcugugugauugccuggaacagcaacaaccuggacuccaaagucggcggcaacuacaauuaccuguaccggcuguuccggaaguccaaucugaagcccuucgagcgggacaucuccaccgagaucuaucaggccggcagcaccccuuguaacggcguggaaggcuucaacugcuacuucccacugcaguccuacggcuuucagcccacaaauggcgugggcuaucagcccuacagagugguggugcugagcuucgaacugcugcaugccccugccacagugugcggcccuaagaaaagcaccaaucucgugaagaacaaaugcgugaacuucaacuucaacggccugaccggcaccggcgugcugacagagagcaacaagaaguuccugccauuccagcaguuuggccgggauaucgccgauaccacagacgccguuagagauccccagacacuggaaauccuggacaucaccccuugcagcuucggcggagugucugugaucaccccuggcaccaacaccagcaaucagguggcagugcuguaccagggcgugaacuguaccgaagugcccguggccauucacgccgaucagcugacaccuacauggcggguguacuccaccggcagcaauguguuucagaccagagccggcugucugaucggagccgagcacgugaacaauagcuacgagugcgacauccccaucggcgcuggaaucugcgccagcuaccagacacagacaaacagcccucggagagccagaagcguggccagccagagcaucauugccuacacaaugucucugggcgccgagaacagcguggccuacuccaacaacucuaucgcuauccccaccaacuucaccaucagcgugaccacagagauccugccuguguccaugaccaagaccagcguggacugcaccauguacaucugcggcgauuccaccgagugcuccaaccugcugcugcaguacggcagcuucugcacccagcugaauagagcccugacagggaucgccguggaacaggacaagaacacccaagagguguucgcccaagugaagcagaucuacaagaccccuccuaucaaggacuucggcggcuucaauuucagccagauucugcccgauccuagcaagcccagcaagcggagcuucaucgaggaccugcuguucaacaaagugacacuggccgacgccggcuucaucaagcaguauggcgauugucugggcgacauugccgccagggaucugauuugcgcccagaaguuuaacggacugacagugcugccuccucugcugaccgaugagaugaucgcccaguacacaucugcccugcuggccggcacaaucacaagcggcuggacauuuggagcaggcgccgcucugcagauccccuuugcuaugcagauggccuaccgguucaacggcaucggagugacccagaaugugcuguacgagaaccagaagcugaucgccaaccaguucaacagcgccaucggcaagauccaggacagccugagcagcacagcaagcgcccugggaaagcugcaggacguggucaaccagaaugcccaggcacugaacacccuggucaagcagcuguccuccaacuucggcgccaucagcucugugcugaacgauauccugagcagacuggacaaggucgaggccgaggugcagaucgacagacugaucacaggcagacugcagagccuccagacauacgugacccagcagcugaucagagccgccgagauuagagccucugccaaucuggccgccaccaagaugucugagugugugcugggccagagcaagagaguggacuuuugcggcaagggcuaccaccugaugagcuucccucagucugccccucacggcgugguguuucugcacgugacauaugugcccgcucaagagaagaauuucaccaccgcuccagccaucugccacgacggcaaagcccacuuuccuagagaaggcguguucguguccaacggcacccauugguucgugacacagcggaacuucuacgagccccagaucaucaccaccgacaacaccuucgugucuggcaacugcgacgucgugaucggcauugugaacaauaccguguacgacccucugcagcccgagcuggacagcuucaaagaggaacuggacaaguacuuuaagaaccacacaagccccgacguggaccugggcgauaucagcggaaucaaugccagcgucgugaacauccagaaagagaucgaccggcugaacgagguggccaagaaucugaacgagagccugaucgaccugcaagaacuggggaaguacgagcaguacaucaaguggcccugguacaucuggcugggcuuuaucgccggacugauugccaucgugauggucacaaucaugcuguguugcaugaccagcugcuguagcugccugaagggcuguuguagcuguggcagcugcugcaaguucgacgaggacgauucugagcccgugcugaagggcgugaaacugcacuacacaugaggacuaguuauaagacugacuagcccgaugggccucccaacgggcccuccuccccuccuugcaccgagagaucucaaaggcucuuuucagagccaccaaaaaaaaaaaaaaaaaaaaaaaaaaaaaaaaaaaaaaaaaaaaaaaaaaaaaaaaaaaaaaaaaaaaaaaaaaaaaaaaaaaaaaaaaaaaaaaaaaaaa

SEQ ID NO: 24601 - RNA, 4035 nt, Artificial Sequence
  SARS-CoV-2/Wuhan/WIV05/2019__EPI_ISL_402128 spike protein mRNA gc mod (1-1273)(A222V_D614G)
aggagaaagcuuaccauguucguguuccuggugcugcugccucugguguccagccagugugugaaccugaccaccagaacacagcugccuccagccuacaccaacagcuuuaccagaggcguguacuaccccgacaagguguucagauccagcgugcugcacucuacccaggaccuguuccugccuuucuucagcaacgugaccugguuccacgccauccacguguccggcaccaauggcaccaagagauucgacaaccccgugcugcccuucaacgacgggguguacuuugccagcaccgagaaguccaacaucaucagaggcuggaucuucggcaccacacuggacagcaagacccagagccugcugaucgugaacaacgccaccaacguggucaucaaagugugcgaguuccaguucugcaacgaccccuuccugggcgucuacuaccacaagaacaacaagagcuggauggaaagcgaguuccggguguacagcagcgccaacaacugcaccuucgaguacgugucccagccuuuccugauggaccuggaaggcaagcagggcaacuucaagaaccugcgcgaguucguguuuaagaacaucgacggcuacuucaagaucuacagcaagcacaccccuaucaaccucgugcgggaucugccucagggcuucucugugcuggaaccccugguggaucugcccaucggcaucaacaucacccgguuucagacacugcuggcccugcacagaagcuaccugacaccuggcgauagcagcagcggauggacagcuggugccgccgcuuacuaugugggcuaccugcagccuagaaccuuccugcugaaguacaacgagaacggcaccaucaccgacgccguggauugugcucuggauccucugagcgagacaaagugcacccugaaguccuucaccguggaaaagggcaucuaccagaccagcaacuuccgggugcagcccaccgaauccaucgugcgguuccccaauaucaccaaucugugccccuucggcgagguguucaaugccaccagauucgccucuguguacgccuggaaccggaagcggaucagcaauugcguggccgacuacuccgugcuguacaacuccgccagcuucagcaccuucaagugcuacggcguguccccuaccaagcugaacgaccugugcuucacaaacguguacgccgacagcuucgugauccggggagaugaagugcggcagauugccccuggacagacaggcaagaucgccgacuacaacuacaagcugcccgacgacuucaccggcugugugauugccuggaacagcaacaaccuggacuccaaagucggcggcaacuacaauuaccuguaccggcuguuccggaaguccaaucugaagcccuucgagcgggacaucuccaccgagaucuaucaggccggcagcaccccuuguaacggcguggaaggcuucaacugcuacuucccacugcaguccuacggcuuucagcccacaaauggcgugggcuaucagcccuacagagugguggugcugagcuucgaacugcugcaugccccugccacagugugcggcccuaagaaaagcaccaaucucgugaagaacaaaugcgugaacuucaacuucaacggccugaccggcaccggcgugcugacagagagcaacaagaaguuccugccauuccagcaguuuggccgggauaucgccgauaccacagacgccguuagagauccccagacacuggaaauccuggacaucaccccuugcagcuucggcggagugucugugaucaccccuggcaccaacaccagcaaucagguggcagugcuguaccagggcgugaacuguaccgaagugcccguggccauucacgccgaucagcugacaccuacauggcggguguacuccaccggcagcaauguguuucagaccagagccggcugucugaucggagccgagcacgugaacaauagcuacgagugcgacauccccaucggcgcuggaaucugcgccagcuaccagacacagacaaacagcccucggagagccagaagcguggccagccagagcaucauugccuacacaaugucucugggcgccgagaacagcguggccuacuccaacaacucuaucgcuauccccaccaacuucaccaucagcgugaccacagagauccugccuguguccaugaccaagaccagcguggacugcaccauguacaucugcggcgauuccaccgagugcuccaaccugcugcugcaguacggcagcuucugcacccagcugaauagagcccugacagggaucgccguggaacaggacaagaacacccaagagguguucgcccaagugaagcagaucuacaagaccccuccuaucaaggacuucggcggcuucaauuucagccagauucugcccgauccuagcaagcccagcaagcggagcuucaucgaggaccugcuguucaacaaagugacacuggccgacgccggcuucaucaagcaguauggcgauugucugggcgacauugccgccagggaucugauuugcgcccagaaguuuaacggacugacagugcugccuccucugcugaccgaugagaugaucgcccaguacacaucugcccugcuggccggcacaaucacaagcggcuggacauuuggagcaggcgccgcucugcagauccccuuugcuaugcagauggccuaccgguucaacggcaucggagugacccagaaugugcuguacgagaaccagaagcugaucgccaaccaguucaacagcgccaucggcaagauccaggacagccugagcagcacagcaagcgcccugggaaagcugcaggacguggucaaccagaaugcccaggcacugaacacccuggucaagcagcuguccuccaacuucggcgccaucagcucugugcugaacgauauccugagcagacuggacaaggucgaggccgaggugcagaucgacagacugaucacaggcagacugcagagccuccagacauacgugacccagcagcugaucagagccgccgagauuagagccucugccaaucuggccgccaccaagaugucugagugugugcugggccagagcaagagaguggacuuuugcggcaagggcuaccaccugaugagcuucccucagucugccccucacggcgugguguuucugcacgugacauaugugcccgcucaagagaagaauuucaccaccgcuccagccaucugccacgacggcaaagcccacuuuccuagagaaggcguguucguguccaacggcacccauugguucgugacacagcggaacuucuacgagccccagaucaucaccaccgacaacaccuucgugucuggcaacugcgacgucgugaucggcauugugaacaauaccguguacgacccucugcagcccgagcuggacagcuucaaagaggaacuggacaaguacuuuaagaaccacacaagccccgacguggaccugggcgauaucagcggaaucaaugccagcgucgugaacauccagaaagagaucgaccggcugaacgagguggccaagaaucugaacgagagccugaucgaccugcaagaacuggggaaguacgagcaguacaucaaguggcccugguacaucuggcugggcuuuaucgccggacugauugccaucgugauggucacaaucaugcuguguugcaugaccagcugcuguagcugccugaagggcuguuguagcuguggcagcugcugcaaguucgacgaggacgauucugagcccgugcugaagggcgugaaacugcacuacacaugaggacuaguuauaagacugacuagcccgaugggccucccaacgggcccuccuccccuccuugcaccgagagaucucaaaggcucuuuucagagccaccaaaaaaaaaaaaaaaaaaaaaaaaaaaaaaaaaaaaaaaaaaaaaaaaaaaaaaaaaaaaaaaaaaaaaaaaaaaaaaaaaaaaaaaaaaaaaaaaaaaaa

SEQ ID NO: 24602 - RNA, 4035 nt, Artificial Sequence
  SARS-CoV-2/Wuhan/WIV05/2019__EPI_ISL_402128 spike protein mRNA gc mod (1-1273)(N439K_D614G)
aggagaaagcuuaccauguucguguuccuggugcugcugccucugguguccagccagugugugaaccugaccaccagaacacagcugccuccagccuacaccaacagcuuuaccagaggcguguacuaccccgacaagguguucagauccagcgugcugcacucuacccaggaccuguuccugccuuucuucagcaacgugaccugguuccacgccauccacguguccggcaccaauggcaccaagagauucgacaaccccgugcugcccuucaacgacgggguguacuuugccagcaccgagaaguccaacaucaucagaggcuggaucuucggcaccacacuggacagcaagacccagagccugcugaucgugaacaacgccaccaacguggucaucaaagugugcgaguuccaguucugcaacgaccccuuccugggcgucuacuaccacaagaacaacaagagcuggauggaaagcgaguuccggguguacagcagcgccaacaacugcaccuucgaguacgugucccagccuuuccugauggaccuggaaggcaagcagggcaacuucaagaaccugcgcgaguucguguuuaagaacaucgacggcuacuucaagaucuacagcaagcacaccccuaucaaccucgugcgggaucugccucagggcuucucugcucuggaaccccugguggaucugcccaucggcaucaacaucacccgguuucagacacugcuggcccugcacagaagcuaccugacaccuggcgauagcagcagcggauggacagcuggugccgccgcuuacuaugugggcuaccugcagccuagaaccuuccugcugaaguacaacgagaacggcaccaucaccgacgccguggauugugcucuggauccucugagcgagacaaagugcacccugaaguccuucaccguggaaaagggcaucuaccagaccagcaacuuccgggugcagcccaccgaauccaucgugcgguuccccaauaucaccaaucugugccccuucggcgagguguucaaugccaccagauucgccucuguguacgccuggaaccggaagcggaucagcaauugcguggccgacuacuccgugcuguacaacuccgccagcuucagcaccuucaagugcuacggcguguccccuaccaagcugaacgaccugugcuucacaaacguguacgccgacagcuucgugauccggggagaugaagugcggcagauugccccuggacagacaggcaagaucgccgacuacaacuacaagcugcccgacgacuucaccggcugugugauugccuggaacagcaagaaccuggacuccaaagucggcggcaacuacaauuaccuguaccggcuguuccggaaguccaaucugaagcccuucgagcgggacaucuccaccgagaucuaucaggccggcagcaccccuuguaacggcguggaaggcuucaacugcuacuucccacugcaguccuacggcuuucagcccacaaauggcgugggcuaucagcccuacagagugguggugcugagcuucgaacugcugcaugccccugccacagugugcggcccuaagaaaagcaccaaucucgugaagaacaaaugcgugaacuucaacuucaacggccugaccggcaccggcgugcugacagagagcaacaagaaguuccugccauuccagcaguuuggccgggauaucgccgauaccacagacgccguuagagauccccagacacuggaaauccuggacaucaccccuugcagcuucggcggagugucugugaucaccccuggcaccaacaccagcaaucagguggcagugcuguaccagggcgugaacuguaccgaagugcccguggccauucacgccgaucagcugacaccuacauggcggguguacuccaccggcagcaauguguuucagaccagagccggcugucugaucggagccgagcacgugaacaauagcuacgagugcgacauccccaucggcgcuggaaucugcgccagcuaccagacacagacaaacagcccucggagagccagaagcguggccagccagagcaucauugccuacacaaugucucugggcgccgagaacagcguggccuacuccaacaacucuaucgcuauccccaccaacuucaccaucagcgugaccacagagauccugccuguguccaugaccaagaccagcguggacugcaccauguacaucugcggcgauuccaccgagugcuccaaccugcugcugcaguacggcagcuucugcacccagcugaauagagcccugacagggaucgccguggaacaggacaagaacacccaagagguguucgcccaagugaagcagaucuacaagaccccuccuaucaaggacuucggcggcuucaauuucagccagauucugcccgauccuagcaagcccagcaagcggagcuucaucgaggaccugcuguucaacaaagugacacuggccgacgccggcuucaucaagcaguauggcgauugucugggcgacauugccgccagggaucugauuugcgcccagaaguuuaacggacugacagugcugccuccucugcugaccgaugagaugaucgcccaguacacaucugcccugcuggccggcacaaucacaagcggcuggacauuuggagcaggcgccgcucugcagauccccuuugcuaugcagauggccuaccgguucaacggcaucggagugacccagaaugugcuguacgagaaccagaagcugaucgccaaccaguucaacagcgccaucggcaagauccaggacagccugagcagcacagcaagcgcccugggaaagcugcaggacguggucaaccagaaugcccaggcacugaacacccuggucaagcagcuguccuccaacuucggcgccaucagcucugugcugaacgauauccugagcagacuggacaaggucgaggccgaggugcagaucgacagacugaucacaggcagacugcagagccuccagacauacgugacccagcagcugaucagagccgccgagauuagagccucugccaaucuggccgccaccaagaugucugagugugugcugggccagagcaagagaguggacuuuugcggcaagggcuaccaccugaugagcuucccucagucugccccucacggcgugguguuucugcacgugacauaugugcccgcucaagagaagaauuucaccaccgcuccagccaucugccacgacggcaaagcccacuuuccuagagaaggcguguucguguccaacggcacccauugguucgugacacagcggaacuucuacgagccccagaucaucaccaccgacaacaccuucgugucuggcaacugcgacgucgugaucggcauugugaacaauaccguguacgacccucugcagcccgagcuggacagcuucaaagaggaacuggacaaguacuuuaagaaccacacaagccccgacguggaccugggcgauaucagcggaaucaaugccagcgucgugaacauccagaaagagaucgaccggcugaacgagguggccaagaaucugaacgagagccugaucgaccugcaagaacuggggaaguacgagcaguacaucaaguggcccugguacaucuggcugggcuuuaucgccggacugauugccaucgugauggucacaaucaugcuguguugcaugaccagcugcuguagcugccugaagggcuguuguagcuguggcagcugcugcaaguucgacgaggacgauucugagcccgugcugaagggcgugaaacugcacuacacaugaggacuaguuauaagacugacuagcccgaugggccucccaacgggcccuccuccccuccuugcaccgagagaucucaaaggcucuuuucagagccaccaaaaaaaaaaaaaaaaaaaaaaaaaaaaaaaaaaaaaaaaaaaaaaaaaaaaaaaaaaaaaaaaaaaaaaaaaaaaaaaaaaaaaaaaaaaaaaaaaaaaa

SEQ ID NO: 24603 - RNA, 4035 nt, Artificial Sequence
  SARS-CoV-2/Wuhan/WIV05/2019__EPI_ISL_402128 spike protein mRNA gc mod (1-1273)(S477N_D614G)
aggagaaagcuuaccauguucguguuccuggugcugcugccucugguguccagccagugugugaaccugaccaccagaacacagcugccuccagccuacaccaacagcuuuaccagaggcguguacuaccccgacaagguguucagauccagcgugcugcacucuacccaggaccuguuccugccuuucuucagcaacgugaccugguuccacgccauccacguguccggcaccaauggcaccaagagauucgacaaccccgugcugcccuucaacgacgggguguacuuugccagcaccgagaaguccaacaucaucagaggcuggaucuucggcaccacacuggacagcaagacccagagccugcugaucgugaacaacgccaccaacguggucaucaaagugugcgaguuccaguucugcaacgaccccuuccugggcgucuacuaccacaagaacaacaagagcuggauggaaagcgaguuccggguguacagcagcgccaacaacugcaccuucgaguacgugucccagccuuuccugauggaccuggaaggcaagcagggcaacuucaagaaccugcgcgaguucguguuuaagaacaucgacggcuacuucaagaucuacagcaagcacaccccuaucaaccucgugcgggaucugccucagggcuucucugcucuggaaccccugguggaucugcccaucggcaucaacaucacccgguuucagacacugcuggcccugcacagaagcuaccugacaccuggcgauagcagcagcggauggacagcuggugccgccgcuuacuaugugggcuaccugcagccuagaaccuuccugcugaaguacaacgagaacggcaccaucaccgacgccguggauugugcucuggauccucugagcgagacaaagugcacccugaaguccuucaccguggaaaagggcaucuaccagaccagcaacuuccgggugcagcccaccgaauccaucgugcgguuccccaauaucaccaaucugugccccuucggcgagguguucaaugccaccagauucgccucuguguacgccuggaaccggaagcggaucagcaauugcguggccgacuacuccgugcuguacaacuccgccagcuucagcaccuucaagugcuacggcguguccccuaccaagcugaacgaccugugcuucacaaacguguacgccgacagcuucgugauccggggagaugaagugcggcagauugccccuggacagacaggcaagaucgccgacuacaacuacaagcugcccgacgacuucaccggcugugugauugccuggaacagcaacaaccuggacuccaaagucggcggcaacuacaauuaccuguaccggcuguuccggaaguccaaucugaagcccuucgagcgggacaucuccaccgagaucuaucaggccggcaacaccccuuguaacggcguggaaggcuucaacugcuacuucccacugcaguccuacggcuuucagcccacaaauggcgugggcuaucagcccuacagagugguggugcugagcuucgaacugcugcaugccccugccacagugugcggcccuaagaaaagcaccaaucucgugaagaacaaaugcgugaacuucaacuucaacggccugaccggcaccggcgugcugacagagagcaacaagaaguuccugccauuccagcaguuuggccgggauaucgccgauaccacagacgccguuagagauccccagacacuggaaauccuggacaucaccccuugcagcuucggcggagugucugugaucaccccuggcaccaacaccagcaaucagguggcagugcuguaccagggcgugaacuguaccgaagugcccguggccauucacgccgaucagcugacaccuacauggcggguguacuccaccggcagcaauguguuucagaccagagccggcugucugaucggagccgagcacgugaacaauagcuacgagugcgacauccccaucggcgcuggaaucugcgccagcuaccagacacagacaaacagcccucggagagccagaagcguggccagccagagcaucauugccuacacaaugucucugggcgccgagaacagcguggccuacuccaacaacucuaucgcuauccccaccaacuucaccaucagcgugaccacagagauccugccuguguccaugaccaagaccagcguggacugcaccauguacaucugcggcgauuccaccgagugcuccaaccugcugcugcaguacggcagcuucugcacccagcugaauagagcccugacagggaucgccguggaacaggacaagaacacccaagagguguucgcccaagugaagcagaucuacaagaccccuccuaucaaggacuucggcggcuucaauuucagccagauucugcccgauccuagcaagcccagcaagcggagcuucaucgaggaccugcuguucaacaaagugacacuggccgacgccggcuucaucaagcaguauggcgauugucugggcgacauugccgccagggaucugauuugcgcccagaaguuuaacggacugacagugcugccuccucugcugaccgaugagaugaucgcccaguacacaucugcccugcuggccggcacaaucacaagcggcuggacauuuggagcaggcgccgcucugcagauccccuuugcuaugcagauggccuaccgguucaacggcaucggagugacccagaaugugcuguacgagaaccagaagcugaucgccaaccaguucaacagcgccaucggcaagauccaggacagccugagcagcacagcaagcgcccugggaaagcugcaggacguggucaaccagaaugcccaggcacugaacacccuggucaagcagcuguccuccaacuucggcgccaucagcucugugcugaacgauauccugagcagacuggacaaggucgaggccgaggugcagaucgacagacugaucacaggcagacugcagagccuccagacauacgugacccagcagcugaucagagccgccgagauuagagccucugccaaucuggccgccaccaagaugucugagugugugcugggccagagcaagagaguggacuuuugcggcaagggcuaccaccugaugagcuucccucagucugccccucacggcgugguguuucugcacgugacauaugugcccgcucaagagaagaauuucaccaccgcuccagccaucugccacgacggcaaagcccacuuuccuagagaaggcguguucguguccaacggcacccauugguucgugacacagcggaacuucuacgagccccagaucaucaccaccgacaacaccuucgugucuggcaacugcgacgucgugaucggcauugugaacaauaccguguacgacccucugcagcccgagcuggacagcuucaaagaggaacuggacaaguacuuuaagaaccacacaagccccgacguggaccugggcgauaucagcggaaucaaugccagcgucgugaacauccagaaagagaucgaccggcugaacgagguggccaagaaucugaacgagagccugaucgaccugcaagaacuggggaaguacgagcaguacaucaaguggcccugguacaucuggcugggcuuuaucgccggacugauugccaucgugauggucacaaucaugcuguguugcaugaccagcugcuguagcugccugaagggcuguuguagcuguggcagcugcugcaaguucgacgaggacgauucugagcccgugcugaagggcgugaaacugcacuacacaugaggacuaguuauaagacugacuagcccgaugggccucccaacgggcccuccuccccuccuugcaccgagagaucucaaaggcucuuuucagagccaccaaaaaaaaaaaaaaaaaaaaaaaaaaaaaaaaaaaaaaaaaaaaaaaaaaaaaaaaaaaaaaaaaaaaaaaaaaaaaaaaaaaaaaaaaaaaaaaaaaaaa

SEQ ID NO: 24604 - RNA, 4035 nt, Artificial Sequence
  SARS-CoV-2/Wuhan/WIV05/2019__EPI_ISL_402128 spike protein mRNA gc mod (1-1273)(N501Y_D614G)
aggagaaagcuuaccauguucguguuccuggugcugcugccucugguguccagccagugugugaaccugaccaccagaacacagcugccuccagccuacaccaacagcuuuaccagaggcguguacuaccccgacaagguguucagauccagcgugcugcacucuacccaggaccuguuccugccuuucuucagcaacgugaccugguuccacgccauccacguguccggcaccaauggcaccaagagauucgacaaccccgugcugcccuucaacgacgggguguacuuugccagcaccgagaaguccaacaucaucagaggcuggaucuucggcaccacacuggacagcaagacccagagccugcugaucgugaacaacgccaccaacguggucaucaaagugugcgaguuccaguucugcaacgaccccuuccugggcgucuacuaccacaagaacaacaagagcuggauggaaagcgaguuccggguguacagcagcgccaacaacugcaccuucgaguacgugucccagccuuuccugauggaccuggaaggcaagcagggcaacuucaagaaccugcgcgaguucguguuuaagaacaucgacggcuacuucaagaucuacagcaagcacaccccuaucaaccucgugcgggaucugccucagggcuucucugcucuggaaccccugguggaucugcccaucggcaucaacaucacccgguuucagacacugcuggcccugcacagaagcuaccugacaccuggcgauagcagcagcggauggacagcuggugccgccgcuuacuaugugggcuaccugcagccuagaaccuuccugcugaaguacaacgagaacggcaccaucaccgacgccguggauugugcucuggauccucugagcgagacaaagugcacccugaaguccuucaccguggaaaagggcaucuaccagaccagcaacuuccgggugcagcccaccgaauccaucgugcgguuccccaauaucaccaaucugugccccuucggcgagguguucaaugccaccagauucgccucuguguacgccuggaaccggaagcggaucagcaauugcguggccgacuacuccgugcuguacaacuccgccagcuucagcaccuucaagugcuacggcguguccccuaccaagcugaacgaccugugcuucacaaacguguacgccgacagcuucgugauccggggagaugaagugcggcagauugccccuggacagacaggcaagaucgccgacuacaacuacaagcugcccgacgacuucaccggcugugugauugccuggaacagcaacaaccuggacuccaaagucggcggcaacuacaauuaccuguaccggcuguuccggaaguccaaucugaagcccuucgagcgggacaucuccaccgagaucuaucaggccggcagcaccccuuguaacggcguggaaggcuucaacugcuacuucccacugcaguccuacggcuuucagcccacauacggcgugggcuaucagcccuacagagugguggugcugagcuucgaacugcugcaugccccugccacagugugcggcccuaagaaaagcaccaaucucgugaagaacaaaugcgugaacuucaacuucaacggccugaccggcaccggcgugcugacagagagcaacaagaaguuccugccauuccagcaguuuggccgggauaucgccgauaccacagacgccguuagagauccccagacacuggaaauccuggacaucaccccuugcagcuucggcggagugucugugaucaccccuggcaccaacaccagcaaucagguggcagugcuguaccagggcgugaacuguaccgaagugcccguggccauucacgccgaucagcugacaccuacauggcggguguacuccaccggcagcaauguguuucagaccagagccggcugucugaucggagccgagcacgugaacaauagcuacgagugcgacauccccaucggcgcuggaaucugcgccagcuaccagacacagacaaacagcccucggagagccagaagcguggccagccagagcaucauugccuacacaaugucucugggcgccgagaacagcguggccuacuccaacaacucuaucgcuauccccaccaacuucaccaucagcgugaccacagagauccugccuguguccaugaccaagaccagcguggacugcaccauguacaucugcggcgauuccaccgagugcuccaaccugcugcugcaguacggcagcuucugcacccagcugaauagagcccugacagggaucgccguggaacaggacaagaacacccaagagguguucgcccaagugaagcagaucuacaagaccccuccuaucaaggacuucggcggcuucaauuucagccagauucugcccgauccuagcaagcccagcaagcggagcuucaucgaggaccugcuguucaacaaagugacacuggccgacgccggcuucaucaagcaguauggcgauugucugggcgacauugccgccagggaucugauuugcgcccagaaguuuaacggacugacagugcugccuccucugcugaccgaugagaugaucgcccaguacacaucugcccugcuggccggcacaaucacaagcggcuggacauuuggagcaggcgccgcucugcagauccccuuugcuaugcagauggccuaccgguucaacggcaucggagugacccagaaugugcuguacgagaaccagaagcugaucgccaaccaguucaacagcgccaucggcaagauccaggacagccugagcagcacagcaagcgcccugggaaagcugcaggacguggucaaccagaaugcccaggcacugaacacccuggucaagcagcuguccuccaacuucggcgccaucagcucugugcugaacgauauccugagcagacuggacaaggucgaggccgaggugcagaucgacagacugaucacaggcagacugcagagccuccagacauacgugacccagcagcugaucagagccgccgagauuagagccucugccaaucuggccgccaccaagaugucugagugugugcugggccagagcaagagaguggacuuuugcggcaagggcuaccaccugaugagcuucccucagucugccccucacggcgugguguuucugcacgugacauaugugcccgcucaagagaagaauuucaccaccgcuccagccaucugccacgacggcaaagcccacuuuccuagagaaggcguguucguguccaacggcacccauugguucgugacacagcggaacuucuacgagccccagaucaucaccaccgacaacaccuucgugucuggcaacugcgacgucgugaucggcauugugaacaauaccguguacgacccucugcagcccgagcuggacagcuucaaagaggaacuggacaaguacuuuaagaaccacacaagccccgacguggaccugggcgauaucagcggaaucaaugccagcgucgugaacauccagaaagagaucgaccggcugaacgagguggccaagaaucugaacgagagccugaucgaccugcaagaacuggggaaguacgagcaguacaucaaguggcccugguacaucuggcugggcuuuaucgccggacugauugccaucgugauggucacaaucaugcuguguugcaugaccagcugcuguagcugccugaagggcuguuguagcuguggcagcugcugcaaguucgacgaggacgauucugagcccgugcugaagggcgugaaacugcacuacacaugaggacuaguuauaagacugacuagcccgaugggccucccaacgggcccuccuccccuccuugcaccgagagaucucaaaggcucuuuucagagccaccaaaaaaaaaaaaaaaaaaaaaaaaaaaaaaaaaaaaaaaaaaaaaaaaaaaaaaaaaaaaaaaaaaaaaaaaaaaaaaaaaaaaaaaaaaaaaaaaaaaaa

SEQ ID NO: 24605 - RNA, 4029 nt, Artificial Sequence
  SARS-CoV-2/Wuhan/WIV05/2019__EPI_ISL_402128 spike protein mRNA gc mod (1-1273)(H69del_V70del_D614G)
aggagaaagcuuaccauguucguguuccuggugcugcugccucugguguccagccagugugugaaccugaccaccagaacacagcugccuccagccuacaccaacagcuuuaccagaggcguguacuaccccgacaagguguucagauccagcgugcugcacucuacccaggaccuguuccugccuuucuucagcaacgugaccugguuccacgccaucuccggcaccaauggcaccaagagauucgacaaccccgugcugcccuucaacgacgggguguacuuugccagcaccgagaaguccaacaucaucagaggcuggaucuucggcaccacacuggacagcaagacccagagccugcugaucgugaacaacgccaccaacguggucaucaaagugugcgaguuccaguucugcaacgaccccuuccugggcgucuacuaccacaagaacaacaagagcuggauggaaagcgaguuccggguguacagcagcgccaacaacugcaccuucgaguacgugucccagccuuuccugauggaccuggaaggcaagcagggcaacuucaagaaccugcgcgaguucguguuuaagaacaucgacggcuacuucaagaucuacagcaagcacaccccuaucaaccucgugcgggaucugccucagggcuucucugcucuggaaccccugguggaucugcccaucggcaucaacaucacccgguuucagacacugcuggcccugcacagaagcuaccugacaccuggcgauagcagcagcggauggacagcuggugccgccgcuuacuaugugggcuaccugcagccuagaaccuuccugcugaaguacaacgagaacggcaccaucaccgacgccguggauugugcucuggauccucugagcgagacaaagugcacccugaaguccuucaccguggaaaagggcaucuaccagaccagcaacuuccgggugcagcccaccgaauccaucgugcgguuccccaauaucaccaaucugugccccuucggcgagguguucaaugccaccagauucgccucuguguacgccuggaaccggaagcggaucagcaauugcguggccgacuacuccgugcuguacaacuccgccagcuucagcaccuucaagugcuacggcguguccccuaccaagcugaacgaccugugcuucacaaacguguacgccgacagcuucgugauccggggagaugaagugcggcagauugccccuggacagacaggcaagaucgccgacuacaacuacaagcugcccgacgacuucaccggcugugugauugccuggaacagcaacaaccuggacuccaaagucggcggcaacuacaauuaccuguaccggcuguuccggaaguccaaucugaagcccuucgagcgggacaucuccaccgagaucuaucaggccggcagcaccccuuguaacggcguggaaggcuucaacugcuacuucccacugcaguccuacggcuuucagcccacaaauggcgugggcuaucagcccuacagagugguggugcugagcuucgaacugcugcaugccccugccacagugugcggcccuaagaaaagcaccaaucucgugaagaacaaaugcgugaacuucaacuucaacggccugaccggcaccggcgugcugacagagagcaacaagaaguuccugccauuccagcaguuuggccgggauaucgccgauaccacagacgccguuagagauccccagacacuggaaauccuggacaucaccccuugcagcuucggcggagugucugugaucaccccuggcaccaacaccagcaaucagguggcagugcuguaccagggcgugaacuguaccgaagugcccguggccauucacgccgaucagcugacaccuacauggcggguguacuccaccggcagcaauguguuucagaccagagccggcugucugaucggagccgagcacgugaacaauagcuacgagugcgacauccccaucggcgcuggaaucugcgccagcuaccagacacagacaaacagcccucggagagccagaagcguggccagccagagcaucauugccuacacaaugucucugggcgccgagaacagcguggccuacuccaacaacucuaucgcuauccccaccaacuucaccaucagcgugaccacagagauccugccuguguccaugaccaagaccagcguggacugcaccauguacaucugcggcgauuccaccgagugcuccaaccugcugcugcaguacggcagcuucugcacccagcugaauagagcccugacagggaucgccguggaacaggacaagaacacccaagagguguucgcccaagugaagcagaucuacaagaccccuccuaucaaggacuucggcggcuucaauuucagccagauucugcccgauccuagcaagcccagcaagcggagcuucaucgaggaccugcuguucaacaaagugacacuggccgacgccggcuucaucaagcaguauggcgauugucugggcgacauugccgccagggaucugauuugcgcccagaaguuuaacggacugacagugcugccuccucugcugaccgaugagaugaucgcccaguacacaucugcccugcuggccggcacaaucacaagcggcuggacauuuggagcaggcgccgcucugcagauccccuuugcuaugcagauggccuaccgguucaacggcaucggagugacccagaaugugcuguacgagaaccagaagcugaucgccaaccaguucaacagcgccaucggcaagauccaggacagccugagcagcacagcaagcgcccugggaaagcugcaggacguggucaaccagaaugcccaggcacugaacacccuggucaagcagcuguccuccaacuucggcgccaucagcucugugcugaacgauauccugagcagacuggacaaggucgaggccgaggugcagaucgacagacugaucacaggcagacugcagagccuccagacauacgugacccagcagcugaucagagccgccgagauuagagccucugccaaucuggccgccaccaagaugucugagugugugcugggccagagcaagagaguggacuuuugcggcaagggcuaccaccugaugagcuucccucagucugccccucacggcgugguguuucugcacgugacauaugugcccgcucaagagaagaauuucaccaccgcuccagccaucugccacgacggcaaagcccacuuuccuagagaaggcguguucguguccaacggcacccauugguucgugacacagcggaacuucuacgagccccagaucaucaccaccgacaacaccuucgugucuggcaacugcgacgucgugaucggcauugugaacaauaccguguacgacccucugcagcccgagcuggacagcuucaaagaggaacuggacaaguacuuuaagaaccacacaagccccgacguggaccugggcgauaucagcggaaucaaugccagcgucgugaacauccagaaagagaucgaccggcugaacgagguggccaagaaucugaacgagagccugaucgaccugcaagaacuggggaaguacgagcaguacaucaaguggcccugguacaucuggcugggcuuuaucgccggacugauugccaucgugauggucacaaucaugcuguguugcaugaccagcugcuguagcugccugaagggcuguuguagcuguggcagcugcugcaaguucgacgaggacgauucugagcccgugcugaagggcgugaaacugcacuacacaugaggacuaguuauaagacugacuagcccgaugggccucccaacgggcccuccuccccuccuugcaccgagagaucucaaaggcucuuuucagagccaccaaaaaaaaaaaaaaaaaaaaaaaaaaaaaaaaaaaaaaaaaaaaaaaaaaaaaaaaaaaaaaaaaaaaaaaaaaaaaaaaaaaaaaaaaaaaaaaaaaaaa

SEQ ID NO: 24606 - RNA, 4035 nt, Artificial Sequence
  SARS-CoV-2/Wuhan/WIV05/2019__EPI_ISL_402128 spike protein mRNA gc mod (1-1273)(Y453F_D614G)
aggagaaagcuuaccauguucguguuccuggugcugcugccucugguguccagccagugugugaaccugaccaccagaacacagcugccuccagccuacaccaacagcuuuaccagaggcguguacuaccccgacaagguguucagauccagcgugcugcacucuacccaggaccuguuccugccuuucuucagcaacgugaccugguuccacgccauccacguguccggcaccaauggcaccaagagauucgacaaccccgugcugcccuucaacgacgggguguacuuugccagcaccgagaaguccaacaucaucagaggcuggaucuucggcaccacacuggacagcaagacccagagccugcugaucgugaacaacgccaccaacguggucaucaaagugugcgaguuccaguucugcaacgaccccuuccugggcgucuacuaccacaagaacaacaagagcuggauggaaagcgaguuccggguguacagcagcgccaacaacugcaccuucgaguacgugucccagccuuuccugauggaccuggaaggcaagcagggcaacuucaagaaccugcgcgaguucguguuuaagaacaucgacggcuacuucaagaucuacagcaagcacaccccuaucaaccucgugcgggaucugccucagggcuucucugcucuggaaccccugguggaucugcccaucggcaucaacaucacccgguuucagacacugcuggcccugcacagaagcuaccugacaccuggcgauagcagcagcggauggacagcuggugccgccgcuuacuaugugggcuaccugcagccuagaaccuuccugcugaaguacaacgagaacggcaccaucaccgacgccguggauugugcucuggauccucugagcgagacaaagugcacccugaaguccuucaccguggaaaagggcaucuaccagaccagcaacuuccgggugcagcccaccgaauccaucgugcgguuccccaauaucaccaaucugugccccuucggcgagguguucaaugccaccagauucgccucuguguacgccuggaaccggaagcggaucagcaauugcguggccgacuacuccgugcuguacaacuccgccagcuucagcaccuucaagugcuacggcguguccccuaccaagcugaacgaccugugcuucacaaacguguacgccgacagcuucgugauccggggagaugaagugcggcagauugccccuggacagacaggcaagaucgccgacuacaacuacaagcugcccgacgacuucaccggcugugugauugccuggaacagcaacaaccuggacuccaaagucggcggcaacuacaauuaccuguuccggcuguuccggaaguccaaucugaagcccuucgagcgggacaucuccaccgagaucuaucaggccggcagcaccccuuguaacggcguggaaggcuucaacugcuacuucccacugcaguccuacggcuuucagcccacaaauggcgugggcuaucagcccuacagagugguggugcugagcuucgaacugcugcaugccccugccacagugugcggcccuaagaaaagcaccaaucucgugaagaacaaaugcgugaacuucaacuucaacggccugaccggcaccggcgugcugacagagagcaacaagaaguuccugccauuccagcaguuuggccgggauaucgccgauaccacagacgccguuagagauccccagacacuggaaauccuggacaucaccccuugcagcuucggcggagugucugugaucaccccuggcaccaacaccagcaaucagguggcagugcuguaccagggcgugaacuguaccgaagugcccguggccauucacgccgaucagcugacaccuacauggcggguguacuccaccggcagcaauguguuucagaccagagccggcugucugaucggagccgagcacgugaacaauagcuacgagugcgacauccccaucggcgcuggaaucugcgccagcuaccagacacagacaaacagcccucggagagccagaagcguggccagccagagcaucauugccuacacaaugucucugggcgccgagaacagcguggccuacuccaacaacucuaucgcuauccccaccaacuucaccaucagcgugaccacagagauccugccuguguccaugaccaagaccagcguggacugcaccauguacaucugcggcgauuccaccgagugcuccaaccugcugcugcaguacggcagcuucugcacccagcugaauagagcccugacagggaucgccguggaacaggacaagaacacccaagagguguucgcccaagugaagcagaucuacaagaccccuccuaucaaggacuucggcggcuucaauuucagccagauucugcccgauccuagcaagcccagcaagcggagcuucaucgaggaccugcuguucaacaaagugacacuggccgacgccggcuucaucaagcaguauggcgauugucugggcgacauugccgccagggaucugauuugcgcccagaaguuuaacggacugacagugcugccuccucugcugaccgaugagaugaucgcccaguacacaucugcccugcuggccggcacaaucacaagcggcuggacauuuggagcaggcgccgcucugcagauccccuuugcuaugcagauggccuaccgguucaacggcaucggagugacccagaaugugcuguacgagaaccagaagcugaucgccaaccaguucaacagcgccaucggcaagauccaggacagccugagcagcacagcaagcgcccugggaaagcugcaggacguggucaaccagaaugcccaggcacugaacacccuggucaagcagcuguccuccaacuucggcgccaucagcucugugcugaacgauauccugagcagacuggacaaggucgaggccgaggugcagaucgacagacugaucacaggcagacugcagagccuccagacauacgugacccagcagcugaucagagccgccgagauuagagccucugccaaucuggccgccaccaagaugucugagugugugcugggccagagcaagagaguggacuuuugcggcaagggcuaccaccugaugagcuucccucagucugccccucacggcgugguguuucugcacgugacauaugugcccgcucaagagaagaauuucaccaccgcuccagccaucugccacgacggcaaagcccacuuuccuagagaaggcguguucguguccaacggcacccauugguucgugacacagcggaacuucuacgagccccagaucaucaccaccgacaacaccuucgugucuggcaacugcgacgucgugaucggcauugugaacaauaccguguacgacccucugcagcccgagcuggacagcuucaaagaggaacuggacaaguacuuuaagaaccacacaagccccgacguggaccugggcgauaucagcggaaucaaugccagcgucgugaacauccagaaagagaucgaccggcugaacgagguggccaagaaucugaacgagagccugaucgaccugcaagaacuggggaaguacgagcaguacaucaaguggcccugguacaucuggcugggcuuuaucgccggacugauugccaucgugauggucacaaucaugcuguguugcaugaccagcugcuguagcugccugaagggcuguuguagcuguggcagcugcugcaaguucgacgaggacgauucugagcccgugcugaagggcgugaaacugcacuacacaugaggacuaguuauaagacugacuagcccgaugggccucccaacgggcccuccuccccuccuugcaccgagagaucucaaaggcucuuuucagagccaccaaaaaaaaaaaaaaaaaaaaaaaaaaaaaaaaaaaaaaaaaaaaaaaaaaaaaaaaaaaaaaaaaaaaaaaaaaaaaaaaaaaaaaaaaaaaaaaaaaaaa

SEQ ID NO: 24607 - RNA, 4035 nt, Artificial Sequence
  SARS-CoV-2/Wuhan/WIV05/2019__EPI_ISL_402128 spike protein mRNA gc mod (1-1273)(D614G_I692V)
aggagaaagcuuaccauguucguguuccuggugcugcugccucugguguccagccagugugugaaccugaccaccagaacacagcugccuccagccuacaccaacagcuuuaccagaggcguguacuaccccgacaagguguucagauccagcgugcugcacucuacccaggaccuguuccugccuuucuucagcaacgugaccugguuccacgccauccacguguccggcaccaauggcaccaagagauucgacaaccccgugcugcccuucaacgacgggguguacuuugccagcaccgagaaguccaacaucaucagaggcuggaucuucggcaccacacuggacagcaagacccagagccugcugaucgugaacaacgccaccaacguggucaucaaagugugcgaguuccaguucugcaacgaccccuuccugggcgucuacuaccacaagaacaacaagagcuggauggaaagcgaguuccggguguacagcagcgccaacaacugcaccuucgaguacgugucccagccuuuccugauggaccuggaaggcaagcagggcaacuucaagaaccugcgcgaguucguguuuaagaacaucgacggcuacuucaagaucuacagcaagcacaccccuaucaaccucgugcgggaucugccucagggcuucucugcucuggaaccccugguggaucugcccaucggcaucaacaucacccgguuucagacacugcuggcccugcacagaagcuaccugacaccuggcgauagcagcagcggauggacagcuggugccgccgcuuacuaugugggcuaccugcagccuagaaccuuccugcugaaguacaacgagaacggcaccaucaccgacgccguggauugugcucuggauccucugagcgagacaaagugcacccugaaguccuucaccguggaaaagggcaucuaccagaccagcaacuuccgggugcagcccaccgaauccaucgugcgguuccccaauaucaccaaucugugccccuucggcgagguguucaaugccaccagauucgccucuguguacgccuggaaccggaagcggaucagcaauugcguggccgacuacuccgugcuguacaacuccgccagcuucagcaccuucaagugcuacggcguguccccuaccaagcugaacgaccugugcuucacaaacguguacgccgacagcuucgugauccggggagaugaagugcggcagauugccccuggacagacaggcaagaucgccgacuacaacuacaagcugcccgacgacuucaccggcugugugauugccuggaacagcaacaaccuggacuccaaagucggcggcaacuacaauuaccuguaccggcuguuccggaaguccaaucugaagcccuucgagcgggacaucuccaccgagaucuaucaggccggcagcaccccuuguaacggcguggaaggcuucaacugcuacuucccacugcaguccuacggcuuucagcccacaaauggcgugggcuaucagcccuacagagugguggugcugagcuucgaacugcugcaugccccugccacagugugcggcccuaagaaaagcaccaaucucgugaagaacaaaugcgugaacuucaacuucaacggccugaccggcaccggcgugcugacagagagcaacaagaaguuccugccauuccagcaguuuggccgggauaucgccgauaccacagacgccguuagagauccccagacacuggaaauccuggacaucaccccuugcagcuucggcggagugucugugaucaccccuggcaccaacaccagcaaucagguggcagugcuguaccagggcgugaacuguaccgaagugcccguggccauucacgccgaucagcugacaccuacauggcggguguacuccaccggcagcaauguguuucagaccagagccggcugucugaucggagccgagcacgugaacaauagcuacgagugcgacauccccaucggcgcuggaaucugcgccagcuaccagacacagacaaacagcccucggagagccagaagcguggccagccagagcgugauugccuacacaaugucucugggcgccgagaacagcguggccuacuccaacaacucuaucgcuauccccaccaacuucaccaucagcgugaccacagagauccugccuguguccaugaccaagaccagcguggacugcaccauguacaucugcggcgauuccaccgagugcuccaaccugcugcugcaguacggcagcuucugcacccagcugaauagagcccugacagggaucgccguggaacaggacaagaacacccaagagguguucgcccaagugaagcagaucuacaagaccccuccuaucaaggacuucggcggcuucaauuucagccagauucugcccgauccuagcaagcccagcaagcggagcuucaucgaggaccugcuguucaacaaagugacacuggccgacgccggcuucaucaagcaguauggcgauugucugggcgacauugccgccagggaucugauuugcgcccagaaguuuaacggacugacagugcugccuccucugcugaccgaugagaugaucgcccaguacacaucugcccugcuggccggcacaaucacaagcggcuggacauuuggagcaggcgccgcucugcagauccccuuugcuaugcagauggccuaccgguucaacggcaucggagugacccagaaugugcuguacgagaaccagaagcugaucgccaaccaguucaacagcgccaucggcaagauccaggacagccugagcagcacagcaagcgcccugggaaagcugcaggacguggucaaccagaaugcccaggcacugaacacccuggucaagcagcuguccuccaacuucggcgccaucagcucugugcugaacgauauccugagcagacuggacaaggucgaggccgaggugcagaucgacagacugaucacaggcagacugcagagccuccagacauacgugacccagcagcugaucagagccgccgagauuagagccucugccaaucuggccgccaccaagaugucugagugugugcugggccagagcaagagaguggacuuuugcggcaagggcuaccaccugaugagcuucccucagucugccccucacggcgugguguuucugcacgugacauaugugcccgcucaagagaagaauuucaccaccgcuccagccaucugccacgacggcaaagcccacuuuccuagagaaggcguguucguguccaacggcacccauugguucgugacacagcggaacuucuacgagccccagaucaucaccaccgacaacaccuucgugucuggcaacugcgacgucgugaucggcauugugaacaauaccguguacgacccucugcagcccgagcuggacagcuucaaagaggaacuggacaaguacuuuaagaaccacacaagccccgacguggaccugggcgauaucagcggaaucaaugccagcgucgugaacauccagaaagagaucgaccggcugaacgagguggccaagaaucugaacgagagccugaucgaccugcaagaacuggggaaguacgagcaguacaucaaguggcccugguacaucuggcugggcuuuaucgccggacugauugccaucgugauggucacaaucaugcuguguugcaugaccagcugcuguagcugccugaagggcuguuguagcuguggcagcugcugcaaguucgacgaggacgauucugagcccgugcugaagggcgugaaacugcacuacacaugaggacuaguuauaagacugacuagcccgaugggccucccaacgggcccuccuccccuccuugcaccgagagaucucaaaggcucuuuucagagccaccaaaaaaaaaaaaaaaaaaaaaaaaaaaaaaaaaaaaaaaaaaaaaaaaaaaaaaaaaaaaaaaaaaaaaaaaaaaaaaaaaaaaaaaaaaaaaaaaaaaaa

SEQ ID NO: 24608 - RNA, 4035 nt, Artificial Sequence
  SARS-CoV-2/Wuhan/WIV05/2019__EPI_ISL_402128 spike protein mRNA gc mod (1-1273)(D614G_M1229I)
aggagaaagcuuaccauguucguguuccuggugcugcugccucugguguccagccagugugugaaccugaccaccagaacacagcugccuccagccuacaccaacagcuuuaccagaggcguguacuaccccgacaagguguucagauccagcgugcugcacucuacccaggaccuguuccugccuuucuucagcaacgugaccugguuccacgccauccacguguccggcaccaauggcaccaagagauucgacaaccccgugcugcccuucaacgacgggguguacuuugccagcaccgagaaguccaacaucaucagaggcuggaucuucggcaccacacuggacagcaagacccagagccugcugaucgugaacaacgccaccaacguggucaucaaagugugcgaguuccaguucugcaacgaccccuuccugggcgucuacuaccacaagaacaacaagagcuggauggaaagcgaguuccggguguacagcagcgccaacaacugcaccuucgaguacgugucccagccuuuccugauggaccuggaaggcaagcagggcaacuucaagaaccugcgcgaguucguguuuaagaacaucgacggcuacuucaagaucuacagcaagcacaccccuaucaaccucgugcgggaucugccucagggcuucucugcucuggaaccccugguggaucugcccaucggcaucaacaucacccgguuucagacacugcuggcccugcacagaagcuaccugacaccuggcgauagcagcagcggauggacagcuggugccgccgcuuacuaugugggcuaccugcagccuagaaccuuccugcugaaguacaacgagaacggcaccaucaccgacgccguggauugugcucuggauccucugagcgagacaaagugcacccugaaguccuucaccguggaaaagggcaucuaccagaccagcaacuuccgggugcagcccaccgaauccaucgugcgguuccccaauaucaccaaucugugccccuucggcgagguguucaaugccaccagauucgccucuguguacgccuggaaccggaagcggaucagcaauugcguggccgacuacuccgugcuguacaacuccgccagcuucagcaccuucaagugcuacggcguguccccuaccaagcugaacgaccugugcuucacaaacguguacgccgacagcuucgugauccggggagaugaagugcggcagauugccccuggacagacaggcaagaucgccgacuacaacuacaagcugcccgacgacuucaccggcugugugauugccuggaacagcaacaaccuggacuccaaagucggcggcaacuacaauuaccuguaccggcuguuccggaaguccaaucugaagcccuucgagcgggacaucuccaccgagaucuaucaggccggcagcaccccuuguaacggcguggaaggcuucaacugcuacuucccacugcaguccuacggcuuucagcccacaaauggcgugggcuaucagcccuacagagugguggugcugagcuucgaacugcugcaugccccugccacagugugcggcccuaagaaaagcaccaaucucgugaagaacaaaugcgugaacuucaacuucaacggccugaccggcaccggcgugcugacagagagcaacaagaaguuccugccauuccagcaguuuggccgggauaucgccgauaccacagacgccguuagagauccccagacacuggaaauccuggacaucaccccuugcagcuucggcggagugucugugaucaccccuggcaccaacaccagcaaucagguggcagugcuguaccagggcgugaacuguaccgaagugcccguggccauucacgccgaucagcugacaccuacauggcggguguacuccaccggcagcaauguguuucagaccagagccggcugucugaucggagccgagcacgugaacaauagcuacgagugcgacauccccaucggcgcuggaaucugcgccagcuaccagacacagacaaacagcccucggagagccagaagcguggccagccagagcaucauugccuacacaaugucucugggcgccgagaacagcguggccuacuccaacaacucuaucgcuauccccaccaacuucaccaucagcgugaccacagagauccugccuguguccaugaccaagaccagcguggacugcaccauguacaucugcggcgauuccaccgagugcuccaaccugcugcugcaguacggcagcuucugcacccagcugaauagagcccugacagggaucgccguggaacaggacaagaacacccaagagguguucgcccaagugaagcagaucuacaagaccccuccuaucaaggacuucggcggcuucaauuucagccagauucugcccgauccuagcaagcccagcaagcggagcuucaucgaggaccugcuguucaacaaagugacacuggccgacgccggcuucaucaagcaguauggcgauugucugggcgacauugccgccagggaucugauuugcgcccagaaguuuaacggacugacagugcugccuccucugcugaccgaugagaugaucgcccaguacacaucugcccugcuggccggcacaaucacaagcggcuggacauuuggagcaggcgccgcucugcagauccccuuugcuaugcagauggccuaccgguucaacggcaucggagugacccagaaugugcuguacgagaaccagaagcugaucgccaaccaguucaacagcgccaucggcaagauccaggacagccugagcagcacagcaagcgcccugggaaagcugcaggacguggucaaccagaaugcccaggcacugaacacccuggucaagcagcuguccuccaacuucggcgccaucagcucugugcugaacgauauccugagcagacuggacaaggucgaggccgaggugcagaucgacagacugaucacaggcagacugcagagccuccagacauacgugacccagcagcugaucagagccgccgagauuagagccucugccaaucuggccgccaccaagaugucugagugugugcugggccagagcaagagaguggacuuuugcggcaagggcuaccaccugaugagcuucccucagucugccccucacggcgugguguuucugcacgugacauaugugcccgcucaagagaagaauuucaccaccgcuccagccaucugccacgacggcaaagcccacuuuccuagagaaggcguguucguguccaacggcacccauugguucgugacacagcggaacuucuacgagccccagaucaucaccaccgacaacaccuucgugucuggcaacugcgacgucgugaucggcauugugaacaauaccguguacgacccucugcagcccgagcuggacagcuucaaagaggaacuggacaaguacuuuaagaaccacacaagccccgacguggaccugggcgauaucagcggaaucaaugccagcgucgugaacauccagaaagagaucgaccggcugaacgagguggccaagaaucugaacgagagccugaucgaccugcaagaacuggggaaguacgagcaguacaucaaguggcccugguacaucuggcugggcuuuaucgccggacugauugccaucgugaucgucacaaucaugcuguguugcaugaccagcugcuguagcugccugaagggcuguuguagcuguggcagcugcugcaaguucgacgaggacgauucugagcccgugcugaagggcgugaaacugcacuacacaugaggacuaguuauaagacugacuagcccgaugggccucccaacgggcccuccuccccuccuugcaccgagagaucucaaaggcucuuuucagagccaccaaaaaaaaaaaaaaaaaaaaaaaaaaaaaaaaaaaaaaaaaaaaaaaaaaaaaaaaaaaaaaaaaaaaaaaaaaaaaaaaaaaaaaaaaaaaaaaaaaaaa

SEQ ID NO: 24609 - RNA, 4029 nt, Artificial Sequence
  SARS-CoV-2/Wuhan/WIV05/2019__EPI_ISL_402128 spike protein mRNA gc mod (1-1273)(H69del_V70del_A222V_Y453F_S477N_D614G_I692V)
aggagaaagcuuaccauguucguguuccuggugcugcugccucugguguccagccagugugugaaccugaccaccagaacacagcugccuccagccuacaccaacagcuuuaccagaggcguguacuaccccgacaagguguucagauccagcgugcugcacucuacccaggaccuguuccugccuuucuucagcaacgugaccugguuccacgccaucuccggcaccaauggcaccaagagauucgacaaccccgugcugcccuucaacgacgggguguacuuugccagcaccgagaaguccaacaucaucagaggcuggaucuucggcaccacacuggacagcaagacccagagccugcugaucgugaacaacgccaccaacguggucaucaaagugugcgaguuccaguucugcaacgaccccuuccugggcgucuacuaccacaagaacaacaagagcuggauggaaagcgaguuccggguguacagcagcgccaacaacugcaccuucgaguacgugucccagccuuuccugauggaccuggaaggcaagcagggcaacuucaagaaccugcgcgaguucguguuuaagaacaucgacggcuacuucaagaucuacagcaagcacaccccuaucaaccucgugcgggaucugccucagggcuucucugugcuggaaccccugguggaucugcccaucggcaucaacaucacccgguuucagacacugcuggcccugcacagaagcuaccugacaccuggcgauagcagcagcggauggacagcuggugccgccgcuuacuaugugggcuaccugcagccuagaaccuuccugcugaaguacaacgagaacggcaccaucaccgacgccguggauugugcucuggauccucugagcgagacaaagugcacccugaaguccuucaccguggaaaagggcaucuaccagaccagcaacuuccgggugcagcccaccgaauccaucgugcgguuccccaauaucaccaaucugugccccuucggcgagguguucaaugccaccagauucgccucuguguacgccuggaaccggaagcggaucagcaauugcguggccgacuacuccgugcuguacaacuccgccagcuucagcaccuucaagugcuacggcguguccccuaccaagcugaacgaccugugcuucacaaacguguacgccgacagcuucgugauccggggagaugaagugcggcagauugccccuggacagacaggcaagaucgccgacuacaacuacaagcugcccgacgacuucaccggcugugugauugccuggaacagcaacaaccuggacuccaaagucggcggcaacuacaauuaccuguuccggcuguuccggaaguccaaucugaagcccuucgagcgggacaucuccaccgagaucuaucaggccggcaacaccccuuguaacggcguggaaggcuucaacugcuacuucccacugcaguccuacggcuuucagcccacaaauggcgugggcuaucagcccuacagagugguggugcugagcuucgaacugcugcaugccccugccacagugugcggcccuaagaaaagcaccaaucucgugaagaacaaaugcgugaacuucaacuucaacggccugaccggcaccggcgugcugacagagagcaacaagaaguuccugccauuccagcaguuuggccgggauaucgccgauaccacagacgccguuagagauccccagacacuggaaauccuggacaucaccccuugcagcuucggcggagugucugugaucaccccuggcaccaacaccagcaaucagguggcagugcuguaccagggcgugaacuguaccgaagugcccguggccauucacgccgaucagcugacaccuacauggcggguguacuccaccggcagcaauguguuucagaccagagccggcugucugaucggagccgagcacgugaacaauagcuacgagugcgacauccccaucggcgcuggaaucugcgccagcuaccagacacagacaaacagcccucggagagccagaagcguggccagccagagcgugauugccuacacaaugucucugggcgccgagaacagcguggccuacuccaacaacucuaucgcuauccccaccaacuucaccaucagcgugaccacagagauccugccuguguccaugaccaagaccagcguggacugcaccauguacaucugcggcgauuccaccgagugcuccaaccugcugcugcaguacggcagcuucugcacccagcugaauagagcccugacagggaucgccguggaacaggacaagaacacccaagagguguucgcccaagugaagcagaucuacaagaccccuccuaucaaggacuucggcggcuucaauuucagccagauucugcccgauccuagcaagcccagcaagcggagcuucaucgaggaccugcuguucaacaaagugacacuggccgacgccggcuucaucaagcaguauggcgauugucugggcgacauugccgccagggaucugauuugcgcccagaaguuuaacggacugacagugcugccuccucugcugaccgaugagaugaucgcccaguacacaucugcccugcuggccggcacaaucacaagcggcuggacauuuggagcaggcgccgcucugcagauccccuuugcuaugcagauggccuaccgguucaacggcaucggagugacccagaaugugcuguacgagaaccagaagcugaucgccaaccaguucaacagcgccaucggcaagauccaggacagccugagcagcacagcaagcgcccugggaaagcugcaggacguggucaaccagaaugcccaggcacugaacacccuggucaagcagcuguccuccaacuucggcgccaucagcucugugcugaacgauauccugagcagacuggacaaggucgaggccgaggugcagaucgacagacugaucacaggcagacugcagagccuccagacauacgugacccagcagcugaucagagccgccgagauuagagccucugccaaucuggccgccaccaagaugucugagugugugcugggccagagcaagagaguggacuuuugcggcaagggcuaccaccugaugagcuucccucagucugccccucacggcgugguguuucugcacgugacauaugugcccgcucaagagaagaauuucaccaccgcuccagccaucugccacgacggcaaagcccacuuuccuagagaaggcguguucguguccaacggcacccauugguucgugacacagcggaacuucuacgagccccagaucaucaccaccgacaacaccuucgugucuggcaacugcgacgucgugaucggcauugugaacaauaccguguacgacccucugcagcccgagcuggacagcuucaaagaggaacuggacaaguacuuuaagaaccacacaagccccgacguggaccugggcgauaucagcggaaucaaugccagcgucgugaacauccagaaagagaucgaccggcugaacgagguggccaagaaucugaacgagagccugaucgaccugcaagaacuggggaaguacgagcaguacaucaaguggcccugguacaucuggcugggcuuuaucgccggacugauugccaucgugauggucacaaucaugcuguguugcaugaccagcugcuguagcugccugaagggcuguuguagcuguggcagcugcugcaaguucgacgaggacgauucugagcccgugcugaagggcgugaaacugcacuacacaugaggacuaguuauaagacugacuagcccgaugggccucccaacgggcccuccuccccuccuugcaccgagagaucucaaaggcucuuuucagagccaccaaaaaaaaaaaaaaaaaaaaaaaaaaaaaaaaaaaaaaaaaaaaaaaaaaaaaaaaaaaaaaaaaaaaaaaaaaaaaaaaaaaaaaaaaaaaaaaaaaaaa

SEQ ID NO: 24610 - RNA, 4029 nt, Artificial Sequence
  SARS-CoV-2/Wuhan/WIV05/2019__EPI_ISL_402128 spike protein mRNA gc mod (1-1273)(H69del_V70del_Y453F_D614G_I692V_M1229I)
aggagaaagcuuaccauguucguguuccuggugcugcugccucugguguccagccagugugugaaccugaccaccagaacacagcugccuccagccuacaccaacagcuuuaccagaggcguguacuaccccgacaagguguucagauccagcgugcugcacucuacccaggaccuguuccugccuuucuucagcaacgugaccugguuccacgccaucuccggcaccaauggcaccaagagauucgacaaccccgugcugcccuucaacgacgggguguacuuugccagcaccgagaaguccaacaucaucagaggcuggaucuucggcaccacacuggacagcaagacccagagccugcugaucgugaacaacgccaccaacguggucaucaaagugugcgaguuccaguucugcaacgaccccuuccugggcgucuacuaccacaagaacaacaagagcuggauggaaagcgaguuccggguguacagcagcgccaacaacugcaccuucgaguacgugucccagccuuuccugauggaccuggaaggcaagcagggcaacuucaagaaccugcgcgaguucguguuuaagaacaucgacggcuacuucaagaucuacagcaagcacaccccuaucaaccucgugcgggaucugccucagggcuucucugcucuggaaccccugguggaucugcccaucggcaucaacaucacccgguuucagacacugcuggcccugcacagaagcuaccugacaccuggcgauagcagcagcggauggacagcuggugccgccgcuuacuaugugggcuaccugcagccuagaaccuuccugcugaaguacaacgagaacggcaccaucaccgacgccguggauugugcucuggauccucugagcgagacaaagugcacccugaaguccuucaccguggaaaagggcaucuaccagaccagcaacuuccgggugcagcccaccgaauccaucgugcgguuccccaauaucaccaaucugugccccuucggcgagguguucaaugccaccagauucgccucuguguacgccuggaaccggaagcggaucagcaauugcguggccgacuacuccgugcuguacaacuccgccagcuucagcaccuucaagugcuacggcguguccccuaccaagcugaacgaccugugcuucacaaacguguacgccgacagcuucgugauccggggagaugaagugcggcagauugccccuggacagacaggcaagaucgccgacuacaacuacaagcugcccgacgacuucaccggcugugugauugccuggaacagcaacaaccuggacuccaaagucggcggcaacuacaauuaccuguuccggcuguuccggaaguccaaucugaagcccuucgagcgggacaucuccaccgagaucuaucaggccggcagcaccccuuguaacggcguggaaggcuucaacugcuacuucccacugcaguccuacggcuuucagcccacaaauggcgugggcuaucagcccuacagagugguggugcugagcuucgaacugcugcaugccccugccacagugugcggcccuaagaaaagcaccaaucucgugaagaacaaaugcgugaacuucaacuucaacggccugaccggcaccggcgugcugacagagagcaacaagaaguuccugccauuccagcaguuuggccgggauaucgccgauaccacagacgccguuagagauccccagacacuggaaauccuggacaucaccccuugcagcuucggcggagugucugugaucaccccuggcaccaacaccagcaaucagguggcagugcuguaccagggcgugaacuguaccgaagugcccguggccauucacgccgaucagcugacaccuacauggcggguguacuccaccggcagcaauguguuucagaccagagccggcugucugaucggagccgagcacgugaacaauagcuacgagugcgacauccccaucggcgcuggaaucugcgccagcuaccagacacagacaaacagcccucggagagccagaagcguggccagccagagcgugauugccuacacaaugucucugggcgccgagaacagcguggccuacuccaacaacucuaucgcuauccccaccaacuucaccaucagcgugaccacagagauccugccuguguccaugaccaagaccagcguggacugcaccauguacaucugcggcgauuccaccgagugcuccaaccugcugcugcaguacggcagcuucugcacccagcugaauagagcccugacagggaucgccguggaacaggacaagaacacccaagagguguucgcccaagugaagcagaucuacaagaccccuccuaucaaggacuucggcggcuucaauuucagccagauucugcccgauccuagcaagcccagcaagcggagcuucaucgaggaccugcuguucaacaaagugacacuggccgacgccggcuucaucaagcaguauggcgauugucugggcgacauugccgccagggaucugauuugcgcccagaaguuuaacggacugacagugcugccuccucugcugaccgaugagaugaucgcccaguacacaucugcccugcuggccggcacaaucacaagcggcuggacauuuggagcaggcgccgcucugcagauccccuuugcuaugcagauggccuaccgguucaacggcaucggagugacccagaaugugcuguacgagaaccagaagcugaucgccaaccaguucaacagcgccaucggcaagauccaggacagccugagcagcacagcaagcgcccugggaaagcugcaggacguggucaaccagaaugcccaggcacugaacacccuggucaagcagcuguccuccaacuucggcgccaucagcucugugcugaacgauauccugagcagacuggacaaggucgaggccgaggugcagaucgacagacugaucacaggcagacugcagagccuccagacauacgugacccagcagcugaucagagccgccgagauuagagccucugccaaucuggccgccaccaagaugucugagugugugcugggccagagcaagagaguggacuuuugcggcaagggcuaccaccugaugagcuucccucagucugccccucacggcgugguguuucugcacgugacauaugugcccgcucaagagaagaauuucaccaccgcuccagccaucugccacgacggcaaagcccacuuuccuagagaaggcguguucguguccaacggcacccauugguucgugacacagcggaacuucuacgagccccagaucaucaccaccgacaacaccuucgugucuggcaacugcgacgucgugaucggcauugugaacaauaccguguacgacccucugcagcccgagcuggacagcuucaaagaggaacuggacaaguacuuuaagaaccacacaagccccgacguggaccugggcgauaucagcggaaucaaugccagcgucgugaacauccagaaagagaucgaccggcugaacgagguggccaagaaucugaacgagagccugaucgaccugcaagaacuggggaaguacgagcaguacaucaaguggcccugguacaucuggcugggcuuuaucgccggacugauugccaucgugaucgucacaaucaugcuguguugcaugaccagcugcuguagcugccugaagggcuguuguagcuguggcagcugcugcaaguucgacgaggacgauucugagcccgugcugaagggcgugaaacugcacuacacaugaggacuaguuauaagacugacuagcccgaugggccucccaacgggcccuccuccccuccuugcaccgagagaucucaaaggcucuuuucagagccaccaaaaaaaaaaaaaaaaaaaaaaaaaaaaaaaaaaaaaaaaaaaaaaaaaaaaaaaaaaaaaaaaaaaaaaaaaaaaaaaaaaaaaaaaaaaaaaaaaaaaa

SEQ ID NO: 24611 - RNA, 4026 nt, Artificial Sequence
  SARS-CoV-2/Wuhan/WIV05/2019__EPI_ISL_402128 spike protein mRNA gc mod (1-1273)(H69del_V70del_Y144del_N501Y_A570D_D614G_P681H_T716I_S982 A_D1118H)
aggagaaagcuuaccauguucguguuccuggugcugcugccucugguguccagccagugugugaaccugaccaccagaacacagcugccuccagccuacaccaacagcuuuaccagaggcguguacuaccccgacaagguguucagauccagcgugcugcacucuacccaggaccuguuccugccuuucuucagcaacgugaccugguuccacgccaucuccggcaccaauggcaccaagagauucgacaaccccgugcugcccuucaacgacgggguguacuuugccagcaccgagaaguccaacaucaucagaggcuggaucuucggcaccacacuggacagcaagacccagagccugcugaucgugaacaacgccaccaacguggucaucaaagugugcgaguuccaguucugcaacgaccccuuccugggcgucuaccacaagaacaacaagagcuggauggaaagcgaguuccggguguacagcagcgccaacaacugcaccuucgaguacgugucccagccuuuccugauggaccuggaaggcaagcagggcaacuucaagaaccugcgcgaguucguguuuaagaacaucgacggcuacuucaagaucuacagcaagcacaccccuaucaaccucgugcgggaucugccucagggcuucucugcucuggaaccccugguggaucugcccaucggcaucaacaucacccgguuucagacacugcuggcccugcacagaagcuaccugacaccuggcgauagcagcagcggauggacagcuggugccgccgcuuacuaugugggcuaccugcagccuagaaccuuccugcugaaguacaacgagaacggcaccaucaccgacgccguggauugugcucuggauccucugagcgagacaaagugcacccugaaguccuucaccguggaaaagggcaucuaccagaccagcaacuuccgggugcagcccaccgaauccaucgugcgguuccccaauaucaccaaucugugccccuucggcgagguguucaaugccaccagauucgccucuguguacgccuggaaccggaagcggaucagcaauugcguggccgacuacuccgugcuguacaacuccgccagcuucagcaccuucaagugcuacggcguguccccuaccaagcugaacgaccugugcuucacaaacguguacgccgacagcuucgugauccggggagaugaagugcggcagauugccccuggacagacaggcaagaucgccgacuacaacuacaagcugcccgacgacuucaccggcugugugauugccuggaacagcaacaaccuggacuccaaagucggcggcaacuacaauuaccuguaccggcuguuccggaaguccaaucugaagcccuucgagcgggacaucuccaccgagaucuaucaggccggcagcaccccuuguaacggcguggaaggcuucaacugcuacuucccacugcaguccuacggcuuucagcccacauacggcgugggcuaucagcccuacagagugguggugcugagcuucgaacugcugcaugccccugccacagugugcggcccuaagaaaagcaccaaucucgugaagaacaaaugcgugaacuucaacuucaacggccugaccggcaccggcgugcugacagagagcaacaagaaguuccugccauuccagcaguuuggccgggauaucgacgauaccacagacgccguuagagauccccagacacuggaaauccuggacaucaccccuugcagcuucggcggagugucugugaucaccccuggcaccaacaccagcaaucagguggcagugcuguaccagggcgugaacuguaccgaagugcccguggccauucacgccgaucagcugacaccuacauggcggguguacuccaccggcagcaauguguuucagaccagagccggcugucugaucggagccgagcacgugaacaauagcuacgagugcgacauccccaucggcgcuggaaucugcgccagcuaccagacacagacaaacagccaccggagagccagaagcguggccagccagagcaucauugccuacacaaugucucugggcgccgagaacagcguggccuacuccaacaacucuaucgcuauccccaucaacuucaccaucagcgugaccacagagauccugccuguguccaugaccaagaccagcguggacugcaccauguacaucugcggcgauuccaccgagugcuccaaccugcugcugcaguacggcagcuucugcacccagcugaauagagcccugacagggaucgccguggaacaggacaagaacacccaagagguguucgcccaagugaagcagaucuacaagaccccuccuaucaaggacuucggcggcuucaauuucagccagauucugcccgauccuagcaagcccagcaagcggagcuucaucgaggaccugcuguucaacaaagugacacuggccgacgccggcuucaucaagcaguauggcgauugucugggcgacauugccgccagggaucugauuugcgcccagaaguuuaacggacugacagugcugccuccucugcugaccgaugagaugaucgcccaguacacaucugcccugcuggccggcacaaucacaagcggcuggacauuuggagcaggcgccgcucugcagauccccuuugcuaugcagauggccuaccgguucaacggcaucggagugacccagaaugugcuguacgagaaccagaagcugaucgccaaccaguucaacagcgccaucggcaagauccaggacagccugagcagcacagcaagcgcccugggaaagcugcaggacguggucaaccagaaugcccaggcacugaacacccuggucaagcagcuguccuccaacuucggcgccaucagcucugugcugaacgauauccuggccagacuggacaaggucgaggccgaggugcagaucgacagacugaucacaggcagacugcagagccuccagacauacgugacccagcagcugaucagagccgccgagauuagagccucugccaaucuggccgccaccaagaugucugagugugugcugggccagagcaagagaguggacuuuugcggcaagggcuaccaccugaugagcuucccucagucugccccucacggcgugguguuucugcacgugacauaugugcccgcucaagagaagaauuucaccaccgcuccagccaucugccacgacggcaaagcccacuuuccuagagaaggcguguucguguccaacggcacccauugguucgugacacagcggaacuucuacgagccccagaucaucaccacccacaacaccuucgugucuggcaacugcgacgucgugaucggcauugugaacaauaccguguacgacccucugcagcccgagcuggacagcuucaaagaggaacuggacaaguacuuuaagaaccacacaagccccgacguggaccugggcgauaucagcggaaucaaugccagcgucgugaacauccagaaagagaucgaccggcugaacgagguggccaagaaucugaacgagagccugaucgaccugcaagaacuggggaaguacgagcaguacaucaaguggcccugguacaucuggcugggcuuuaucgccggacugauugccaucgugauggucacaaucaugcuguguugcaugaccagcugcuguagcugccugaagggcuguuguagcuguggcagcugcugcaaguucgacgaggacgauucugagcccgugcugaagggcgugaaacugcacuacacaugaggacuaguuauaagacugacuagcccgaugggccucccaacgggcccuccuccccuccuugcaccgagagaucucaaaggcucuuuucagagccaccaaaaaaaaaaaaaaaaaaaaaaaaaaaaaaaaaaaaaaaaaaaaaaaaaaaaaaaaaaaaaaaaaaaaaaaaaaaaaaaaaaaaaaaaaaaaaaaaaaaaa

SEQ ID NO: 24612 - RNA, 4035 nt, Artificial Sequence
  SARS-CoV-2/Wuhan/WIV05/2019__EPI_ISL_402128 spike protein mRNA gc mod (1-1273)(K417N_E484K_N501Y_D614G)
aggagaaagcuuaccauguucguguuccuggugcugcugccucugguguccagccagugugugaaccugaccaccagaacacagcugccuccagccuacaccaacagcuuuaccagaggcguguacuaccccgacaagguguucagauccagcgugcugcacucuacccaggaccuguuccugccuuucuucagcaacgugaccugguuccacgccauccacguguccggcaccaauggcaccaagagauucgacaaccccgugcugcccuucaacgacgggguguacuuugccagcaccgagaaguccaacaucaucagaggcuggaucuucggcaccacacuggacagcaagacccagagccugcugaucgugaacaacgccaccaacguggucaucaaagugugcgaguuccaguucugcaacgaccccuuccugggcgucuacuaccacaagaacaacaagagcuggauggaaagcgaguuccggguguacagcagcgccaacaacugcaccuucgaguacgugucccagccuuuccugauggaccuggaaggcaagcagggcaacuucaagaaccugcgcgaguucguguuuaagaacaucgacggcuacuucaagaucuacagcaagcacaccccuaucaaccucgugcgggaucugccucagggcuucucugcucuggaaccccugguggaucugcccaucggcaucaacaucacccgguuucagacacugcuggcccugcacagaagcuaccugacaccuggcgauagcagcagcggauggacagcuggugccgccgcuuacuaugugggcuaccugcagccuagaaccuuccugcugaaguacaacgagaacggcaccaucaccgacgccguggauugugcucuggauccucugagcgagacaaagugcacccugaaguccuucaccguggaaaagggcaucuaccagaccagcaacuuccgggugcagcccaccgaauccaucgugcgguuccccaauaucaccaaucugugccccuucggcgagguguucaaugccaccagauucgccucuguguacgccuggaaccggaagcggaucagcaauugcguggccgacuacuccgugcuguacaacuccgccagcuucagcaccuucaagugcuacggcguguccccuaccaagcugaacgaccugugcuucacaaacguguacgccgacagcuucgugauccggggagaugaagugcggcagauugccccuggacagacaggcaacaucgccgacuacaacuacaagcugcccgacgacuucaccggcugugugauugccuggaacagcaacaaccuggacuccaaagucggcggcaacuacaauuaccuguaccggcuguuccggaaguccaaucugaagcccuucgagcgggacaucuccaccgagaucuaucaggccggcagcaccccuuguaacggcgugaagggcuucaacugcuacuucccacugcaguccuacggcuuucagcccacauacggcgugggcuaucagcccuacagagugguggugcugagcuucgaacugcugcaugccccugccacagugugcggcccuaagaaaagcaccaaucucgugaagaacaaaugcgugaacuucaacuucaacggccugaccggcaccggcgugcugacagagagcaacaagaaguuccugccauuccagcaguuuggccgggauaucgccgauaccacagacgccguuagagauccccagacacuggaaauccuggacaucaccccuugcagcuucggcggagugucugugaucaccccuggcaccaacaccagcaaucagguggcagugcuguaccagggcgugaacuguaccgaagugcccguggccauucacgccgaucagcugacaccuacauggcggguguacuccaccggcagcaauguguuucagaccagagccggcugucugaucggagccgagcacgugaacaauagcuacgagugcgacauccccaucggcgcuggaaucugcgccagcuaccagacacagacaaacagcccucggagagccagaagcguggccagccagagcaucauugccuacacaaugucucugggcgccgagaacagcguggccuacuccaacaacucuaucgcuauccccaccaacuucaccaucagcgugaccacagagauccugccuguguccaugaccaagaccagcguggacugcaccauguacaucugcggcgauuccaccgagugcuccaaccugcugcugcaguacggcagcuucugcacccagcugaauagagcccugacagggaucgccguggaacaggacaagaacacccaagagguguucgcccaagugaagcagaucuacaagaccccuccuaucaaggacuucggcggcuucaauuucagccagauucugcccgauccuagcaagcccagcaagcggagcuucaucgaggaccugcuguucaacaaagugacacuggccgacgccggcuucaucaagcaguauggcgauugucugggcgacauugccgccagggaucugauuugcgcccagaaguuuaacggacugacagugcugccuccucugcugaccgaugagaugaucgcccaguacacaucugcccugcuggccggcacaaucacaagcggcuggacauuuggagcaggcgccgcucugcagauccccuuugcuaugcagauggccuaccgguucaacggcaucggagugacccagaaugugcuguacgagaaccagaagcugaucgccaaccaguucaacagcgccaucggcaagauccaggacagccugagcagcacagcaagcgcccugggaaagcugcaggacguggucaaccagaaugcccaggcacugaacacccuggucaagcagcuguccuccaacuucggcgccaucagcucugugcugaacgauauccugagcagacuggacaaggucgaggccgaggugcagaucgacagacugaucacaggcagacugcagagccuccagacauacgugacccagcagcugaucagagccgccgagauuagagccucugccaaucuggccgccaccaagaugucugagugugugcugggccagagcaagagaguggacuuuugcggcaagggcuaccaccugaugagcuucccucagucugccccucacggcgugguguuucugcacgugacauaugugcccgcucaagagaagaauuucaccaccgcuccagccaucugccacgacggcaaagcccacuuuccuagagaaggcguguucguguccaacggcacccauugguucgugacacagcggaacuucuacgagccccagaucaucaccaccgacaacaccuucgugucuggcaacugcgacgucgugaucggcauugugaacaauaccguguacgacccucugcagcccgagcuggacagcuucaaagaggaacuggacaaguacuuuaagaaccacacaagccccgacguggaccugggcgauaucagcggaaucaaugccagcgucgugaacauccagaaagagaucgaccggcugaacgagguggccaagaaucugaacgagagccugaucgaccugcaagaacuggggaaguacgagcaguacaucaaguggcccugguacaucuggcugggcuuuaucgccggacugauugccaucgugauggucacaaucaugcuguguugcaugaccagcugcuguagcugccugaagggcuguuguagcuguggcagcugcugcaaguucgacgaggacgauucugagcccgugcugaagggcgugaaacugcacuacacaugaggacuaguuauaagacugacuagcccgaugggccucccaacgggcccuccuccccuccuugcaccgagagaucucaaaggcucuuuucagagccaccaaaaaaaaaaaaaaaaaaaaaaaaaaaaaaaaaaaaaaaaaaaaaaaaaaaaaaaaaaaaaaaaaaaaaaaaaaaaaaaaaaaaaaaaaaaaaaaaaaaaa

SEQ ID NO: 24613 - RNA, 4026 nt, Artificial Sequence
  SARS-CoV-2/Wuhan/WIV05/2019__EPI_ISL_402128 spike protein mRNA gc mod (1-1273)(L18F_D80A_D215G_L242del_A243del_L244del_R246I_K417N_E484 K_N501Y_D614G_A701V)
aggagaaagcuuaccauguucguguuccuggugcugcugccucugguguccagccagugugugaacuucaccaccagaacacagcugccuccagccuacaccaacagcuuuaccagaggcguguacuaccccgacaagguguucagauccagcgugcugcacucuacccaggaccuguuccugccuuucuucagcaacgugaccugguuccacgccauccacguguccggcaccaauggcaccaagagauucgccaaccccgugcugcccuucaacgacgggguguacuuugccagcaccgagaaguccaacaucaucagaggcuggaucuucggcaccacacuggacagcaagacccagagccugcugaucgugaacaacgccaccaacguggucaucaaagugugcgaguuccaguucugcaacgaccccuuccugggcgucuacuaccacaagaacaacaagagcuggauggaaagcgaguuccggguguacagcagcgccaacaacugcaccuucgaguacgugucccagccuuuccugauggaccuggaaggcaagcagggcaacuucaagaaccugcgcgaguucguguuuaagaacaucgacggcuacuucaagaucuacagcaagcacaccccuaucaaccucgugcggggccugccucagggcuucucugcucuggaaccccugguggaucugcccaucggcaucaacaucacccgguuucagacacugcacaucagcuaccugacaccuggcgauagcagcagcggauggacagcuggugccgccgcuuacuaugugggcuaccugcagccuagaaccuuccugcugaaguacaacgagaacggcaccaucaccgacgccguggauugugcucuggauccucugagcgagacaaagugcacccugaaguccuucaccguggaaaagggcaucuaccagaccagcaacuuccgggugcagcccaccgaauccaucgugcgguuccccaauaucaccaaucugugccccuucggcgagguguucaaugccaccagauucgccucuguguacgccuggaaccggaagcggaucagcaauugcguggccgacuacuccgugcuguacaacuccgccagcuucagcaccuucaagugcuacggcguguccccuaccaagcugaacgaccugugcuucacaaacguguacgccgacagcuucgugauccggggagaugaagugcggcagauugccccuggacagacaggcaacaucgccgacuacaacuacaagcugcccgacgacuucaccggcugugugauugccuggaacagcaacaaccuggacuccaaagucggcggcaacuacaauuaccuguaccggcuguuccggaaguccaaucugaagcccuucgagcgggacaucuccaccgagaucuaucaggccggcagcaccccuuguaacggcgugaagggcuucaacugcuacuucccacugcaguccuacggcuuucagcccacauacggcgugggcuaucagcccuacagagugguggugcugagcuucgaacugcugcaugccccugccacagugugcggcccuaagaaaagcaccaaucucgugaagaacaaaugcgugaacuucaacuucaacggccugaccggcaccggcgugcugacagagagcaacaagaaguuccugccauuccagcaguuuggccgggauaucgccgauaccacagacgccguuagagauccccagacacuggaaauccuggacaucaccccuugcagcuucggcggagugucugugaucaccccuggcaccaacaccagcaaucagguggcagugcuguaccagggcgugaacuguaccgaagugcccguggccauucacgccgaucagcugacaccuacauggcggguguacuccaccggcagcaauguguuucagaccagagccggcugucugaucggagccgagcacgugaacaauagcuacgagugcgacauccccaucggcgcuggaaucugcgccagcuaccagacacagacaaacagcccucggagagccagaagcguggccagccagagcaucauugccuacacaaugucucugggcguggagaacagcguggccuacuccaacaacucuaucgcuauccccaccaacuucaccaucagcgugaccacagagauccugccuguguccaugaccaagaccagcguggacugcaccauguacaucugcggcgauuccaccgagugcuccaaccugcugcugcaguacggcagcuucugcacccagcugaauagagcccugacagggaucgccguggaacaggacaagaacacccaagagguguucgcccaagugaagcagaucuacaagaccccuccuaucaaggacuucggcggcuucaauuucagccagauucugcccgauccuagcaagcccagcaagcggagcuucaucgaggaccugcuguucaacaaagugacacuggccgacgccggcuucaucaagcaguauggcgauugucugggcgacauugccgccagggaucugauuugcgcccagaaguuuaacggacugacagugcugccuccucugcugaccgaugagaugaucgcccaguacacaucugcccugcuggccggcacaaucacaagcggcuggacauuuggagcaggcgccgcucugcagauccccuuugcuaugcagauggccuaccgguucaacggcaucggagugacccagaaugugcuguacgagaaccagaagcugaucgccaaccaguucaacagcgccaucggcaagauccaggacagccugagcagcacagcaagcgcccugggaaagcugcaggacguggucaaccagaaugcccaggcacugaacacccuggucaagcagcuguccuccaacuucggcgccaucagcucugugcugaacgauauccugagcagacuggacaaggucgaggccgaggugcagaucgacagacugaucacaggcagacugcagagccuccagacauacgugacccagcagcugaucagagccgccgagauuagagccucugccaaucuggccgccaccaagaugucugagugugugcugggccagagcaagagaguggacuuuugcggcaagggcuaccaccugaugagcuucccucagucugccccucacggcgugguguuucugcacgugacauaugugcccgcucaagagaagaauuucaccaccgcuccagccaucugccacgacggcaaagcccacuuuccuagagaaggcguguucguguccaacggcacccauugguucgugacacagcggaacuucuacgagccccagaucaucaccaccgacaacaccuucgugucuggcaacugcgacgucgugaucggcauugugaacaauaccguguacgacccucugcagcccgagcuggacagcuucaaagaggaacuggacaaguacuuuaagaaccacacaagccccgacguggaccugggcgauaucagcggaaucaaugccagcgucgugaacauccagaaagagaucgaccggcugaacgagguggccaagaaucugaacgagagccugaucgaccugcaagaacuggggaaguacgagcaguacaucaaguggcccugguacaucuggcugggcuuuaucgccggacugauugccaucgugauggucacaaucaugcuguguugcaugaccagcugcuguagcugccugaagggcuguuguagcuguggcagcugcugcaaguucgacgaggacgauucugagcccgugcugaagggcgugaaacugcacuacacaugaggacuaguuauaagacugacuagcccgaugggccucccaacgggcccuccuccccuccuugcaccgagagaucucaaaggcucuuuucagagccaccaaaaaaaaaaaaaaaaaaaaaaaaaaaaaaaaaaaaaaaaaaaaaaaaaaaaaaaaaaaaaaaaaaaaaaaaaaaaaaaaaaaaaaaaaaaaaaaaaaaaa

SEQ ID NO: 24614 - RNA, 4035 nt, Artificial Sequence
  SARS-CoV-2/Wuhan/WIV05/2019__EPI_ISL_402128 spike protein mRNA gc mod (1-1273)(E484K_D614G)
aggagaaagcuuaccauguucguguuccuggugcugcugccucugguguccagccagugugugaaccugaccaccagaacacagcugccuccagccuacaccaacagcuuuaccagaggcguguacuaccccgacaagguguucagauccagcgugcugcacucuacccaggaccuguuccugccuuucuucagcaacgugaccugguuccacgccauccacguguccggcaccaauggcaccaagagauucgacaaccccgugcugcccuucaacgacgggguguacuuugccagcaccgagaaguccaacaucaucagaggcuggaucuucggcaccacacuggacagcaagacccagagccugcugaucgugaacaacgccaccaacguggucaucaaagugugcgaguuccaguucugcaacgaccccuuccugggcgucuacuaccacaagaacaacaagagcuggauggaaagcgaguuccggguguacagcagcgccaacaacugcaccuucgaguacgugucccagccuuuccugauggaccuggaaggcaagcagggcaacuucaagaaccugcgcgaguucguguuuaagaacaucgacggcuacuucaagaucuacagcaagcacaccccuaucaaccucgugcgggaucugccucagggcuucucugcucuggaaccccugguggaucugcccaucggcaucaacaucacccgguuucagacacugcuggcccugcacagaagcuaccugacaccuggcgauagcagcagcggauggacagcuggugccgccgcuuacuaugugggcuaccugcagccuagaaccuuccugcugaaguacaacgagaacggcaccaucaccgacgccguggauugugcucuggauccucugagcgagacaaagugcacccugaaguccuucaccguggaaaagggcaucuaccagaccagcaacuuccgggugcagcccaccgaauccaucgugcgguuccccaauaucaccaaucugugccccuucggcgagguguucaaugccaccagauucgccucuguguacgccuggaaccggaagcggaucagcaauugcguggccgacuacuccgugcuguacaacuccgccagcuucagcaccuucaagugcuacggcguguccccuaccaagcugaacgaccugugcuucacaaacguguacgccgacagcuucgugauccggggagaugaagugcggcagauugccccuggacagacaggcaagaucgccgacuacaacuacaagcugcccgacgacuucaccggcugugugauugccuggaacagcaacaaccuggacuccaaagucggcggcaacuacaauuaccuguaccggcuguuccggaaguccaaucugaagcccuucgagcgggacaucuccaccgagaucuaucaggccggcagcaccccuuguaacggcgugaagggcuucaacugcuacuucccacugcaguccuacggcuuucagcccacaaauggcgugggcuaucagcccuacagagugguggugcugagcuucgaacugcugcaugccccugccacagugugcggcccuaagaaaagcaccaaucucgugaagaacaaaugcgugaacuucaacuucaacggccugaccggcaccggcgugcugacagagagcaacaagaaguuccugccauuccagcaguuuggccgggauaucgccgauaccacagacgccguuagagauccccagacacuggaaauccuggacaucaccccuugcagcuucggcggagugucugugaucaccccuggcaccaacaccagcaaucagguggcagugcuguaccagggcgugaacuguaccgaagugcccguggccauucacgccgaucagcugacaccuacauggcggguguacuccaccggcagcaauguguuucagaccagagccggcugucugaucggagccgagcacgugaacaauagcuacgagugcgacauccccaucggcgcuggaaucugcgccagcuaccagacacagacaaacagcccucggagagccagaagcguggccagccagagcaucauugccuacacaaugucucugggcgccgagaacagcguggccuacuccaacaacucuaucgcuauccccaccaacuucaccaucagcgugaccacagagauccugccuguguccaugaccaagaccagcguggacugcaccauguacaucugcggcgauuccaccgagugcuccaaccugcugcugcaguacggcagcuucugcacccagcugaauagagcccugacagggaucgccguggaacaggacaagaacacccaagagguguucgcccaagugaagcagaucuacaagaccccuccuaucaaggacuucggcggcuucaauuucagccagauucugcccgauccuagcaagcccagcaagcggagcuucaucgaggaccugcuguucaacaaagugacacuggccgacgccggcuucaucaagcaguauggcgauugucugggcgacauugccgccagggaucugauuugcgcccagaaguuuaacggacugacagugcugccuccucugcugaccgaugagaugaucgcccaguacacaucugcccugcuggccggcacaaucacaagcggcuggacauuuggagcaggcgccgcucugcagauccccuuugcuaugcagauggccuaccgguucaacggcaucggagugacccagaaugugcuguacgagaaccagaagcugaucgccaaccaguucaacagcgccaucggcaagauccaggacagccugagcagcacagcaagcgcccugggaaagcugcaggacguggucaaccagaaugcccaggcacugaacacccuggucaagcagcuguccuccaacuucggcgccaucagcucugugcugaacgauauccugagcagacuggacaaggucgaggccgaggugcagaucgacagacugaucacaggcagacugcagagccuccagacauacgugacccagcagcugaucagagccgccgagauuagagccucugccaaucuggccgccaccaagaugucugagugugugcugggccagagcaagagaguggacuuuugcggcaagggcuaccaccugaugagcuucccucagucugccccucacggcgugguguuucugcacgugacauaugugcccgcucaagagaagaauuucaccaccgcuccagccaucugccacgacggcaaagcccacuuuccuagagaaggcguguucguguccaacggcacccauugguucgugacacagcggaacuucuacgagccccagaucaucaccaccgacaacaccuucgugucuggcaacugcgacgucgugaucggcauugugaacaauaccguguacgacccucugcagcccgagcuggacagcuucaaagaggaacuggacaaguacuuuaagaaccacacaagccccgacguggaccugggcgauaucagcggaaucaaugccagcgucgugaacauccagaaagagaucgaccggcugaacgagguggccaagaaucugaacgagagccugaucgaccugcaagaacuggggaaguacgagcaguacaucaaguggcccugguacaucuggcugggcuuuaucgccggacugauugccaucgugauggucacaaucaugcuguguugcaugaccagcugcuguagcugccugaagggcuguuguagcuguggcagcugcugcaaguucgacgaggacgauucugagcccgugcugaagggcgugaaacugcacuacacaugaggacuaguuauaagacugacuagcccgaugggccucccaacgggcccuccuccccuccuugcaccgagagaucucaaaggcucuuuucagagccaccaaaaaaaaaaaaaaaaaaaaaaaaaaaaaaaaaaaaaaaaaaaaaaaaaaaaaaaaaaaaaaaaaaaaaaaaaaaaaaaaaaaaaaaaaaaaaaaaaaaaa

SEQ ID NO: 24615 - RNA, 4035 nt, Artificial Sequence
  SARS-CoV-2/Wuhan/WIV05/2019__EPI_ISL_402128 spike protein mRNA gc mod (1-1273)(L18F_T20N_P26S_D138Y_R190S_K417T_E484K_N501Y_D614G_H655Y _T1027I)
aggagaaagcuuaccauguucguguuccuggugcugcugccucugguguccagccagugugugaacuucaccaacagaacacagcugccuagcgccuacaccaacagcuuuaccagaggcguguacuaccccgacaagguguucagauccagcgugcugcacucuacccaggaccuguuccugccuuucuucagcaacgugaccugguuccacgccauccacguguccggcaccaauggcaccaagagauucgacaaccccgugcugcccuucaacgacgggguguacuuugccagcaccgagaaguccaacaucaucagaggcuggaucuucggcaccacacuggacagcaagacccagagccugcugaucgugaacaacgccaccaacguggucaucaaagugugcgaguuccaguucugcaacuaccccuuccugggcgucuacuaccacaagaacaacaagagcuggauggaaagcgaguuccggguguacagcagcgccaacaacugcaccuucgaguacgugucccagccuuuccugauggaccuggaaggcaagcagggcaacuucaagaaccugagcgaguucguguuuaagaacaucgacggcuacuucaagaucuacagcaagcacaccccuaucaaccucgugcgggaucugccucagggcuucucugcucuggaaccccugguggaucugcccaucggcaucaacaucacccgguuucagacacugcuggcccugcacagaagcuaccugacaccuggcgauagcagcagcggauggacagcuggugccgccgcuuacuaugugggcuaccugcagccuagaaccuuccugcugaaguacaacgagaacggcaccaucaccgacgccguggauugugcucuggauccucugagcgagacaaagugcacccugaaguccuucaccguggaaaagggcaucuaccagaccagcaacuuccgggugcagcccaccgaauccaucgugcgguuccccaauaucaccaaucugugccccuucggcgagguguucaaugccaccagauucgccucuguguacgccuggaaccggaagcggaucagcaauugcguggccgacuacuccgugcuguacaacuccgccagcuucagcaccuucaagugcuacggcguguccccuaccaagcugaacgaccugugcuucacaaacguguacgccgacagcuucgugauccggggagaugaagugcggcagauugccccuggacagacaggcaccaucgccgacuacaacuacaagcugcccgacgacuucaccggcugugugauugccuggaacagcaacaaccuggacuccaaagucggcggcaacuacaauuaccuguaccggcuguuccggaaguccaaucugaagcccuucgagcgggacaucuccaccgagaucuaucaggccggcagcaccccuuguaacggcgugaagggcuucaacugcuacuucccacugcaguccuacggcuuucagcccacauacggcgugggcuaucagcccuacagagugguggugcugagcuucgaacugcugcaugccccugccacagugugcggcccuaagaaaagcaccaaucucgugaagaacaaaugcgugaacuucaacuucaacggccugaccggcaccggcgugcugacagagagcaacaagaaguuccugccauuccagcaguuuggccgggauaucgccgauaccacagacgccguuagagauccccagacacuggaaauccuggacaucaccccuugcagcuucggcggagugucugugaucaccccuggcaccaacaccagcaaucagguggcagugcuguaccagggcgugaacuguaccgaagugcccguggccauucacgccgaucagcugacaccuacauggcggguguacuccaccggcagcaauguguuucagaccagagccggcugucugaucggagccgaguacgugaacaauagcuacgagugcgacauccccaucggcgcuggaaucugcgccagcuaccagacacagacaaacagcccucggagagccagaagcguggccagccagagcaucauugccuacacaaugucucugggcgccgagaacagcguggccuacuccaacaacucuaucgcuauccccaccaacuucaccaucagcgugaccacagagauccugccuguguccaugaccaagaccagcguggacugcaccauguacaucugcggcgauuccaccgagugcuccaaccugcugcugcaguacggcagcuucugcacccagcugaauagagcccugacagggaucgccguggaacaggacaagaacacccaagagguguucgcccaagugaagcagaucuacaagaccccuccuaucaaggacuucggcggcuucaauuucagccagauucugcccgauccuagcaagcccagcaagcggagcuucaucgaggaccugcuguucaacaaagugacacuggccgacgccggcuucaucaagcaguauggcgauugucugggcgacauugccgccagggaucugauuugcgcccagaaguuuaacggacugacagugcugccuccucugcugaccgaugagaugaucgcccaguacacaucugcccugcuggccggcacaaucacaagcggcuggacauuuggagcaggcgccgcucugcagauccccuuugcuaugcagauggccuaccgguucaacggcaucggagugacccagaaugugcuguacgagaaccagaagcugaucgccaaccaguucaacagcgccaucggcaagauccaggacagccugagcagcacagcaagcgcccugggaaagcugcaggacguggucaaccagaaugcccaggcacugaacacccuggucaagcagcuguccuccaacuucggcgccaucagcucugugcugaacgauauccugagcagacuggacaaggucgaggccgaggugcagaucgacagacugaucacaggcagacugcagagccuccagacauacgugacccagcagcugaucagagccgccgagauuagagccucugccaaucuggccgccaucaagaugucugagugugugcugggccagagcaagagaguggacuuuugcggcaagggcuaccaccugaugagcuucccucagucugccccucacggcgugguguuucugcacgugacauaugugcccgcucaagagaagaauuucaccaccgcuccagccaucugccacgacggcaaagcccacuuuccuagagaaggcguguucguguccaacggcacccauugguucgugacacagcggaacuucuacgagccccagaucaucaccaccgacaacaccuucgugucuggcaacugcgacgucgugaucggcauugugaacaauaccguguacgacccucugcagcccgagcuggacagcuucaaagaggaacuggacaaguacuuuaagaaccacacaagccccgacguggaccugggcgauaucagcggaaucaaugccagcgucgugaacauccagaaagagaucgaccggcugaacgagguggccaagaaucugaacgagagccugaucgaccugcaagaacuggggaaguacgagcaguacaucaaguggcccugguacaucuggcugggcuuuaucgccggacugauugccaucgugauggucacaaucaugcuguguugcaugaccagcugcuguagcugccugaagggcuguuguagcuguggcagcugcugcaaguucgacgaggacgauucugagcccgugcugaagggcgugaaacugcacuacacaugaggacuaguuauaagacugacuagcccgaugggccucccaacgggcccuccuccccuccuugcaccgagagaucucaaaggcucuuuucagagccaccaaaaaaaaaaaaaaaaaaaaaaaaaaaaaaaaaaaaaaaaaaaaaaaaaaaaaaaaaaaaaaaaaaaaaaaaaaaaaaaaaaaaaaaaaaaaaaaaaaaaa

SEQ ID NO: 24616 - RNA, 4035 nt, Artificial Sequence
  SARS-CoV-2/Wuhan/WIV05/2019__EPI_ISL_402128 spike protein mRNA gc mod (1-1273)(S13I_W152C_L452R_D614G)
aggagaaagcuuaccauguucguguuccuggugcugcugccucugguguccauccagugugugaaccugaccaccagaacacagcugccuccagccuacaccaacagcuuuaccagaggcguguacuaccccgacaagguguucagauccagcgugcugcacucuacccaggaccuguuccugccuuucuucagcaacgugaccugguuccacgccauccacguguccggcaccaauggcaccaagagauucgacaaccccgugcugcccuucaacgacgggguguacuuugccagcaccgagaaguccaacaucaucagaggcuggaucuucggcaccacacuggacagcaagacccagagccugcugaucgugaacaacgccaccaacguggucaucaaagugugcgaguuccaguucugcaacgaccccuuccugggcgucuacuaccacaagaacaacaagagcugcauggaaagcgaguuccggguguacagcagcgccaacaacugcaccuucgaguacgugucccagccuuuccugauggaccuggaaggcaagcagggcaacuucaagaaccugcgcgaguucguguuuaagaacaucgacggcuacuucaagaucuacagcaagcacaccccuaucaaccucgugcgggaucugccucagggcuucucugcucuggaaccccugguggaucugcccaucggcaucaacaucacccgguuucagacacugcuggcccugcacagaagcuaccugacaccuggcgauagcagcagcggauggacagcuggugccgccgcuuacuaugugggcuaccugcagccuagaaccuuccugcugaaguacaacgagaacggcaccaucaccgacgccguggauugugcucuggauccucugagcgagacaaagugcacccugaaguccuucaccguggaaaagggcaucuaccagaccagcaacuuccgggugcagcccaccgaauccaucgugcgguuccccaauaucaccaaucugugccccuucggcgagguguucaaugccaccagauucgccucuguguacgccuggaaccggaagcggaucagcaauugcguggccgacuacuccgugcuguacaacuccgccagcuucagcaccuucaagugcuacggcguguccccuaccaagcugaacgaccugugcuucacaaacguguacgccgacagcuucgugauccggggagaugaagugcggcagauugccccuggacagacaggcaagaucgccgacuacaacuacaagcugcccgacgacuucaccggcugugugauugccuggaacagcaacaaccuggacuccaaagucggcggcaacuacaauuaccgcuaccggcuguuccggaaguccaaucugaagcccuucgagcgggacaucuccaccgagaucuaucaggccggcagcaccccuuguaacggcguggaaggcuucaacugcuacuucccacugcaguccuacggcuuucagcccacaaauggcgugggcuaucagcccuacagagugguggugcugagcuucgaacugcugcaugccccugccacagugugcggcccuaagaaaagcaccaaucucgugaagaacaaaugcgugaacuucaacuucaacggccugaccggcaccggcgugcugacagagagcaacaagaaguuccugccauuccagcaguuuggccgggauaucgccgauaccacagacgccguuagagauccccagacacuggaaauccuggacaucaccccuugcagcuucggcggagugucugugaucaccccuggcaccaacaccagcaaucagguggcagugcuguaccagggcgugaacuguaccgaagugcccguggccauucacgccgaucagcugacaccuacauggcggguguacuccaccggcagcaauguguuucagaccagagccggcugucugaucggagccgagcacgugaacaauagcuacgagugcgacauccccaucggcgcuggaaucugcgccagcuaccagacacagacaaacagcccucggagagccagaagcguggccagccagagcaucauugccuacacaaugucucugggcgccgagaacagcguggccuacuccaacaacucuaucgcuauccccaccaacuucaccaucagcgugaccacagagauccugccuguguccaugaccaagaccagcguggacugcaccauguacaucugcggcgauuccaccgagugcuccaaccugcugcugcaguacggcagcuucugcacccagcugaauagagcccugacagggaucgccguggaacaggacaagaacacccaagagguguucgcccaagugaagcagaucuacaagaccccuccuaucaaggacuucggcggcuucaauuucagccagauucugcccgauccuagcaagcccagcaagcggagcuucaucgaggaccugcuguucaacaaagugacacuggccgacgccggcuucaucaagcaguauggcgauugucugggcgacauugccgccagggaucugauuugcgcccagaaguuuaacggacugacagugcugccuccucugcugaccgaugagaugaucgcccaguacacaucugcccugcuggccggcacaaucacaagcggcuggacauuuggagcaggcgccgcucugcagauccccuuugcuaugcagauggccuaccgguucaacggcaucggagugacccagaaugugcuguacgagaaccagaagcugaucgccaaccaguucaacagcgccaucggcaagauccaggacagccugagcagcacagcaagcgcccugggaaagcugcaggacguggucaaccagaaugcccaggcacugaacacccuggucaagcagcuguccuccaacuucggcgccaucagcucugugcugaacgauauccugagcagacuggacaaggucgaggccgaggugcagaucgacagacugaucacaggcagacugcagagccuccagacauacgugacccagcagcugaucagagccgccgagauuagagccucugccaaucuggccgccaccaagaugucugagugugugcugggccagagcaagagaguggacuuuugcggcaagggcuaccaccugaugagcuucccucagucugccccucacggcgugguguuucugcacgugacauaugugcccgcucaagagaagaauuucaccaccgcuccagccaucugccacgacggcaaagcccacuuuccuagagaaggcguguucguguccaacggcacccauugguucgugacacagcggaacuucuacgagccccagaucaucaccaccgacaacaccuucgugucuggcaacugcgacgucgugaucggcauugugaacaauaccguguacgacccucugcagcccgagcuggacagcuucaaagaggaacuggacaaguacuuuaagaaccacacaagccccgacguggaccugggcgauaucagcggaaucaaugccagcgucgugaacauccagaaagagaucgaccggcugaacgagguggccaagaaucugaacgagagccugaucgaccugcaagaacuggggaaguacgagcaguacaucaaguggcccugguacaucuggcugggcuuuaucgccggacugauugccaucgugauggucacaaucaugcuguguugcaugaccagcugcuguagcugccugaagggcuguuguagcuguggcagcugcugcaaguucgacgaggacgauucugagcccgugcugaagggcgugaaacugcacuacacaugaggacuaguuauaagacugacuagcccgaugggccucccaacgggcccuccuccccuccuugcaccgagagaucucaaaggcucuuuucagagccaccaaaaaaaaaaaaaaaaaaaaaaaaaaaaaaaaaaaaaaaaaaaaaaaaaaaaaaaaaaaaaaaaaaaaaaaaaaaaaaaaaaaaaaaaaaaaaaaaaaaaa

SEQ ID NO: 24617 - RNA, 4035 nt, Artificial Sequence
  SARS-CoV-2/Wuhan/WIV05/2019__EPI_ISL_402128 spike protein mRNA gc (1-1273)(K986P_V987P)
aggagaaagcuuaccauguucguguuccugguccuccugccccuggugagcucccagugcgugaaccucaccacccgcacgcagcugccgcccgccuacaccaacagcuucacccggggcgucuacuaccccgacaagguguuccgcuccagcgugcugcacuccacccaggaccucuuccugcccuucuucagcaacgucacgugguuccacgccauccacguguccgggaccaacggcaccaagcgguucgacaacccggugcugcccuucaacgacggggucuacuucgcgagcaccgagaaguccaacaucauccgcggcuggaucuucgggacgacccucgacagcaagacccagucccugcugaucgugaacaacgccaccaacguggucaucaaggugugcgaguuccaguucugcaacgaccccuuccucggcguguacuaccacaagaacaacaagagcuggauggaguccgaguuccgggucuacagcuccgccaacaacugcacguucgaguacgugagccagcccuuccugauggaccuggagggcaagcaggggaacuucaagaaccuccgcgaguucguguucaagaacaucgacggcuacuucaagaucuacuccaagcacaccccgaucaaccugguccgggaccugccccagggguucagcgcccucgagccccugguggaccugcccaucggcaucaacaucacccgcuuccagacccuccuggcccugcaccgguccuaccucacgccgggggacagcagcuccggcuggaccgcgggcgccgccgccuacuacgugggguaccugcagccccgcaccuuccugcucaaguacaacgagaacggcaccaucacggacgcggucgacugcgcccuggacccccugagcgagaccaagugcacccucaaguccuucaccguggagaaggggaucuaccagacgagcaacuuccgggugcagcccaccgaguccaucguccgcuucccgaacaucaccaaccugugccccuucggcgagguguucaacgccacccgguucgccagcgucuacgccuggaaccgcaagcggaucuccaacugcguggcggacuacagcgugcuguacaacuccgccagcuucuccacguucaagugcuacggcgucagccccaccaagcucaacgaccugugcuucaccaacguguacgccgacuccuucgugauccgcggggacgagguccggcagaucgcccccggccagaccgggaagaucgccgacuacaacuacaagcugccggacgacuucacgggcugcgugaucgcguggaacagcaacaaccucgacuccaaggucgggggcaacuacaacuaccuguaccgccuguuccgcaagagcaaccucaagcccuucgagcgggacaucuccaccgagaucuaccaggccggcagcacccccugcaacgggguggagggcuucaacugcuacuucccccugcaguccuacggguuccagccgaccaacggcgugggguaccagcccuaccggguggucgugcugagcuucgagcuccugcacgcccccgccacggugugcggccccaagaaguccaccaaccuggucaagaacaagugcgugaacuucaacuucaacggccucaccgggaccggcgugcugaccgagagcaacaagaaguuccugccguuccagcaguucgggcgcgacaucgccgacacgaccgacgcgguccgcgacccccagacccuggagauccucgacaucacccccugcagcuucggcgggguguccgugaucacgccgggcaccaacaccagcaaccaggucgccgugcuguaccaggacgugaacugcaccgagguccccguggccauccacgccgaccagcugacgcccaccuggcggguguacuccaccggcagcaacgucuuccagacccgcgccgggugccucaucggcgcggagcacgugaacaacuccuacgagugcgacauccccaucggggccggcaucugcgccagcuaccagacgcagaccaacuccccgcggcgcgcccggagcguggcgucccagagcaucaucgccuacaccaugucccugggcgccgagaacagcgucgccuacuccaacaacagcaucgccauccccaccaacuucacgaucuccgugaccaccgagauccugcccgugagcaugaccaagacgagcgucgacugcaccauguacaucugcggggacuccaccgagugcagcaaccuccugcugcaguacggcuccuucugcacccagcucaaccgcgcgcugacggggaucgccguggagcaggacaagaacacccaggagguguucgcccaggucaagcagaucuacaagacgcccccgaucaaggacuucggcggguucaacuucagccagauccugcccgaccccuccaagcccagcaagcgguccuucaucgaggaccuccuguucaacaaggugacccuggccgacgccggcuucaucaagcaguacggcgacugccucggggacaucgcggcccgcgaccugaucugcgcccagaaguucaacggccugaccgugcucccgccccugcugaccgacgagaugaucgcccaguacaccagcgcccuccuggcggggaccaucacguccggcuggaccuucggggccggcgccgcccugcagauccccuucgcgaugcagauggccuaccgguucaacggcaucggggucacccagaacgugcucuacgagaaccagaagcugaucgccaaccaguucaacagcgccaucggcaagauccaggacucccugagcuccaccgccagcgcgcucgggaagcugcaggacguggucaaccagaacgcccaggcccugaacacgcucgugaagcagcuguccagcaacuucggcgccaucuccagcgugcugaacgacauccucucccgccuggacccgcccgaggccgaggugcagaucgaccggcugaucaccgggcgccuccagagccugcagaccuacgugacccagcagcugauccgggcggccgagauccgcgccagcgccaaccucgccgcgaccaagauguccgagugcguccugggccagagcaagcggguggacuucugcggcaagggguaccaccugauguccuucccccagagcgccccgcacggcguggucuuccuccacgugacguacguccccgcccaggagaagaacuucaccaccgcccccgcgaucugccacgacgggaaggcccacuucccccgcgagggcguguucguguccaacgggacccacugguucgucacgcagcggaacuucuacgagccgcagaucaucaccaccgacaacaccuucgugagcggcaacugcgacguggucaucggcaucgugaacaacacgguguacgacccccugcagcccgagcuggacuccuucaaggaggagcucgacaaguacuucaagaaccacaccagccccgacgucgaccugggggacaucuccggcaucaacgccagcguggugaacauccagaaggagaucgaccgccugaacgaggucgccaagaaccucaacgagucccugaucgaccugcaggagcucgggaaguacgagcaguacaucaaguggccgugguacaucuggcugggcuucaucgccggccugaucgcgaucgugauggugaccaucaugcucugcugcaugaccagcugcugcuccugccugaaggggugcugcagcugcggcuccugcugcaaguucgacgaggacgacagcgagcccguccugaagggggugaagcuccacuacacgugaggacuaguuauaagacugacuagcccgaugggccucccaacgggcccuccuccccuccuugcaccgagagaucucaaaggcucuuuucagagccaccaaaaaaaaaaaaaaaaaaaaaaaaaaaaaaaaaaaaaaaaaaaaaaaaaaaaaaaaaaaaaaaaaaaaaaaaaaaaaaaaaaaaaaaaaaaaaaaaaaaaa

SEQ ID NO: 24618 - RNA, 4035 nt, Artificial Sequence
  SARS-CoV-2/Wuhan/WIV05/2019__EPI_ISL_402128 spike protein mRNA gc (1-1273)(K986P_V987P_ D614G)
aggagaaagcuuaccauguucguguuccugguccuccugccccuggugagcucccagugcgugaaccucaccacccgcacgcagcugccgcccgccuacaccaacagcuucacccggggcgucuacuaccccgacaagguguuccgcuccagcgugcugcacuccacccaggaccucuuccugcccuucuucagcaacgucacgugguuccacgccauccacguguccgggaccaacggcaccaagcgguucgacaacccggugcugcccuucaacgacggggucuacuucgcgagcaccgagaaguccaacaucauccgcggcuggaucuucgggacgacccucgacagcaagacccagucccugcugaucgugaacaacgccaccaacguggucaucaaggugugcgaguuccaguucugcaacgaccccuuccucggcguguacuaccacaagaacaacaagagcuggauggaguccgaguuccgggucuacagcuccgccaacaacugcacguucgaguacgugagccagcccuuccugauggaccuggagggcaagcaggggaacuucaagaaccuccgcgaguucguguucaagaacaucgacggcuacuucaagaucuacuccaagcacaccccgaucaaccugguccgggaccugccccagggguucagcgcccucgagccccugguggaccugcccaucggcaucaacaucacccgcuuccagacccuccuggcccugcaccgguccuaccucacgccgggggacagcagcuccggcuggaccgcgggcgccgccgccuacuacgugggguaccugcagccccgcaccuuccugcucaaguacaacgagaacggcaccaucacggacgcggucgacugcgcccuggacccccugagcgagaccaagugcacccucaaguccuucaccguggagaaggggaucuaccagacgagcaacuuccgggugcagcccaccgaguccaucguccgcuucccgaacaucaccaaccugugccccuucggcgagguguucaacgccacccgguucgccagcgucuacgccuggaaccgcaagcggaucuccaacugcguggcggacuacagcgugcuguacaacuccgccagcuucuccacguucaagugcuacggcgucagccccaccaagcucaacgaccugugcuucaccaacguguacgccgacuccuucgugauccgcggggacgagguccggcagaucgcccccggccagaccgggaagaucgccgacuacaacuacaagcugccggacgacuucacgggcugcgugaucgcguggaacagcaacaaccucgacuccaaggucgggggcaacuacaacuaccuguaccgccuguuccgcaagagcaaccucaagcccuucgagcgggacaucuccaccgagaucuaccaggccggcagcacccccugcaacgggguggagggcuucaacugcuacuucccccugcaguccuacggguuccagccgaccaacggcgugggguaccagcccuaccggguggucgugcugagcuucgagcuccugcacgcccccgccacggugugcggccccaagaaguccaccaaccuggucaagaacaagugcgugaacuucaacuucaacggccucaccgggaccggcgugcugaccgagagcaacaagaaguuccugccguuccagcaguucgggcgcgacaucgccgacacgaccgacgcgguccgcgacccccagacccuggagauccucgacaucacccccugcagcuucggcgggguguccgugaucacgccgggcaccaacaccagcaaccaggucgccgugcuguaccagggcgugaacugcaccgagguccccguggccauccacgccgaccagcugacgcccaccuggcggguguacuccaccggcagcaacgucuuccagacccgcgccgggugccucaucggcgcggagcacgugaacaacuccuacgagugcgacauccccaucggggccggcaucugcgccagcuaccagacgcagaccaacuccccgcggcgcgcccggagcguggcgucccagagcaucaucgccuacaccaugucccugggcgccgagaacagcgucgccuacuccaacaacagcaucgccauccccaccaacuucacgaucuccgugaccaccgagauccugcccgugagcaugaccaagacgagcgucgacugcaccauguacaucugcggggacuccaccgagugcagcaaccuccugcugcaguacggcuccuucugcacccagcucaaccgcgcgcugacggggaucgccguggagcaggacaagaacacccaggagguguucgcccaggucaagcagaucuacaagacgcccccgaucaaggacuucggcggguucaacuucagccagauccugcccgaccccuccaagcccagcaagcgguccuucaucgaggaccuccuguucaacaaggugacccuggccgacgccggcuucaucaagcaguacggcgacugccucggggacaucgcggcccgcgaccugaucugcgcccagaaguucaacggccugaccgugcucccgccccugcugaccgacgagaugaucgcccaguacaccagcgcccuccuggcggggaccaucacguccggcuggaccuucggggccggcgccgcccugcagauccccuucgcgaugcagauggccuaccgguucaacggcaucggggucacccagaacgugcucuacgagaaccagaagcugaucgccaaccaguucaacagcgccaucggcaagauccaggacucccugagcuccaccgccagcgcgcucgggaagcugcaggacguggucaaccagaacgcccaggcccugaacacgcucgugaagcagcuguccagcaacuucggcgccaucuccagcgugcugaacgacauccucucccgccuggacccgcccgaggccgaggugcagaucgaccggcugaucaccgggcgccuccagagccugcagaccuacgugacccagcagcugauccgggcggccgagauccgcgccagcgccaaccucgccgcgaccaagauguccgagugcguccugggccagagcaagcggguggacuucugcggcaagggguaccaccugauguccuucccccagagcgccccgcacggcguggucuuccuccacgugacguacguccccgcccaggagaagaacuucaccaccgcccccgcgaucugccacgacgggaaggcccacuucccccgcgagggcguguucguguccaacgggacccacugguucgucacgcagcggaacuucuacgagccgcagaucaucaccaccgacaacaccuucgugagcggcaacugcgacguggucaucggcaucgugaacaacacgguguacgacccccugcagcccgagcuggacuccuucaaggaggagcucgacaaguacuucaagaaccacaccagccccgacgucgaccugggggacaucuccggcaucaacgccagcguggugaacauccagaaggagaucgaccgccugaacgaggucgccaagaaccucaacgagucccugaucgaccugcaggagcucgggaaguacgagcaguacaucaaguggccgugguacaucuggcugggcuucaucgccggccugaucgcgaucgugauggugaccaucaugcucugcugcaugaccagcugcugcuccugccugaaggggugcugcagcugcggcuccugcugcaaguucgacgaggacgacagcgagcccguccugaagggggugaagcuccacuacacgugaggacuaguuauaagacugacuagcccgaugggccucccaacgggcccuccuccccuccuugcaccgagagaucucaaaggcucuuuucagagccaccaaaaaaaaaaaaaaaaaaaaaaaaaaaaaaaaaaaaaaaaaaaaaaaaaaaaaaaaaaaaaaaaaaaaaaaaaaaaaaaaaaaaaaaaaaaaaaaaaaaaa

SEQ ID NO: 24619 - RNA, 4035 nt, Artificial Sequence
  SARS-CoV-2/Wuhan/WIV05/2019__EPI_ISL_402128 spike protein mRNA gc (1-1273)(K986P_V987P_A222V_D614G)
aggagaaagcuuaccauguucguguuccugguccuccugccccuggugagcucccagugcgugaaccucaccacccgcacgcagcugccgcccgccuacaccaacagcuucacccggggcgucuacuaccccgacaagguguuccgcuccagcgugcugcacuccacccaggaccucuuccugcccuucuucagcaacgucacgugguuccacgccauccacguguccgggaccaacggcaccaagcgguucgacaacccggugcugcccuucaacgacggggucuacuucgcgagcaccgagaaguccaacaucauccgcggcuggaucuucgggacgacccucgacagcaagacccagucccugcugaucgugaacaacgccaccaacguggucaucaaggugugcgaguuccaguucugcaacgaccccuuccucggcguguacuaccacaagaacaacaagagcuggauggaguccgaguuccgggucuacagcuccgccaacaacugcacguucgaguacgugagccagcccuuccugauggaccuggagggcaagcaggggaacuucaagaaccuccgcgaguucguguucaagaacaucgacggcuacuucaagaucuacuccaagcacaccccgaucaaccugguccgggaccugccccagggguucagcguccucgagccccugguggaccugcccaucggcaucaacaucacccgcuuccagacccuccuggcccugcaccgguccuaccucacgccgggggacagcagcuccggcuggaccgcgggcgccgccgccuacuacgugggguaccugcagccccgcaccuuccugcucaaguacaacgagaacggcaccaucacggacgcggucgacugcgcccuggacccccugagcgagaccaagugcacccucaaguccuucaccguggagaaggggaucuaccagacgagcaacuuccgggugcagcccaccgaguccaucguccgcuucccgaacaucaccaaccugugccccuucggcgagguguucaacgccacccgguucgccagcgucuacgccuggaaccgcaagcggaucuccaacugcguggcggacuacagcgugcuguacaacuccgccagcuucuccacguucaagugcuacggcgucagccccaccaagcucaacgaccugugcuucaccaacguguacgccgacuccuucgugauccgcggggacgagguccggcagaucgcccccggccagaccgggaagaucgccgacuacaacuacaagcugccggacgacuucacgggcugcgugaucgcguggaacagcaacaaccucgacuccaaggucgggggcaacuacaacuaccuguaccgccuguuccgcaagagcaaccucaagcccuucgagcgggacaucuccaccgagaucuaccaggccggcagcacccccugcaacgggguggagggcuucaacugcuacuucccccugcaguccuacggguuccagccgaccaacggcgugggguaccagcccuaccggguggucgugcugagcuucgagcuccugcacgcccccgccacggugugcggccccaagaaguccaccaaccuggucaagaacaagugcgugaacuucaacuucaacggccucaccgggaccggcgugcugaccgagagcaacaagaaguuccugccguuccagcaguucgggcgcgacaucgccgacacgaccgacgcgguccgcgacccccagacccuggagauccucgacaucacccccugcagcuucggcgggguguccgugaucacgccgggcaccaacaccagcaaccaggucgccgugcuguaccagggcgugaacugcaccgagguccccguggccauccacgccgaccagcugacgcccaccuggcggguguacuccaccggcagcaacgucuuccagacccgcgccgggugccucaucggcgcggagcacgugaacaacuccuacgagugcgacauccccaucggggccggcaucugcgccagcuaccagacgcagaccaacuccccgcggcgcgcccggagcguggcgucccagagcaucaucgccuacaccaugucccugggcgccgagaacagcgucgccuacuccaacaacagcaucgccauccccaccaacuucacgaucuccgugaccaccgagauccugcccgugagcaugaccaagacgagcgucgacugcaccauguacaucugcggggacuccaccgagugcagcaaccuccugcugcaguacggcuccuucugcacccagcucaaccgcgcgcugacggggaucgccguggagcaggacaagaacacccaggagguguucgcccaggucaagcagaucuacaagacgcccccgaucaaggacuucggcggguucaacuucagccagauccugcccgaccccuccaagcccagcaagcgguccuucaucgaggaccuccuguucaacaaggugacccuggccgacgccggcuucaucaagcaguacggcgacugccucggggacaucgcggcccgcgaccugaucugcgcccagaaguucaacggccugaccgugcucccgccccugcugaccgacgagaugaucgcccaguacaccagcgcccuccuggcggggaccaucacguccggcuggaccuucggggccggcgccgcccugcagauccccuucgcgaugcagauggccuaccgguucaacggcaucggggucacccagaacgugcucuacgagaaccagaagcugaucgccaaccaguucaacagcgccaucggcaagauccaggacucccugagcuccaccgccagcgcgcucgggaagcugcaggacguggucaaccagaacgcccaggcccugaacacgcucgugaagcagcuguccagcaacuucggcgccaucuccagcgugcugaacgacauccucucccgccuggacccgcccgaggccgaggugcagaucgaccggcugaucaccgggcgccuccagagccugcagaccuacgugacccagcagcugauccgggcggccgagauccgcgccagcgccaaccucgccgcgaccaagauguccgagugcguccugggccagagcaagcggguggacuucugcggcaagggguaccaccugauguccuucccccagagcgccccgcacggcguggucuuccuccacgugacguacguccccgcccaggagaagaacuucaccaccgcccccgcgaucugccacgacgggaaggcccacuucccccgcgagggcguguucguguccaacgggacccacugguucgucacgcagcggaacuucuacgagccgcagaucaucaccaccgacaacaccuucgugagcggcaacugcgacguggucaucggcaucgugaacaacacgguguacgacccccugcagcccgagcuggacuccuucaaggaggagcucgacaaguacuucaagaaccacaccagccccgacgucgaccugggggacaucuccggcaucaacgccagcguggugaacauccagaaggagaucgaccgccugaacgaggucgccaagaaccucaacgagucccugaucgaccugcaggagcucgggaaguacgagcaguacaucaaguggccgugguacaucuggcugggcuucaucgccggccugaucgcgaucgugauggugaccaucaugcucugcugcaugaccagcugcugcuccugccugaaggggugcugcagcugcggcuccugcugcaaguucgacgaggacgacagcgagcccguccugaagggggugaagcuccacuacacgugaggacuaguuauaagacugacuagcccgaugggccucccaacgggcccuccuccccuccuugcaccgagagaucucaaaggcucuuuucagagccaccaaaaaaaaaaaaaaaaaaaaaaaaaaaaaaaaaaaaaaaaaaaaaaaaaaaaaaaaaaaaaaaaaaaaaaaaaaaaaaaaaaaaaaaaaaaaaaaaaaaaa

SEQ ID NO: 24620 - RNA, 4035 nt, Artificial Sequence
  SARS-CoV-2/Wuhan/WIV05/2019__EPI_ISL_402128 spike protein mRNA gc (1-1273)(K986P_V987P_N439K_D614G)
aggagaaagcuuaccauguucguguuccugguccuccugccccuggugagcucccagugcgugaaccucaccacccgcacgcagcugccgcccgccuacaccaacagcuucacccggggcgucuacuaccccgacaagguguuccgcuccagcgugcugcacuccacccaggaccucuuccugcccuucuucagcaacgucacgugguuccacgccauccacguguccgggaccaacggcaccaagcgguucgacaacccggugcugcccuucaacgacggggucuacuucgcgagcaccgagaaguccaacaucauccgcggcuggaucuucgggacgacccucgacagcaagacccagucccugcugaucgugaacaacgccaccaacguggucaucaaggugugcgaguuccaguucugcaacgaccccuuccucggcguguacuaccacaagaacaacaagagcuggauggaguccgaguuccgggucuacagcuccgccaacaacugcacguucgaguacgugagccagcccuuccugauggaccuggagggcaagcaggggaacuucaagaaccuccgcgaguucguguucaagaacaucgacggcuacuucaagaucuacuccaagcacaccccgaucaaccugguccgggaccugccccagggguucagcgcccucgagccccugguggaccugcccaucggcaucaacaucacccgcuuccagacccuccuggcccugcaccgguccuaccucacgccgggggacagcagcuccggcuggaccgcgggcgccgccgccuacuacgugggguaccugcagccccgcaccuuccugcucaaguacaacgagaacggcaccaucacggacgcggucgacugcgcccuggacccccugagcgagaccaagugcacccucaaguccuucaccguggagaaggggaucuaccagacgagcaacuuccgggugcagcccaccgaguccaucguccgcuucccgaacaucaccaaccugugccccuucggcgagguguucaacgccacccgguucgccagcgucuacgccuggaaccgcaagcggaucuccaacugcguggcggacuacagcgugcuguacaacuccgccagcuucuccacguucaagugcuacggcgucagccccaccaagcucaacgaccugugcuucaccaacguguacgccgacuccuucgugauccgcggggacgagguccggcagaucgcccccggccagaccgggaagaucgccgacuacaacuacaagcugccggacgacuucacgggcugcgugaucgcguggaacagcaagaaccucgacuccaaggucgggggcaacuacaacuaccuguaccgccuguuccgcaagagcaaccucaagcccuucgagcgggacaucuccaccgagaucuaccaggccggcagcacccccugcaacgggguggagggcuucaacugcuacuucccccugcaguccuacggguuccagccgaccaacggcgugggguaccagcccuaccggguggucgugcugagcuucgagcuccugcacgcccccgccacggugugcggccccaagaaguccaccaaccuggucaagaacaagugcgugaacuucaacuucaacggccucaccgggaccggcgugcugaccgagagcaacaagaaguuccugccguuccagcaguucgggcgcgacaucgccgacacgaccgacgcgguccgcgacccccagacccuggagauccucgacaucacccccugcagcuucggcgggguguccgugaucacgccgggcaccaacaccagcaaccaggucgccgugcuguaccagggcgugaacugcaccgagguccccguggccauccacgccgaccagcugacgcccaccuggcggguguacuccaccggcagcaacgucuuccagacccgcgccgggugccucaucggcgcggagcacgugaacaacuccuacgagugcgacauccccaucggggccggcaucugcgccagcuaccagacgcagaccaacuccccgcggcgcgcccggagcguggcgucccagagcaucaucgccuacaccaugucccugggcgccgagaacagcgucgccuacuccaacaacagcaucgccauccccaccaacuucacgaucuccgugaccaccgagauccugcccgugagcaugaccaagacgagcgucgacugcaccauguacaucugcggggacuccaccgagugcagcaaccuccugcugcaguacggcuccuucugcacccagcucaaccgcgcgcugacggggaucgccguggagcaggacaagaacacccaggagguguucgcccaggucaagcagaucuacaagacgcccccgaucaaggacuucggcggguucaacuucagccagauccugcccgaccccuccaagcccagcaagcgguccuucaucgaggaccuccuguucaacaaggugacccuggccgacgccggcuucaucaagcaguacggcgacugccucggggacaucgcggcccgcgaccugaucugcgcccagaaguucaacggccugaccgugcucccgccccugcugaccgacgagaugaucgcccaguacaccagcgcccuccuggcggggaccaucacguccggcuggaccuucggggccggcgccgcccugcagauccccuucgcgaugcagauggccuaccgguucaacggcaucggggucacccagaacgugcucuacgagaaccagaagcugaucgccaaccaguucaacagcgccaucggcaagauccaggacucccugagcuccaccgccagcgcgcucgggaagcugcaggacguggucaaccagaacgcccaggcccugaacacgcucgugaagcagcuguccagcaacuucggcgccaucuccagcgugcugaacgacauccucucccgccuggacccgcccgaggccgaggugcagaucgaccggcugaucaccgggcgccuccagagccugcagaccuacgugacccagcagcugauccgggcggccgagauccgcgccagcgccaaccucgccgcgaccaagauguccgagugcguccugggccagagcaagcggguggacuucugcggcaagggguaccaccugauguccuucccccagagcgccccgcacggcguggucuuccuccacgugacguacguccccgcccaggagaagaacuucaccaccgcccccgcgaucugccacgacgggaaggcccacuucccccgcgagggcguguucguguccaacgggacccacugguucgucacgcagcggaacuucuacgagccgcagaucaucaccaccgacaacaccuucgugagcggcaacugcgacguggucaucggcaucgugaacaacacgguguacgacccccugcagcccgagcuggacuccuucaaggaggagcucgacaaguacuucaagaaccacaccagccccgacgucgaccugggggacaucuccggcaucaacgccagcguggugaacauccagaaggagaucgaccgccugaacgaggucgccaagaaccucaacgagucccugaucgaccugcaggagcucgggaaguacgagcaguacaucaaguggccgugguacaucuggcugggcuucaucgccggccugaucgcgaucgugauggugaccaucaugcucugcugcaugaccagcugcugcuccugccugaaggggugcugcagcugcggcuccugcugcaaguucgacgaggacgacagcgagcccguccugaagggggugaagcuccacuacacgugaggacuaguuauaagacugacuagcccgaugggccucccaacgggcccuccuccccuccuugcaccgagagaucucaaaggcucuuuucagagccaccaaaaaaaaaaaaaaaaaaaaaaaaaaaaaaaaaaaaaaaaaaaaaaaaaaaaaaaaaaaaaaaaaaaaaaaaaaaaaaaaaaaaaaaaaaaaaaaaaaaaa

SEQ ID NO: 24621 - RNA, 4035 nt, Artificial Sequence
  SARS-CoV-2/Wuhan/WIV05/2019__EPI_ISL_402128 spike protein mRNA gc (1-1273)(K986P_V987P_S477N_D614G)
aggagaaagcuuaccauguucguguuccugguccuccugccccuggugagcucccagugcgugaaccucaccacccgcacgcagcugccgcccgccuacaccaacagcuucacccggggcgucuacuaccccgacaagguguuccgcuccagcgugcugcacuccacccaggaccucuuccugcccuucuucagcaacgucacgugguuccacgccauccacguguccgggaccaacggcaccaagcgguucgacaacccggugcugcccuucaacgacggggucuacuucgcgagcaccgagaaguccaacaucauccgcggcuggaucuucgggacgacccucgacagcaagacccagucccugcugaucgugaacaacgccaccaacguggucaucaaggugugcgaguuccaguucugcaacgaccccuuccucggcguguacuaccacaagaacaacaagagcuggauggaguccgaguuccgggucuacagcuccgccaacaacugcacguucgaguacgugagccagcccuuccugauggaccuggagggcaagcaggggaacuucaagaaccuccgcgaguucguguucaagaacaucgacggcuacuucaagaucuacuccaagcacaccccgaucaaccugguccgggaccugccccagggguucagcgcccucgagccccugguggaccugcccaucggcaucaacaucacccgcuuccagacccuccuggcccugcaccgguccuaccucacgccgggggacagcagcuccggcuggaccgcgggcgccgccgccuacuacgugggguaccugcagccccgcaccuuccugcucaaguacaacgagaacggcaccaucacggacgcggucgacugcgcccuggacccccugagcgagaccaagugcacccucaaguccuucaccguggagaaggggaucuaccagacgagcaacuuccgggugcagcccaccgaguccaucguccgcuucccgaacaucaccaaccugugccccuucggcgagguguucaacgccacccgguucgccagcgucuacgccuggaaccgcaagcggaucuccaacugcguggcggacuacagcgugcuguacaacuccgccagcuucuccacguucaagugcuacggcgucagccccaccaagcucaacgaccugugcuucaccaacguguacgccgacuccuucgugauccgcggggacgagguccggcagaucgcccccggccagaccgggaagaucgccgacuacaacuacaagcugccggacgacuucacgggcugcgugaucgcguggaacagcaacaaccucgacuccaaggucgggggcaacuacaacuaccuguaccgccuguuccgcaagagcaaccucaagcccuucgagcgggacaucuccaccgagaucuaccaggccggcaacacccccugcaacgggguggagggcuucaacugcuacuucccccugcaguccuacggguuccagccgaccaacggcgugggguaccagcccuaccggguggucgugcugagcuucgagcuccugcacgcccccgccacggugugcggccccaagaaguccaccaaccuggucaagaacaagugcgugaacuucaacuucaacggccucaccgggaccggcgugcugaccgagagcaacaagaaguuccugccguuccagcaguucgggcgcgacaucgccgacacgaccgacgcgguccgcgacccccagacccuggagauccucgacaucacccccugcagcuucggcgggguguccgugaucacgccgggcaccaacaccagcaaccaggucgccgugcuguaccagggcgugaacugcaccgagguccccguggccauccacgccgaccagcugacgcccaccuggcggguguacuccaccggcagcaacgucuuccagacccgcgccgggugccucaucggcgcggagcacgugaacaacuccuacgagugcgacauccccaucggggccggcaucugcgccagcuaccagacgcagaccaacuccccgcggcgcgcccggagcguggcgucccagagcaucaucgccuacaccaugucccugggcgccgagaacagcgucgccuacuccaacaacagcaucgccauccccaccaacuucacgaucuccgugaccaccgagauccugcccgugagcaugaccaagacgagcgucgacugcaccauguacaucugcggggacuccaccgagugcagcaaccuccugcugcaguacggcuccuucugcacccagcucaaccgcgcgcugacggggaucgccguggagcaggacaagaacacccaggagguguucgcccaggucaagcagaucuacaagacgcccccgaucaaggacuucggcggguucaacuucagccagauccugcccgaccccuccaagcccagcaagcgguccuucaucgaggaccuccuguucaacaaggugacccuggccgacgccggcuucaucaagcaguacggcgacugccucggggacaucgcggcccgcgaccugaucugcgcccagaaguucaacggccugaccgugcucccgccccugcugaccgacgagaugaucgcccaguacaccagcgcccuccuggcggggaccaucacguccggcuggaccuucggggccggcgccgcccugcagauccccuucgcgaugcagauggccuaccgguucaacggcaucggggucacccagaacgugcucuacgagaaccagaagcugaucgccaaccaguucaacagcgccaucggcaagauccaggacucccugagcuccaccgccagcgcgcucgggaagcugcaggacguggucaaccagaacgcccaggcccugaacacgcucgugaagcagcuguccagcaacuucggcgccaucuccagcgugcugaacgacauccucucccgccuggacccgcccgaggccgaggugcagaucgaccggcugaucaccgggcgccuccagagccugcagaccuacgugacccagcagcugauccgggcggccgagauccgcgccagcgccaaccucgccgcgaccaagauguccgagugcguccugggccagagcaagcggguggacuucugcggcaagggguaccaccugauguccuucccccagagcgccccgcacggcguggucuuccuccacgugacguacguccccgcccaggagaagaacuucaccaccgcccccgcgaucugccacgacgggaaggcccacuucccccgcgagggcguguucguguccaacgggacccacugguucgucacgcagcggaacuucuacgagccgcagaucaucaccaccgacaacaccuucgugagcggcaacugcgacguggucaucggcaucgugaacaacacgguguacgacccccugcagcccgagcuggacuccuucaaggaggagcucgacaaguacuucaagaaccacaccagccccgacgucgaccugggggacaucuccggcaucaacgccagcguggugaacauccagaaggagaucgaccgccugaacgaggucgccaagaaccucaacgagucccugaucgaccugcaggagcucgggaaguacgagcaguacaucaaguggccgugguacaucuggcugggcuucaucgccggccugaucgcgaucgugauggugaccaucaugcucugcugcaugaccagcugcugcuccugccugaaggggugcugcagcugcggcuccugcugcaaguucgacgaggacgacagcgagcccguccugaagggggugaagcuccacuacacgugaggacuaguuauaagacugacuagcccgaugggccucccaacgggcccuccuccccuccuugcaccgagagaucucaaaggcucuuuucagagccaccaaaaaaaaaaaaaaaaaaaaaaaaaaaaaaaaaaaaaaaaaaaaaaaaaaaaaaaaaaaaaaaaaaaaaaaaaaaaaaaaaaaaaaaaaaaaaaaaaaaaa

SEQ ID NO: 24622 - RNA, 4035 nt, Artificial Sequence
  SARS-CoV-2/Wuhan/WIV05/2019__EPI_ISL_402128 spike protein mRNA gc (1-1273)(K986P_V987P_N501Y_D614G)
aggagaaagcuuaccauguucguguuccugguccuccugccccuggugagcucccagugcgugaaccucaccacccgcacgcagcugccgcccgccuacaccaacagcuucacccggggcgucuacuaccccgacaagguguuccgcuccagcgugcugcacuccacccaggaccucuuccugcccuucuucagcaacgucacgugguuccacgccauccacguguccgggaccaacggcaccaagcgguucgacaacccggugcugcccuucaacgacggggucuacuucgcgagcaccgagaaguccaacaucauccgcggcuggaucuucgggacgacccucgacagcaagacccagucccugcugaucgugaacaacgccaccaacguggucaucaaggugugcgaguuccaguucugcaacgaccccuuccucggcguguacuaccacaagaacaacaagagcuggauggaguccgaguuccgggucuacagcuccgccaacaacugcacguucgaguacgugagccagcccuuccugauggaccuggagggcaagcaggggaacuucaagaaccuccgcgaguucguguucaagaacaucgacggcuacuucaagaucuacuccaagcacaccccgaucaaccugguccgggaccugccccagggguucagcgcccucgagccccugguggaccugcccaucggcaucaacaucacccgcuuccagacccuccuggcccugcaccgguccuaccucacgccgggggacagcagcuccggcuggaccgcgggcgccgccgccuacuacgugggguaccugcagccccgcaccuuccugcucaaguacaacgagaacggcaccaucacggacgcggucgacugcgcccuggacccccugagcgagaccaagugcacccucaaguccuucaccguggagaaggggaucuaccagacgagcaacuuccgggugcagcccaccgaguccaucguccgcuucccgaacaucaccaaccugugccccuucggcgagguguucaacgccacccgguucgccagcgucuacgccuggaaccgcaagcggaucuccaacugcguggcggacuacagcgugcuguacaacuccgccagcuucuccacguucaagugcuacggcgucagccccaccaagcucaacgaccugugcuucaccaacguguacgccgacuccuucgugauccgcggggacgagguccggcagaucgcccccggccagaccgggaagaucgccgacuacaacuacaagcugccggacgacuucacgggcugcgugaucgcguggaacagcaacaaccucgacuccaaggucgggggcaacuacaacuaccuguaccgccuguuccgcaagagcaaccucaagcccuucgagcgggacaucuccaccgagaucuaccaggccggcagcacccccugcaacgggguggagggcuucaacugcuacuucccccugcaguccuacggguuccagccgaccuacggcgugggguaccagcccuaccggguggucgugcugagcuucgagcuccugcacgcccccgccacggugugcggccccaagaaguccaccaaccuggucaagaacaagugcgugaacuucaacuucaacggccucaccgggaccggcgugcugaccgagagcaacaagaaguuccugccguuccagcaguucgggcgcgacaucgccgacacgaccgacgcgguccgcgacccccagacccuggagauccucgacaucacccccugcagcuucggcgggguguccgugaucacgccgggcaccaacaccagcaaccaggucgccgugcuguaccagggcgugaacugcaccgagguccccguggccauccacgccgaccagcugacgcccaccuggcggguguacuccaccggcagcaacgucuuccagacccgcgccgggugccucaucggcgcggagcacgugaacaacuccuacgagugcgacauccccaucggggccggcaucugcgccagcuaccagacgcagaccaacuccccgcggcgcgcccggagcguggcgucccagagcaucaucgccuacaccaugucccugggcgccgagaacagcgucgccuacuccaacaacagcaucgccauccccaccaacuucacgaucuccgugaccaccgagauccugcccgugagcaugaccaagacgagcgucgacugcaccauguacaucugcggggacuccaccgagugcagcaaccuccugcugcaguacggcuccuucugcacccagcucaaccgcgcgcugacggggaucgccguggagcaggacaagaacacccaggagguguucgcccaggucaagcagaucuacaagacgcccccgaucaaggacuucggcggguucaacuucagccagauccugcccgaccccuccaagcccagcaagcgguccuucaucgaggaccuccuguucaacaaggugacccuggccgacgccggcuucaucaagcaguacggcgacugccucggggacaucgcggcccgcgaccugaucugcgcccagaaguucaacggccugaccgugcucccgccccugcugaccgacgagaugaucgcccaguacaccagcgcccuccuggcggggaccaucacguccggcuggaccuucggggccggcgccgcccugcagauccccuucgcgaugcagauggccuaccgguucaacggcaucggggucacccagaacgugcucuacgagaaccagaagcugaucgccaaccaguucaacagcgccaucggcaagauccaggacucccugagcuccaccgccagcgcgcucgggaagcugcaggacguggucaaccagaacgcccaggcccugaacacgcucgugaagcagcuguccagcaacuucggcgccaucuccagcgugcugaacgacauccucucccgccuggacccgcccgaggccgaggugcagaucgaccggcugaucaccgggcgccuccagagccugcagaccuacgugacccagcagcugauccgggcggccgagauccgcgccagcgccaaccucgccgcgaccaagauguccgagugcguccugggccagagcaagcggguggacuucugcggcaagggguaccaccugauguccuucccccagagcgccccgcacggcguggucuuccuccacgugacguacguccccgcccaggagaagaacuucaccaccgcccccgcgaucugccacgacgggaaggcccacuucccccgcgagggcguguucguguccaacgggacccacugguucgucacgcagcggaacuucuacgagccgcagaucaucaccaccgacaacaccuucgugagcggcaacugcgacguggucaucggcaucgugaacaacacgguguacgacccccugcagcccgagcuggacuccuucaaggaggagcucgacaaguacuucaagaaccacaccagccccgacgucgaccugggggacaucuccggcaucaacgccagcguggugaacauccagaaggagaucgaccgccugaacgaggucgccaagaaccucaacgagucccugaucgaccugcaggagcucgggaaguacgagcaguacaucaaguggccgugguacaucuggcugggcuucaucgccggccugaucgcgaucgugauggugaccaucaugcucugcugcaugaccagcugcugcuccugccugaaggggugcugcagcugcggcuccugcugcaaguucgacgaggacgacagcgagcccguccugaagggggugaagcuccacuacacgugaggacuaguuauaagacugacuagcccgaugggccucccaacgggcccuccuccccuccuugcaccgagagaucucaaaggcucuuuucagagccaccaaaaaaaaaaaaaaaaaaaaaaaaaaaaaaaaaaaaaaaaaaaaaaaaaaaaaaaaaaaaaaaaaaaaaaaaaaaaaaaaaaaaaaaaaaaaaaaaaaaaa

SEQ ID NO: 24623 - RNA, 4029 nt, Artificial Sequence
  SARS-CoV-2/Wuhan/WIV05/2019__EPI_ISL_402128 spike protein mRNA gc (1-1273)(K986P_V987P_H69del_V70del_D614G)
aggagaaagcuuaccauguucguguuccugguccuccugccccuggugagcucccagugcgugaaccucaccacccgcacgcagcugccgcccgccuacaccaacagcuucacccggggcgucuacuaccccgacaagguguuccgcuccagcgugcugcacuccacccaggaccucuuccugcccuucuucagcaacgucacgugguuccacgccaucuccgggaccaacggcaccaagcgguucgacaacccggugcugcccuucaacgacggggucuacuucgcgagcaccgagaaguccaacaucauccgcggcuggaucuucgggacgacccucgacagcaagacccagucccugcugaucgugaacaacgccaccaacguggucaucaaggugugcgaguuccaguucugcaacgaccccuuccucggcguguacuaccacaagaacaacaagagcuggauggaguccgaguuccgggucuacagcuccgccaacaacugcacguucgaguacgugagccagcccuuccugauggaccuggagggcaagcaggggaacuucaagaaccuccgcgaguucguguucaagaacaucgacggcuacuucaagaucuacuccaagcacaccccgaucaaccugguccgggaccugccccagggguucagcgcccucgagccccugguggaccugcccaucggcaucaacaucacccgcuuccagacccuccuggcccugcaccgguccuaccucacgccgggggacagcagcuccggcuggaccgcgggcgccgccgccuacuacgugggguaccugcagccccgcaccuuccugcucaaguacaacgagaacggcaccaucacggacgcggucgacugcgcccuggacccccugagcgagaccaagugcacccucaaguccuucaccguggagaaggggaucuaccagacgagcaacuuccgggugcagcccaccgaguccaucguccgcuucccgaacaucaccaaccugugccccuucggcgagguguucaacgccacccgguucgccagcgucuacgccuggaaccgcaagcggaucuccaacugcguggcggacuacagcgugcuguacaacuccgccagcuucuccacguucaagugcuacggcgucagccccaccaagcucaacgaccugugcuucaccaacguguacgccgacuccuucgugauccgcggggacgagguccggcagaucgcccccggccagaccgggaagaucgccgacuacaacuacaagcugccggacgacuucacgggcugcgugaucgcguggaacagcaacaaccucgacuccaaggucgggggcaacuacaacuaccuguaccgccuguuccgcaagagcaaccucaagcccuucgagcgggacaucuccaccgagaucuaccaggccggcagcacccccugcaacgggguggagggcuucaacugcuacuucccccugcaguccuacggguuccagccgaccaacggcgugggguaccagcccuaccggguggucgugcugagcuucgagcuccugcacgcccccgccacggugugcggccccaagaaguccaccaaccuggucaagaacaagugcgugaacuucaacuucaacggccucaccgggaccggcgugcugaccgagagcaacaagaaguuccugccguuccagcaguucgggcgcgacaucgccgacacgaccgacgcgguccgcgacccccagacccuggagauccucgacaucacccccugcagcuucggcgggguguccgugaucacgccgggcaccaacaccagcaaccaggucgccgugcuguaccagggcgugaacugcaccgagguccccguggccauccacgccgaccagcugacgcccaccuggcggguguacuccaccggcagcaacgucuuccagacccgcgccgggugccucaucggcgcggagcacgugaacaacuccuacgagugcgacauccccaucggggccggcaucugcgccagcuaccagacgcagaccaacuccccgcggcgcgcccggagcguggcgucccagagcaucaucgccuacaccaugucccugggcgccgagaacagcgucgccuacuccaacaacagcaucgccauccccaccaacuucacgaucuccgugaccaccgagauccugcccgugagcaugaccaagacgagcgucgacugcaccauguacaucugcggggacuccaccgagugcagcaaccuccugcugcaguacggcuccuucugcacccagcucaaccgcgcgcugacggggaucgccguggagcaggacaagaacacccaggagguguucgcccaggucaagcagaucuacaagacgcccccgaucaaggacuucggcggguucaacuucagccagauccugcccgaccccuccaagcccagcaagcgguccuucaucgaggaccuccuguucaacaaggugacccuggccgacgccggcuucaucaagcaguacggcgacugccucggggacaucgcggcccgcgaccugaucugcgcccagaaguucaacggccugaccgugcucccgccccugcugaccgacgagaugaucgcccaguacaccagcgcccuccuggcggggaccaucacguccggcuggaccuucggggccggcgccgcccugcagauccccuucgcgaugcagauggccuaccgguucaacggcaucggggucacccagaacgugcucuacgagaaccagaagcugaucgccaaccaguucaacagcgccaucggcaagauccaggacucccugagcuccaccgccagcgcgcucgggaagcugcaggacguggucaaccagaacgcccaggcccugaacacgcucgugaagcagcuguccagcaacuucggcgccaucuccagcgugcugaacgacauccucucccgccuggacccgcccgaggccgaggugcagaucgaccggcugaucaccgggcgccuccagagccugcagaccuacgugacccagcagcugauccgggcggccgagauccgcgccagcgccaaccucgccgcgaccaagauguccgagugcguccugggccagagcaagcggguggacuucugcggcaagggguaccaccugauguccuucccccagagcgccccgcacggcguggucuuccuccacgugacguacguccccgcccaggagaagaacuucaccaccgcccccgcgaucugccacgacgggaaggcccacuucccccgcgagggcguguucguguccaacgggacccacugguucgucacgcagcggaacuucuacgagccgcagaucaucaccaccgacaacaccuucgugagcggcaacugcgacguggucaucggcaucgugaacaacacgguguacgacccccugcagcccgagcuggacuccuucaaggaggagcucgacaaguacuucaagaaccacaccagccccgacgucgaccugggggacaucuccggcaucaacgccagcguggugaacauccagaaggagaucgaccgccugaacgaggucgccaagaaccucaacgagucccugaucgaccugcaggagcucgggaaguacgagcaguacaucaaguggccgugguacaucuggcugggcuucaucgccggccugaucgcgaucgugauggugaccaucaugcucugcugcaugaccagcugcugcuccugccugaaggggugcugcagcugcggcuccugcugcaaguucgacgaggacgacagcgagcccguccugaagggggugaagcuccacuacacgugaggacuaguuauaagacugacuagcccgaugggccucccaacgggcccuccuccccuccuugcaccgagagaucucaaaggcucuuuucagagccaccaaaaaaaaaaaaaaaaaaaaaaaaaaaaaaaaaaaaaaaaaaaaaaaaaaaaaaaaaaaaaaaaaaaaaaaaaaaaaaaaaaaaaaaaaaaaaaaaaaaaa

SEQ ID NO: 24624 - RNA, 4035 nt, Artificial Sequence
  SARS-CoV-2/Wuhan/WIV05/2019__EPI_ISL_402128 spike protein mRNA gc (1-1273)(K986P_V987P_Y453F_D614G)
aggagaaagcuuaccauguucguguuccugguccuccugccccuggugagcucccagugcgugaaccucaccacccgcacgcagcugccgcccgccuacaccaacagcuucacccggggcgucuacuaccccgacaagguguuccgcuccagcgugcugcacuccacccaggaccucuuccugcccuucuucagcaacgucacgugguuccacgccauccacguguccgggaccaacggcaccaagcgguucgacaacccggugcugcccuucaacgacggggucuacuucgcgagcaccgagaaguccaacaucauccgcggcuggaucuucgggacgacccucgacagcaagacccagucccugcugaucgugaacaacgccaccaacguggucaucaaggugugcgaguuccaguucugcaacgaccccuuccucggcguguacuaccacaagaacaacaagagcuggauggaguccgaguuccgggucuacagcuccgccaacaacugcacguucgaguacgugagccagcccuuccugauggaccuggagggcaagcaggggaacuucaagaaccuccgcgaguucguguucaagaacaucgacggcuacuucaagaucuacuccaagcacaccccgaucaaccugguccgggaccugccccagggguucagcgcccucgagccccugguggaccugcccaucggcaucaacaucacccgcuuccagacccuccuggcccugcaccgguccuaccucacgccgggggacagcagcuccggcuggaccgcgggcgccgccgccuacuacgugggguaccugcagccccgcaccuuccugcucaaguacaacgagaacggcaccaucacggacgcggucgacugcgcccuggacccccugagcgagaccaagugcacccucaaguccuucaccguggagaaggggaucuaccagacgagcaacuuccgggugcagcccaccgaguccaucguccgcuucccgaacaucaccaaccugugccccuucggcgagguguucaacgccacccgguucgccagcgucuacgccuggaaccgcaagcggaucuccaacugcguggcggacuacagcgugcuguacaacuccgccagcuucuccacguucaagugcuacggcgucagccccaccaagcucaacgaccugugcuucaccaacguguacgccgacuccuucgugauccgcggggacgagguccggcagaucgcccccggccagaccgggaagaucgccgacuacaacuacaagcugccggacgacuucacgggcugcgugaucgcguggaacagcaacaaccucgacuccaaggucgggggcaacuacaacuaccuguuccgccuguuccgcaagagcaaccucaagcccuucgagcgggacaucuccaccgagaucuaccaggccggcagcacccccugcaacgggguggagggcuucaacugcuacuucccccugcaguccuacggguuccagccgaccaacggcgugggguaccagcccuaccggguggucgugcugagcuucgagcuccugcacgcccccgccacggugugcggccccaagaaguccaccaaccuggucaagaacaagugcgugaacuucaacuucaacggccucaccgggaccggcgugcugaccgagagcaacaagaaguuccugccguuccagcaguucgggcgcgacaucgccgacacgaccgacgcgguccgcgacccccagacccuggagauccucgacaucacccccugcagcuucggcgggguguccgugaucacgccgggcaccaacaccagcaaccaggucgccgugcuguaccagggcgugaacugcaccgagguccccguggccauccacgccgaccagcugacgcccaccuggcggguguacuccaccggcagcaacgucuuccagacccgcgccgggugccucaucggcgcggagcacgugaacaacuccuacgagugcgacauccccaucggggccggcaucugcgccagcuaccagacgcagaccaacuccccgcggcgcgcccggagcguggcgucccagagcaucaucgccuacaccaugucccugggcgccgagaacagcgucgccuacuccaacaacagcaucgccauccccaccaacuucacgaucuccgugaccaccgagauccugcccgugagcaugaccaagacgagcgucgacugcaccauguacaucugcggggacuccaccgagugcagcaaccuccugcugcaguacggcuccuucugcacccagcucaaccgcgcgcugacggggaucgccguggagcaggacaagaacacccaggagguguucgcccaggucaagcagaucuacaagacgcccccgaucaaggacuucggcggguucaacuucagccagauccugcccgaccccuccaagcccagcaagcgguccuucaucgaggaccuccuguucaacaaggugacccuggccgacgccggcuucaucaagcaguacggcgacugccucggggacaucgcggcccgcgaccugaucugcgcccagaaguucaacggccugaccgugcucccgccccugcugaccgacgagaugaucgcccaguacaccagcgcccuccuggcggggaccaucacguccggcuggaccuucggggccggcgccgcccugcagauccccuucgcgaugcagauggccuaccgguucaacggcaucggggucacccagaacgugcucuacgagaaccagaagcugaucgccaaccaguucaacagcgccaucggcaagauccaggacucccugagcuccaccgccagcgcgcucgggaagcugcaggacguggucaaccagaacgcccaggcccugaacacgcucgugaagcagcuguccagcaacuucggcgccaucuccagcgugcugaacgacauccucucccgccuggacccgcccgaggccgaggugcagaucgaccggcugaucaccgggcgccuccagagccugcagaccuacgugacccagcagcugauccgggcggccgagauccgcgccagcgccaaccucgccgcgaccaagauguccgagugcguccugggccagagcaagcggguggacuucugcggcaagggguaccaccugauguccuucccccagagcgccccgcacggcguggucuuccuccacgugacguacguccccgcccaggagaagaacuucaccaccgcccccgcgaucugccacgacgggaaggcccacuucccccgcgagggcguguucguguccaacgggacccacugguucgucacgcagcggaacuucuacgagccgcagaucaucaccaccgacaacaccuucgugagcggcaacugcgacguggucaucggcaucgugaacaacacgguguacgacccccugcagcccgagcuggacuccuucaaggaggagcucgacaaguacuucaagaaccacaccagccccgacgucgaccugggggacaucuccggcaucaacgccagcguggugaacauccagaaggagaucgaccgccugaacgaggucgccaagaaccucaacgagucccugaucgaccugcaggagcucgggaaguacgagcaguacaucaaguggccgugguacaucuggcugggcuucaucgccggccugaucgcgaucgugauggugaccaucaugcucugcugcaugaccagcugcugcuccugccugaaggggugcugcagcugcggcuccugcugcaaguucgacgaggacgacagcgagcccguccugaagggggugaagcuccacuacacgugaggacuaguuauaagacugacuagcccgaugggccucccaacgggcccuccuccccuccuugcaccgagagaucucaaaggcucuuuucagagccaccaaaaaaaaaaaaaaaaaaaaaaaaaaaaaaaaaaaaaaaaaaaaaaaaaaaaaaaaaaaaaaaaaaaaaaaaaaaaaaaaaaaaaaaaaaaaaaaaaaaaa

SEQ ID NO: 24625 - RNA, 4035 nt, Artificial Sequence
  SARS-CoV-2/Wuhan/WIV05/2019__EPI_ISL_402128 spike protein mRNA gc (1-1273)(K986P_V987P_D614G_I692V)
aggagaaagcuuaccauguucguguuccugguccuccugccccuggugagcucccagugcgugaaccucaccacccgcacgcagcugccgcccgccuacaccaacagcuucacccggggcgucuacuaccccgacaagguguuccgcuccagcgugcugcacuccacccaggaccucuuccugcccuucuucagcaacgucacgugguuccacgccauccacguguccgggaccaacggcaccaagcgguucgacaacccggugcugcccuucaacgacggggucuacuucgcgagcaccgagaaguccaacaucauccgcggcuggaucuucgggacgacccucgacagcaagacccagucccugcugaucgugaacaacgccaccaacguggucaucaaggugugcgaguuccaguucugcaacgaccccuuccucggcguguacuaccacaagaacaacaagagcuggauggaguccgaguuccgggucuacagcuccgccaacaacugcacguucgaguacgugagccagcccuuccugauggaccuggagggcaagcaggggaacuucaagaaccuccgcgaguucguguucaagaacaucgacggcuacuucaagaucuacuccaagcacaccccgaucaaccugguccgggaccugccccagggguucagcgcccucgagccccugguggaccugcccaucggcaucaacaucacccgcuuccagacccuccuggcccugcaccgguccuaccucacgccgggggacagcagcuccggcuggaccgcgggcgccgccgccuacuacgugggguaccugcagccccgcaccuuccugcucaaguacaacgagaacggcaccaucacggacgcggucgacugcgcccuggacccccugagcgagaccaagugcacccucaaguccuucaccguggagaaggggaucuaccagacgagcaacuuccgggugcagcccaccgaguccaucguccgcuucccgaacaucaccaaccugugccccuucggcgagguguucaacgccacccgguucgccagcgucuacgccuggaaccgcaagcggaucuccaacugcguggcggacuacagcgugcuguacaacuccgccagcuucuccacguucaagugcuacggcgucagccccaccaagcucaacgaccugugcuucaccaacguguacgccgacuccuucgugauccgcggggacgagguccggcagaucgcccccggccagaccgggaagaucgccgacuacaacuacaagcugccggacgacuucacgggcugcgugaucgcguggaacagcaacaaccucgacuccaaggucgggggcaacuacaacuaccuguaccgccuguuccgcaagagcaaccucaagcccuucgagcgggacaucuccaccgagaucuaccaggccggcagcacccccugcaacgggguggagggcuucaacugcuacuucccccugcaguccuacggguuccagccgaccaacggcgugggguaccagcccuaccggguggucgugcugagcuucgagcuccugcacgcccccgccacggugugcggccccaagaaguccaccaaccuggucaagaacaagugcgugaacuucaacuucaacggccucaccgggaccggcgugcugaccgagagcaacaagaaguuccugccguuccagcaguucgggcgcgacaucgccgacacgaccgacgcgguccgcgacccccagacccuggagauccucgacaucacccccugcagcuucggcgggguguccgugaucacgccgggcaccaacaccagcaaccaggucgccgugcuguaccagggcgugaacugcaccgagguccccguggccauccacgccgaccagcugacgcccaccuggcggguguacuccaccggcagcaacgucuuccagacccgcgccgggugccucaucggcgcggagcacgugaacaacuccuacgagugcgacauccccaucggggccggcaucugcgccagcuaccagacgcagaccaacuccccgcggcgcgcccggagcguggcgucccagagcgucaucgccuacaccaugucccugggcgccgagaacagcgucgccuacuccaacaacagcaucgccauccccaccaacuucacgaucuccgugaccaccgagauccugcccgugagcaugaccaagacgagcgucgacugcaccauguacaucugcggggacuccaccgagugcagcaaccuccugcugcaguacggcuccuucugcacccagcucaaccgcgcgcugacggggaucgccguggagcaggacaagaacacccaggagguguucgcccaggucaagcagaucuacaagacgcccccgaucaaggacuucggcggguucaacuucagccagauccugcccgaccccuccaagcccagcaagcgguccuucaucgaggaccuccuguucaacaaggugacccuggccgacgccggcuucaucaagcaguacggcgacugccucggggacaucgcggcccgcgaccugaucugcgcccagaaguucaacggccugaccgugcucccgccccugcugaccgacgagaugaucgcccaguacaccagcgcccuccuggcggggaccaucacguccggcuggaccuucggggccggcgccgcccugcagauccccuucgcgaugcagauggccuaccgguucaacggcaucggggucacccagaacgugcucuacgagaaccagaagcugaucgccaaccaguucaacagcgccaucggcaagauccaggacucccugagcuccaccgccagcgcgcucgggaagcugcaggacguggucaaccagaacgcccaggcccugaacacgcucgugaagcagcuguccagcaacuucggcgccaucuccagcgugcugaacgacauccucucccgccuggacccgcccgaggccgaggugcagaucgaccggcugaucaccgggcgccuccagagccugcagaccuacgugacccagcagcugauccgggcggccgagauccgcgccagcgccaaccucgccgcgaccaagauguccgagugcguccugggccagagcaagcggguggacuucugcggcaagggguaccaccugauguccuucccccagagcgccccgcacggcguggucuuccuccacgugacguacguccccgcccaggagaagaacuucaccaccgcccccgcgaucugccacgacgggaaggcccacuucccccgcgagggcguguucguguccaacgggacccacugguucgucacgcagcggaacuucuacgagccgcagaucaucaccaccgacaacaccuucgugagcggcaacugcgacguggucaucggcaucgugaacaacacgguguacgacccccugcagcccgagcuggacuccuucaaggaggagcucgacaaguacuucaagaaccacaccagccccgacgucgaccugggggacaucuccggcaucaacgccagcguggugaacauccagaaggagaucgaccgccugaacgaggucgccaagaaccucaacgagucccugaucgaccugcaggagcucgggaaguacgagcaguacaucaaguggccgugguacaucuggcugggcuucaucgccggccugaucgcgaucgugauggugaccaucaugcucugcugcaugaccagcugcugcuccugccugaaggggugcugcagcugcggcuccugcugcaaguucgacgaggacgacagcgagcccguccugaagggggugaagcuccacuacacgugaggacuaguuauaagacugacuagcccgaugggccucccaacgggcccuccuccccuccuugcaccgagagaucucaaaggcucuuuucagagccaccaaaaaaaaaaaaaaaaaaaaaaaaaaaaaaaaaaaaaaaaaaaaaaaaaaaaaaaaaaaaaaaaaaaaaaaaaaaaaaaaaaaaaaaaaaaaaaaaaaaaa

SEQ ID NO: 24626 - RNA, 4035 nt, Artificial Sequence
  SARS-CoV-2/Wuhan/WIV05/2019__EPI_ISL_402128 spike protein mRNA gc (1-1273)(K986P_V987P_D614G_M1229I)
aggagaaagcuuaccauguucguguuccugguccuccugccccuggugagcucccagugcgugaaccucaccacccgcacgcagcugccgcccgccuacaccaacagcuucacccggggcgucuacuaccccgacaagguguuccgcuccagcgugcugcacuccacccaggaccucuuccugcccuucuucagcaacgucacgugguuccacgccauccacguguccgggaccaacggcaccaagcgguucgacaacccggugcugcccuucaacgacggggucuacuucgcgagcaccgagaaguccaacaucauccgcggcuggaucuucgggacgacccucgacagcaagacccagucccugcugaucgugaacaacgccaccaacguggucaucaaggugugcgaguuccaguucugcaacgaccccuuccucggcguguacuaccacaagaacaacaagagcuggauggaguccgaguuccgggucuacagcuccgccaacaacugcacguucgaguacgugagccagcccuuccugauggaccuggagggcaagcaggggaacuucaagaaccuccgcgaguucguguucaagaacaucgacggcuacuucaagaucuacuccaagcacaccccgaucaaccugguccgggaccugccccagggguucagcgcccucgagccccugguggaccugcccaucggcaucaacaucacccgcuuccagacccuccuggcccugcaccgguccuaccucacgccgggggacagcagcuccggcuggaccgcgggcgccgccgccuacuacgugggguaccugcagccccgcaccuuccugcucaaguacaacgagaacggcaccaucacggacgcggucgacugcgcccuggacccccugagcgagaccaagugcacccucaaguccuucaccguggagaaggggaucuaccagacgagcaacuuccgggugcagcccaccgaguccaucguccgcuucccgaacaucaccaaccugugccccuucggcgagguguucaacgccacccgguucgccagcgucuacgccuggaaccgcaagcggaucuccaacugcguggcggacuacagcgugcuguacaacuccgccagcuucuccacguucaagugcuacggcgucagccccaccaagcucaacgaccugugcuucaccaacguguacgccgacuccuucgugauccgcggggacgagguccggcagaucgcccccggccagaccgggaagaucgccgacuacaacuacaagcugccggacgacuucacgggcugcgugaucgcguggaacagcaacaaccucgacuccaaggucgggggcaacuacaacuaccuguaccgccuguuccgcaagagcaaccucaagcccuucgagcgggacaucuccaccgagaucuaccaggccggcagcacccccugcaacgggguggagggcuucaacugcuacuucccccugcaguccuacggguuccagccgaccaacggcgugggguaccagcccuaccggguggucgugcugagcuucgagcuccugcacgcccccgccacggugugcggccccaagaaguccaccaaccuggucaagaacaagugcgugaacuucaacuucaacggccucaccgggaccggcgugcugaccgagagcaacaagaaguuccugccguuccagcaguucgggcgcgacaucgccgacacgaccgacgcgguccgcgacccccagacccuggagauccucgacaucacccccugcagcuucggcgggguguccgugaucacgccgggcaccaacaccagcaaccaggucgccgugcuguaccagggcgugaacugcaccgagguccccguggccauccacgccgaccagcugacgcccaccuggcggguguacuccaccggcagcaacgucuuccagacccgcgccgggugccucaucggcgcggagcacgugaacaacuccuacgagugcgacauccccaucggggccggcaucugcgccagcuaccagacgcagaccaacuccccgcggcgcgcccggagcguggcgucccagagcaucaucgccuacaccaugucccugggcgccgagaacagcgucgccuacuccaacaacagcaucgccauccccaccaacuucacgaucuccgugaccaccgagauccugcccgugagcaugaccaagacgagcgucgacugcaccauguacaucugcggggacuccaccgagugcagcaaccuccugcugcaguacggcuccuucugcacccagcucaaccgcgcgcugacggggaucgccguggagcaggacaagaacacccaggagguguucgcccaggucaagcagaucuacaagacgcccccgaucaaggacuucggcggguucaacuucagccagauccugcccgaccccuccaagcccagcaagcgguccuucaucgaggaccuccuguucaacaaggugacccuggccgacgccggcuucaucaagcaguacggcgacugccucggggacaucgcggcccgcgaccugaucugcgcccagaaguucaacggccugaccgugcucccgccccugcugaccgacgagaugaucgcccaguacaccagcgcccuccuggcggggaccaucacguccggcuggaccuucggggccggcgccgcccugcagauccccuucgcgaugcagauggccuaccgguucaacggcaucggggucacccagaacgugcucuacgagaaccagaagcugaucgccaaccaguucaacagcgccaucggcaagauccaggacucccugagcuccaccgccagcgcgcucgggaagcugcaggacguggucaaccagaacgcccaggcccugaacacgcucgugaagcagcuguccagcaacuucggcgccaucuccagcgugcugaacgacauccucucccgccuggacccgcccgaggccgaggugcagaucgaccggcugaucaccgggcgccuccagagccugcagaccuacgugacccagcagcugauccgggcggccgagauccgcgccagcgccaaccucgccgcgaccaagauguccgagugcguccugggccagagcaagcggguggacuucugcggcaagggguaccaccugauguccuucccccagagcgccccgcacggcguggucuuccuccacgugacguacguccccgcccaggagaagaacuucaccaccgcccccgcgaucugccacgacgggaaggcccacuucccccgcgagggcguguucguguccaacgggacccacugguucgucacgcagcggaacuucuacgagccgcagaucaucaccaccgacaacaccuucgugagcggcaacugcgacguggucaucggcaucgugaacaacacgguguacgacccccugcagcccgagcuggacuccuucaaggaggagcucgacaaguacuucaagaaccacaccagccccgacgucgaccugggggacaucuccggcaucaacgccagcguggugaacauccagaaggagaucgaccgccugaacgaggucgccaagaaccucaacgagucccugaucgaccugcaggagcucgggaaguacgagcaguacaucaaguggccgugguacaucuggcugggcuucaucgccggccugaucgcgaucgugaucgugaccaucaugcucugcugcaugaccagcugcugcuccugccugaaggggugcugcagcugcggcuccugcugcaaguucgacgaggacgacagcgagcccguccugaagggggugaagcuccacuacacgugaggacuaguuauaagacugacuagcccgaugggccucccaacgggcccuccuccccuccuugcaccgagagaucucaaaggcucuuuucagagccaccaaaaaaaaaaaaaaaaaaaaaaaaaaaaaaaaaaaaaaaaaaaaaaaaaaaaaaaaaaaaaaaaaaaaaaaaaaaaaaaaaaaaaaaaaaaaaaaaaaaaa

SEQ ID NO: 24627 - RNA, 4029 nt, Artificial Sequence
  SARS-CoV-2/Wuhan/WIV05/2019__EPI_ISL_402128 spike protein mRNA gc (1-1273)(K986P_V987P_H69del_V70del_A222V_Y453F_S477N_D614G_I692V)
aggagaaagcuuaccauguucguguuccugguccuccugccccuggugagcucccagugcgugaaccucaccacccgcacgcagcugccgcccgccuacaccaacagcuucacccggggcgucuacuaccccgacaagguguuccgcuccagcgugcugcacuccacccaggaccucuuccugcccuucuucagcaacgucacgugguuccacgccaucuccgggaccaacggcaccaagcgguucgacaacccggugcugcccuucaacgacggggucuacuucgcgagcaccgagaaguccaacaucauccgcggcuggaucuucgggacgacccucgacagcaagacccagucccugcugaucgugaacaacgccaccaacguggucaucaaggugugcgaguuccaguucugcaacgaccccuuccucggcguguacuaccacaagaacaacaagagcuggauggaguccgaguuccgggucuacagcuccgccaacaacugcacguucgaguacgugagccagcccuuccugauggaccuggagggcaagcaggggaacuucaagaaccuccgcgaguucguguucaagaacaucgacggcuacuucaagaucuacuccaagcacaccccgaucaaccugguccgggaccugccccagggguucagcguccucgagccccugguggaccugcccaucggcaucaacaucacccgcuuccagacccuccuggcccugcaccgguccuaccucacgccgggggacagcagcuccggcuggaccgcgggcgccgccgccuacuacgugggguaccugcagccccgcaccuuccugcucaaguacaacgagaacggcaccaucacggacgcggucgacugcgcccuggacccccugagcgagaccaagugcacccucaaguccuucaccguggagaaggggaucuaccagacgagcaacuuccgggugcagcccaccgaguccaucguccgcuucccgaacaucaccaaccugugccccuucggcgagguguucaacgccacccgguucgccagcgucuacgccuggaaccgcaagcggaucuccaacugcguggcggacuacagcgugcuguacaacuccgccagcuucuccacguucaagugcuacggcgucagccccaccaagcucaacgaccugugcuucaccaacguguacgccgacuccuucgugauccgcggggacgagguccggcagaucgcccccggccagaccgggaagaucgccgacuacaacuacaagcugccggacgacuucacgggcugcgugaucgcguggaacagcaacaaccucgacuccaaggucgggggcaacuacaacuaccuguuccgccuguuccgcaagagcaaccucaagcccuucgagcgggacaucuccaccgagaucuaccaggccggcaacacccccugcaacgggguggagggcuucaacugcuacuucccccugcaguccuacggguuccagccgaccaacggcgugggguaccagcccuaccggguggucgugcugagcuucgagcuccugcacgcccccgccacggugugcggccccaagaaguccaccaaccuggucaagaacaagugcgugaacuucaacuucaacggccucaccgggaccggcgugcugaccgagagcaacaagaaguuccugccguuccagcaguucgggcgcgacaucgccgacacgaccgacgcgguccgcgacccccagacccuggagauccucgacaucacccccugcagcuucggcgggguguccgugaucacgccgggcaccaacaccagcaaccaggucgccgugcuguaccagggcgugaacugcaccgagguccccguggccauccacgccgaccagcugacgcccaccuggcggguguacuccaccggcagcaacgucuuccagacccgcgccgggugccucaucggcgcggagcacgugaacaacuccuacgagugcgacauccccaucggggccggcaucugcgccagcuaccagacgcagaccaacuccccgcggcgcgcccggagcguggcgucccagagcgucaucgccuacaccaugucccugggcgccgagaacagcgucgccuacuccaacaacagcaucgccauccccaccaacuucacgaucuccgugaccaccgagauccugcccgugagcaugaccaagacgagcgucgacugcaccauguacaucugcggggacuccaccgagugcagcaaccuccugcugcaguacggcuccuucugcacccagcucaaccgcgcgcugacggggaucgccguggagcaggacaagaacacccaggagguguucgcccaggucaagcagaucuacaagacgcccccgaucaaggacuucggcggguucaacuucagccagauccugcccgaccccuccaagcccagcaagcgguccuucaucgaggaccuccuguucaacaaggugacccuggccgacgccggcuucaucaagcaguacggcgacugccucggggacaucgcggcccgcgaccugaucugcgcccagaaguucaacggccugaccgugcucccgccccugcugaccgacgagaugaucgcccaguacaccagcgcccuccuggcggggaccaucacguccggcuggaccuucggggccggcgccgcccugcagauccccuucgcgaugcagauggccuaccgguucaacggcaucggggucacccagaacgugcucuacgagaaccagaagcugaucgccaaccaguucaacagcgccaucggcaagauccaggacucccugagcuccaccgccagcgcgcucgggaagcugcaggacguggucaaccagaacgcccaggcccugaacacgcucgugaagcagcuguccagcaacuucggcgccaucuccagcgugcugaacgacauccucucccgccuggacccgcccgaggccgaggugcagaucgaccggcugaucaccgggcgccuccagagccugcagaccuacgugacccagcagcugauccgggcggccgagauccgcgccagcgccaaccucgccgcgaccaagauguccgagugcguccugggccagagcaagcggguggacuucugcggcaagggguaccaccugauguccuucccccagagcgccccgcacggcguggucuuccuccacgugacguacguccccgcccaggagaagaacuucaccaccgcccccgcgaucugccacgacgggaaggcccacuucccccgcgagggcguguucguguccaacgggacccacugguucgucacgcagcggaacuucuacgagccgcagaucaucaccaccgacaacaccuucgugagcggcaacugcgacguggucaucggcaucgugaacaacacgguguacgacccccugcagcccgagcuggacuccuucaaggaggagcucgacaaguacuucaagaaccacaccagccccgacgucgaccugggggacaucuccggcaucaacgccagcguggugaacauccagaaggagaucgaccgccugaacgaggucgccaagaaccucaacgagucccugaucgaccugcaggagcucgggaaguacgagcaguacaucaaguggccgugguacaucuggcugggcuucaucgccggccugaucgcgaucgugauggugaccaucaugcucugcugcaugaccagcugcugcuccugccugaaggggugcugcagcugcggcuccugcugcaaguucgacgaggacgacagcgagcccguccugaagggggugaagcuccacuacacgugaggacuaguuauaagacugacuagcccgaugggccucccaacgggcccuccuccccuccuugcaccgagagaucucaaaggcucuuuucagagccaccaaaaaaaaaaaaaaaaaaaaaaaaaaaaaaaaaaaaaaaaaaaaaaaaaaaaaaaaaaaaaaaaaaaaaaaaaaaaaaaaaaaaaaaaaaaaaaaaaaaaa

SEQ ID NO: 24628 - RNA, 4029 nt, Artificial Sequence
  SARS-CoV-2/Wuhan/WIV05/2019__EPI_ISL_402128 spike protein mRNA gc (1-1273)(K986P_V987P_H69del_V70del_Y453F_D614G_I692V_M1229I)
aggagaaagcuuaccauguucguguuccugguccuccugccccuggugagcucccagugcgugaaccucaccacccgcacgcagcugccgcccgccuacaccaacagcuucacccggggcgucuacuaccccgacaagguguuccgcuccagcgugcugcacuccacccaggaccucuuccugcccuucuucagcaacgucacgugguuccacgccaucuccgggaccaacggcaccaagcgguucgacaacccggugcugcccuucaacgacggggucuacuucgcgagcaccgagaaguccaacaucauccgcggcuggaucuucgggacgacccucgacagcaagacccagucccugcugaucgugaacaacgccaccaacguggucaucaaggugugcgaguuccaguucugcaacgaccccuuccucggcguguacuaccacaagaacaacaagagcuggauggaguccgaguuccgggucuacagcuccgccaacaacugcacguucgaguacgugagccagcccuuccugauggaccuggagggcaagcaggggaacuucaagaaccuccgcgaguucguguucaagaacaucgacggcuacuucaagaucuacuccaagcacaccccgaucaaccugguccgggaccugccccagggguucagcgcccucgagccccugguggaccugcccaucggcaucaacaucacccgcuuccagacccuccuggcccugcaccgguccuaccucacgccgggggacagcagcuccggcuggaccgcgggcgccgccgccuacuacgugggguaccugcagccccgcaccuuccugcucaaguacaacgagaacggcaccaucacggacgcggucgacugcgcccuggacccccugagcgagaccaagugcacccucaaguccuucaccguggagaaggggaucuaccagacgagcaacuuccgggugcagcccaccgaguccaucguccgcuucccgaacaucaccaaccugugccccuucggcgagguguucaacgccacccgguucgccagcgucuacgccuggaaccgcaagcggaucuccaacugcguggcggacuacagcgugcuguacaacuccgccagcuucuccacguucaagugcuacggcgucagccccaccaagcucaacgaccugugcuucaccaacguguacgccgacuccuucgugauccgcggggacgagguccggcagaucgcccccggccagaccgggaagaucgccgacuacaacuacaagcugccggacgacuucacgggcugcgugaucgcguggaacagcaacaaccucgacuccaaggucgggggcaacuacaacuaccuguuccgccuguuccgcaagagcaaccucaagcccuucgagcgggacaucuccaccgagaucuaccaggccggcagcacccccugcaacgggguggagggcuucaacugcuacuucccccugcaguccuacggguuccagccgaccaacggcgugggguaccagcccuaccggguggucgugcugagcuucgagcuccugcacgcccccgccacggugugcggccccaagaaguccaccaaccuggucaagaacaagugcgugaacuucaacuucaacggccucaccgggaccggcgugcugaccgagagcaacaagaaguuccugccguuccagcaguucgggcgcgacaucgccgacacgaccgacgcgguccgcgacccccagacccuggagauccucgacaucacccccugcagcuucggcgggguguccgugaucacgccgggcaccaacaccagcaaccaggucgccgugcuguaccagggcgugaacugcaccgagguccccguggccauccacgccgaccagcugacgcccaccuggcggguguacuccaccggcagcaacgucuuccagacccgcgccgggugccucaucggcgcggagcacgugaacaacuccuacgagugcgacauccccaucggggccggcaucugcgccagcuaccagacgcagaccaacuccccgcggcgcgcccggagcguggcgucccagagcgugaucgccuacaccaugucccugggcgccgagaacagcgucgccuacuccaacaacagcaucgccauccccaccaacuucacgaucuccgugaccaccgagauccugcccgugagcaugaccaagacgagcgucgacugcaccauguacaucugcggggacuccaccgagugcagcaaccuccugcugcaguacggcuccuucugcacccagcucaaccgcgcgcugacggggaucgccguggagcaggacaagaacacccaggagguguucgcccaggucaagcagaucuacaagacgcccccgaucaaggacuucggcggguucaacuucagccagauccugcccgaccccuccaagcccagcaagcgguccuucaucgaggaccuccuguucaacaaggugacccuggccgacgccggcuucaucaagcaguacggcgacugccucggggacaucgcggcccgcgaccugaucugcgcccagaaguucaacggccugaccgugcucccgccccugcugaccgacgagaugaucgcccaguacaccagcgcccuccuggcggggaccaucacguccggcuggaccuucggggccggcgccgcccugcagauccccuucgcgaugcagauggccuaccgguucaacggcaucggggucacccagaacgugcucuacgagaaccagaagcugaucgccaaccaguucaacagcgccaucggcaagauccaggacucccugagcuccaccgccagcgcgcucgggaagcugcaggacguggucaaccagaacgcccaggcccugaacacgcucgugaagcagcuguccagcaacuucggcgccaucuccagcgugcugaacgacauccucucccgccuggacccgcccgaggccgaggugcagaucgaccggcugaucaccgggcgccuccagagccugcagaccuacgugacccagcagcugauccgggcggccgagauccgcgccagcgccaaccucgccgcgaccaagauguccgagugcguccugggccagagcaagcggguggacuucugcggcaagggguaccaccugauguccuucccccagagcgccccgcacggcguggucuuccuccacgugacguacguccccgcccaggagaagaacuucaccaccgcccccgcgaucugccacgacgggaaggcccacuucccccgcgagggcguguucguguccaacgggacccacugguucgucacgcagcggaacuucuacgagccgcagaucaucaccaccgacaacaccuucgugagcggcaacugcgacguggucaucggcaucgugaacaacacgguguacgacccccugcagcccgagcuggacuccuucaaggaggagcucgacaaguacuucaagaaccacaccagccccgacgucgaccugggggacaucuccggcaucaacgccagcguggugaacauccagaaggagaucgaccgccugaacgaggucgccaagaaccucaacgagucccugaucgaccugcaggagcucgggaaguacgagcaguacaucaaguggccgugguacaucuggcugggcuucaucgccggccugaucgcgaucgugaucgugaccaucaugcucugcugcaugaccagcugcugcuccugccugaaggggugcugcagcugcggcuccugcugcaaguucgacgaggacgacagcgagcccguccugaagggggugaagcuccacuacacgugaggacuaguuauaagacugacuagcccgaugggccucccaacgggcccuccuccccuccuugcaccgagagaucucaaaggcucuuuucagagccaccaaaaaaaaaaaaaaaaaaaaaaaaaaaaaaaaaaaaaaaaaaaaaaaaaaaaaaaaaaaaaaaaaaaaaaaaaaaaaaaaaaaaaaaaaaaaaaaaaaaaa

SEQ ID NO: 24629 - RNA, 4026 nt, Artificial Sequence
  SARS-CoV-2/Wuhan/WIV05/2019__EPI_ISL_402128 spike protein mRNA gc (1-1273)(K986P_V987P_K986P_V987P_H69del_V70del_Y144del_N501Y_A570 D_D614G_P681H_T716I_S982A_D1118H)
aggagaaagcuuaccauguucguguuccugguccuccugccccuggugagcucccagugcgugaaccucaccacccgcacgcagcugccgcccgccuacaccaacagcuucacccggggcgucuacuaccccgacaagguguuccgcuccagcgugcugcacuccacccaggaccucuuccugcccuucuucagcaacgucacgugguuccacgccaucuccgggaccaacggcaccaagcgguucgacaacccggugcugcccuucaacgacggggucuacuucgcgagcaccgagaaguccaacaucauccgcggcuggaucuucgggacgacccucgacagcaagacccagucccugcugaucgugaacaacgccaccaacguggucaucaaggugugcgaguuccaguucugcaacgaccccuuccucggcguguaccacaagaacaacaagagcuggauggaguccgaguuccgggucuacagcuccgccaacaacugcacguucgaguacgugagccagcccuuccugauggaccuggagggcaagcaggggaacuucaagaaccuccgcgaguucguguucaagaacaucgacggcuacuucaagaucuacuccaagcacaccccgaucaaccugguccgggaccugccccagggguucagcgcccucgagccccugguggaccugcccaucggcaucaacaucacccgcuuccagacccuccuggcccugcaccgguccuaccucacgccgggggacagcagcuccggcuggaccgcgggcgccgccgccuacuacgugggguaccugcagccccgcaccuuccugcucaaguacaacgagaacggcaccaucacggacgcggucgacugcgcccuggacccccugagcgagaccaagugcacccucaaguccuucaccguggagaaggggaucuaccagacgagcaacuuccgggugcagcccaccgaguccaucguccgcuucccgaacaucaccaaccugugccccuucggcgagguguucaacgccacccgguucgccagcgucuacgccuggaaccgcaagcggaucuccaacugcguggcggacuacagcgugcuguacaacuccgccagcuucuccacguucaagugcuacggcgucagccccaccaagcucaacgaccugugcuucaccaacguguacgccgacuccuucgugauccgcggggacgagguccggcagaucgcccccggccagaccgggaagaucgccgacuacaacuacaagcugccggacgacuucacgggcugcgugaucgcguggaacagcaacaaccucgacuccaaggucgggggcaacuacaacuaccuguaccgccuguuccgcaagagcaaccucaagcccuucgagcgggacaucuccaccgagaucuaccaggccggcagcacccccugcaacgggguggagggcuucaacugcuacuucccccugcaguccuacggguuccagccgaccuacggcgugggguaccagcccuaccggguggucgugcugagcuucgagcuccugcacgcccccgccacggugugcggccccaagaaguccaccaaccuggucaagaacaagugcgugaacuucaacuucaacggccucaccgggaccggcgugcugaccgagagcaacaagaaguuccugccguuccagcaguucgggcgcgacaucgacgacacgaccgacgcgguccgcgacccccagacccuggagauccucgacaucacccccugcagcuucggcgggguguccgugaucacgccgggcaccaacaccagcaaccaggucgccgugcuguaccagggcgugaacugcaccgagguccccguggccauccacgccgaccagcugacgcccaccuggcggguguacuccaccggcagcaacgucuuccagacccgcgccgggugccucaucggcgcggagcacgugaacaacuccuacgagugcgacauccccaucggggccggcaucugcgccagcuaccagacgcagaccaacucccaccggcgcgcccggagcguggcgucccagagcaucaucgccuacaccaugucccugggcgccgagaacagcgucgccuacuccaacaacagcaucgccauccccaucaacuucacgaucuccgugaccaccgagauccugcccgugagcaugaccaagacgagcgucgacugcaccauguacaucugcggggacuccaccgagugcagcaaccuccugcugcaguacggcuccuucugcacccagcucaaccgcgcgcugacggggaucgccguggagcaggacaagaacacccaggagguguucgcccaggucaagcagaucuacaagacgcccccgaucaaggacuucggcggguucaacuucagccagauccugcccgaccccuccaagcccagcaagcgguccuucaucgaggaccuccuguucaacaaggugacccuggccgacgccggcuucaucaagcaguacggcgacugccucggggacaucgcggcccgcgaccugaucugcgcccagaaguucaacggccugaccgugcucccgccccugcugaccgacgagaugaucgcccaguacaccagcgcccuccuggcggggaccaucacguccggcuggaccuucggggccggcgccgcccugcagauccccuucgcgaugcagauggccuaccgguucaacggcaucggggucacccagaacgugcucuacgagaaccagaagcugaucgccaaccaguucaacagcgccaucggcaagauccaggacucccugagcuccaccgccagcgcgcucgggaagcugcaggacguggucaaccagaacgcccaggcccugaacacgcucgugaagcagcuguccagcaacuucggcgccaucuccagcgugcugaacgacauccucgcccgccuggacccgcccgaggccgaggugcagaucgaccggcugaucaccgggcgccuccagagccugcagaccuacgugacccagcagcugauccgggcggccgagauccgcgccagcgccaaccucgccgcgaccaagauguccgagugcguccugggccagagcaagcggguggacuucugcggcaagggguaccaccugauguccuucccccagagcgccccgcacggcguggucuuccuccacgugacguacguccccgcccaggagaagaacuucaccaccgcccccgcgaucugccacgacgggaaggcccacuucccccgcgagggcguguucguguccaacgggacccacugguucgucacgcagcggaacuucuacgagccgcagaucaucaccacccacaacaccuucgugagcggcaacugcgacguggucaucggcaucgugaacaacacgguguacgacccccugcagcccgagcuggacuccuucaaggaggagcucgacaaguacuucaagaaccacaccagccccgacgucgaccugggggacaucuccggcaucaacgccagcguggugaacauccagaaggagaucgaccgccugaacgaggucgccaagaaccucaacgagucccugaucgaccugcaggagcucgggaaguacgagcaguacaucaaguggccgugguacaucuggcugggcuucaucgccggccugaucgcgaucgugauggugaccaucaugcucugcugcaugaccagcugcugcuccugccugaaggggugcugcagcugcggcuccugcugcaaguucgacgaggacgacagcgagcccguccugaagggggugaagcuccacuacacgugaggacuaguuauaagacugacuagcccgaugggccucccaacgggcccuccuccccuccuugcaccgagagaucucaaaggcucuuuucagagccaccaaaaaaaaaaaaaaaaaaaaaaaaaaaaaaaaaaaaaaaaaaaaaaaaaaaaaaaaaaaaaaaaaaaaaaaaaaaaaaaaaaaaaaaaaaaaaaaaaaaaa

SEQ ID NO: 24630 - RNA, 4035 nt, Artificial Sequence
  SARS-CoV-2/Wuhan/WIV05/2019__EPI_ISL_402128 spike protein mRNA gc (1-1273)(K986P_V987P_K986P_V987P_K417N_E484K_N501Y_D614G)
aggagaaagcuuaccauguucguguuccugguccuccugccccuggugagcucccagugcgugaaccucaccacccgcacgcagcugccgcccgccuacaccaacagcuucacccggggcgucuacuaccccgacaagguguuccgcuccagcgugcugcacuccacccaggaccucuuccugcccuucuucagcaacgucacgugguuccacgccauccacguguccgggaccaacggcaccaagcgguucgacaacccggugcugcccuucaacgacggggucuacuucgcgagcaccgagaaguccaacaucauccgcggcuggaucuucgggacgacccucgacagcaagacccagucccugcugaucgugaacaacgccaccaacguggucaucaaggugugcgaguuccaguucugcaacgaccccuuccucggcguguacuaccacaagaacaacaagagcuggauggaguccgaguuccgggucuacagcuccgccaacaacugcacguucgaguacgugagccagcccuuccugauggaccuggagggcaagcaggggaacuucaagaaccuccgcgaguucguguucaagaacaucgacggcuacuucaagaucuacuccaagcacaccccgaucaaccugguccgggaccugccccagggguucagcgcccucgagccccugguggaccugcccaucggcaucaacaucacccgcuuccagacccuccuggcccugcaccgguccuaccucacgccgggggacagcagcuccggcuggaccgcgggcgccgccgccuacuacgugggguaccugcagccccgcaccuuccugcucaaguacaacgagaacggcaccaucacggacgcggucgacugcgcccuggacccccugagcgagaccaagugcacccucaaguccuucaccguggagaaggggaucuaccagacgagcaacuuccgggugcagcccaccgaguccaucguccgcuucccgaacaucaccaaccugugccccuucggcgagguguucaacgccacccgguucgccagcgucuacgccuggaaccgcaagcggaucuccaacugcguggcggacuacagcgugcuguacaacuccgccagcuucuccacguucaagugcuacggcgucagccccaccaagcucaacgaccugugcuucaccaacguguacgccgacuccuucgugauccgcggggacgagguccggcagaucgcccccggccagaccgggaacaucgccgacuacaacuacaagcugccggacgacuucacgggcugcgugaucgcguggaacagcaacaaccucgacuccaaggucgggggcaacuacaacuaccuguaccgccuguuccgcaagagcaaccucaagcccuucgagcgggacaucuccaccgagaucuaccaggccggcagcacccccugcaacggggugaagggcuucaacugcuacuucccccugcaguccuacggguuccagccgaccuacggcgugggguaccagcccuaccggguggucgugcugagcuucgagcuccugcacgcccccgccacggugugcggccccaagaaguccaccaaccuggucaagaacaagugcgugaacuucaacuucaacggccucaccgggaccggcgugcugaccgagagcaacaagaaguuccugccguuccagcaguucgggcgcgacaucgccgacacgaccgacgcgguccgcgacccccagacccuggagauccucgacaucacccccugcagcuucggcgggguguccgugaucacgccgggcaccaacaccagcaaccaggucgccgugcuguaccagggcgugaacugcaccgagguccccguggccauccacgccgaccagcugacgcccaccuggcggguguacuccaccggcagcaacgucuuccagacccgcgccgggugccucaucggcgcggagcacgugaacaacuccuacgagugcgacauccccaucggggccggcaucugcgccagcuaccagacgcagaccaacuccccgcggcgcgcccggagcguggcgucccagagcaucaucgccuacaccaugucccugggcgccgagaacagcgucgccuacuccaacaacagcaucgccauccccaccaacuucacgaucuccgugaccaccgagauccugcccgugagcaugaccaagacgagcgucgacugcaccauguacaucugcggggacuccaccgagugcagcaaccuccugcugcaguacggcuccuucugcacccagcucaaccgcgcgcugacggggaucgccguggagcaggacaagaacacccaggagguguucgcccaggucaagcagaucuacaagacgcccccgaucaaggacuucggcggguucaacuucagccagauccugcccgaccccuccaagcccagcaagcgguccuucaucgaggaccuccuguucaacaaggugacccuggccgacgccggcuucaucaagcaguacggcgacugccucggggacaucgcggcccgcgaccugaucugcgcccagaaguucaacggccugaccgugcucccgccccugcugaccgacgagaugaucgcccaguacaccagcgcccuccuggcggggaccaucacguccggcuggaccuucggggccggcgccgcccugcagauccccuucgcgaugcagauggccuaccgguucaacggcaucggggucacccagaacgugcucuacgagaaccagaagcugaucgccaaccaguucaacagcgccaucggcaagauccaggacucccugagcuccaccgccagcgcgcucgggaagcugcaggacguggucaaccagaacgcccaggcccugaacacgcucgugaagcagcuguccagcaacuucggcgccaucuccagcgugcugaacgacauccucucccgccuggacccgcccgaggccgaggugcagaucgaccggcugaucaccgggcgccuccagagccugcagaccuacgugacccagcagcugauccgggcggccgagauccgcgccagcgccaaccucgccgcgaccaagauguccgagugcguccugggccagagcaagcggguggacuucugcggcaagggguaccaccugauguccuucccccagagcgccccgcacggcguggucuuccuccacgugacguacguccccgcccaggagaagaacuucaccaccgcccccgcgaucugccacgacgggaaggcccacuucccccgcgagggcguguucguguccaacgggacccacugguucgucacgcagcggaacuucuacgagccgcagaucaucaccaccgacaacaccuucgugagcggcaacugcgacguggucaucggcaucgugaacaacacgguguacgacccccugcagcccgagcuggacuccuucaaggaggagcucgacaaguacuucaagaaccacaccagccccgacgucgaccugggggacaucuccggcaucaacgccagcguggugaacauccagaaggagaucgaccgccugaacgaggucgccaagaaccucaacgagucccugaucgaccugcaggagcucgggaaguacgagcaguacaucaaguggccgugguacaucuggcugggcuucaucgccggccugaucgcgaucgugauggugaccaucaugcucugcugcaugaccagcugcugcuccugccugaaggggugcugcagcugcggcuccugcugcaaguucgacgaggacgacagcgagcccguccugaagggggugaagcuccacuacacgugaggacuaguuauaagacugacuagcccgaugggccucccaacgggcccuccuccccuccuugcaccgagagaucucaaaggcucuuuucagagccaccaaaaaaaaaaaaaaaaaaaaaaaaaaaaaaaaaaaaaaaaaaaaaaaaaaaaaaaaaaaaaaaaaaaaaaaaaaaaaaaaaaaaaaaaaaaaaaaaaaaaa

SEQ ID NO: 24631 - RNA, 4026 nt, Artificial Sequence
  SARS-CoV-2/Wuhan/WIV05/2019__EPI_ISL_402128 spike protein mRNA gc (1-1273)(K986P_V987P_K986P_V987P_L18F_D80A_D215G_L242del_A243del_ L244del_R246I_K417N_E484K_N501Y_D614G_A701V)
aggagaaagcuuaccauguucguguuccugguccuccugccccuggugagcucccagugcgugaacuucaccacccgcacgcagcugccgcccgccuacaccaacagcuucacccggggcgucuacuaccccgacaagguguuccgcuccagcgugcugcacuccacccaggaccucuuccugcccuucuucagcaacgucacgugguuccacgccauccacguguccgggaccaacggcaccaagcgguucgccaacccggugcugcccuucaacgacggggucuacuucgcgagcaccgagaaguccaacaucauccgcggcuggaucuucgggacgacccucgacagcaagacccagucccugcugaucgugaacaacgccaccaacguggucaucaaggugugcgaguuccaguucugcaacgaccccuuccucggcguguacuaccacaagaacaacaagagcuggauggaguccgaguuccgggucuacagcuccgccaacaacugcacguucgaguacgugagccagcccuuccugauggaccuggagggcaagcaggggaacuucaagaaccuccgcgaguucguguucaagaacaucgacggcuacuucaagaucuacuccaagcacaccccgaucaaccugguccggggccugccccagggguucagcgcccucgagccccugguggaccugcccaucggcaucaacaucacccgcuuccagacccuccacaucuccuaccucacgccgggggacagcagcuccggcuggaccgcgggcgccgccgccuacuacgugggguaccugcagccccgcaccuuccugcucaaguacaacgagaacggcaccaucacggacgcggucgacugcgcccuggacccccugagcgagaccaagugcacccucaaguccuucaccguggagaaggggaucuaccagacgagcaacuuccgggugcagcccaccgaguccaucguccgcuucccgaacaucaccaaccugugccccuucggcgagguguucaacgccacccgguucgccagcgucuacgccuggaaccgcaagcggaucuccaacugcguggcggacuacagcgugcuguacaacuccgccagcuucuccacguucaagugcuacggcgucagccccaccaagcucaacgaccugugcuucaccaacguguacgccgacuccuucgugauccgcggggacgagguccggcagaucgcccccggccagaccgggaacaucgccgacuacaacuacaagcugccggacgacuucacgggcugcgugaucgcguggaacagcaacaaccucgacuccaaggucgggggcaacuacaacuaccuguaccgccuguuccgcaagagcaaccucaagcccuucgagcgggacaucuccaccgagaucuaccaggccggcagcacccccugcaacggggugaagggcuucaacugcuacuucccccugcaguccuacggguuccagccgaccuacggcgugggguaccagcccuaccggguggucgugcugagcuucgagcuccugcacgcccccgccacggugugcggccccaagaaguccaccaaccuggucaagaacaagugcgugaacuucaacuucaacggccucaccgggaccggcgugcugaccgagagcaacaagaaguuccugccguuccagcaguucgggcgcgacaucgccgacacgaccgacgcgguccgcgacccccagacccuggagauccucgacaucacccccugcagcuucggcgggguguccgugaucacgccgggcaccaacaccagcaaccaggucgccgugcuguaccagggcgugaacugcaccgagguccccguggccauccacgccgaccagcugacgcccaccuggcggguguacuccaccggcagcaacgucuuccagacccgcgccgggugccucaucggcgcggagcacgugaacaacuccuacgagugcgacauccccaucggggccggcaucugcgccagcuaccagacgcagaccaacuccccgcggcgcgcccggagcguggcgucccagagcaucaucgccuacaccaugucccugggcguggagaacagcgucgccuacuccaacaacagcaucgccauccccaccaacuucacgaucuccgugaccaccgagauccugcccgugagcaugaccaagacgagcgucgacugcaccauguacaucugcggggacuccaccgagugcagcaaccuccugcugcaguacggcuccuucugcacccagcucaaccgcgcgcugacggggaucgccguggagcaggacaagaacacccaggagguguucgcccaggucaagcagaucuacaagacgcccccgaucaaggacuucggcggguucaacuucagccagauccugcccgaccccuccaagcccagcaagcgguccuucaucgaggaccuccuguucaacaaggugacccuggccgacgccggcuucaucaagcaguacggcgacugccucggggacaucgcggcccgcgaccugaucugcgcccagaaguucaacggccugaccgugcucccgccccugcugaccgacgagaugaucgcccaguacaccagcgcccuccuggcggggaccaucacguccggcuggaccuucggggccggcgccgcccugcagauccccuucgcgaugcagauggccuaccgguucaacggcaucggggucacccagaacgugcucuacgagaaccagaagcugaucgccaaccaguucaacagcgccaucggcaagauccaggacucccugagcuccaccgccagcgcgcucgggaagcugcaggacguggucaaccagaacgcccaggcccugaacacgcucgugaagcagcuguccagcaacuucggcgccaucuccagcgugcugaacgacauccucucccgccuggacccgcccgaggccgaggugcagaucgaccggcugaucaccgggcgccuccagagccugcagaccuacgugacccagcagcugauccgggcggccgagauccgcgccagcgccaaccucgccgcgaccaagauguccgagugcguccugggccagagcaagcggguggacuucugcggcaagggguaccaccugauguccuucccccagagcgccccgcacggcguggucuuccuccacgugacguacguccccgcccaggagaagaacuucaccaccgcccccgcgaucugccacgacgggaaggcccacuucccccgcgagggcguguucguguccaacgggacccacugguucgucacgcagcggaacuucuacgagccgcagaucaucaccaccgacaacaccuucgugagcggcaacugcgacguggucaucggcaucgugaacaacacgguguacgacccccugcagcccgagcuggacuccuucaaggaggagcucgacaaguacuucaagaaccacaccagccccgacgucgaccugggggacaucuccggcaucaacgccagcguggugaacauccagaaggagaucgaccgccugaacgaggucgccaagaaccucaacgagucccugaucgaccugcaggagcucgggaaguacgagcaguacaucaaguggccgugguacaucuggcugggcuucaucgccggccugaucgcgaucgugauggugaccaucaugcucugcugcaugaccagcugcugcuccugccugaaggggugcugcagcugcggcuccugcugcaaguucgacgaggacgacagcgagcccguccugaagggggugaagcuccacuacacgugaggacuaguuauaagacugacuagcccgaugggccucccaacgggcccuccuccccuccuugcaccgagagaucucaaaggcucuuuucagagccaccaaaaaaaaaaaaaaaaaaaaaaaaaaaaaaaaaaaaaaaaaaaaaaaaaaaaaaaaaaaaaaaaaaaaaaaaaaaaaaaaaaaaaaaaaaaaaaaaaaaaa

SEQ ID NO: 24632 - RNA, 4035 nt, Artificial Sequence
  SARS-CoV-2/Wuhan/WIV05/2019__EPI_ISL_402128 spike protein mRNA gc (1-1273)(K986P_V987P_K986P_V987P_E484K_D614G)
aggagaaagcuuaccauguucguguuccugguccuccugccccuggugagcucccagugcgugaaccucaccacccgcacgcagcugccgcccgccuacaccaacagcuucacccggggcgucuacuaccccgacaagguguuccgcuccagcgugcugcacuccacccaggaccucuuccugcccuucuucagcaacgucacgugguuccacgccauccacguguccgggaccaacggcaccaagcgguucgacaacccggugcugcccuucaacgacggggucuacuucgcgagcaccgagaaguccaacaucauccgcggcuggaucuucgggacgacccucgacagcaagacccagucccugcugaucgugaacaacgccaccaacguggucaucaaggugugcgaguuccaguucugcaacgaccccuuccucggcguguacuaccacaagaacaacaagagcuggauggaguccgaguuccgggucuacagcuccgccaacaacugcacguucgaguacgugagccagcccuuccugauggaccuggagggcaagcaggggaacuucaagaaccuccgcgaguucguguucaagaacaucgacggcuacuucaagaucuacuccaagcacaccccgaucaaccugguccgggaccugccccagggguucagcgcccucgagccccugguggaccugcccaucggcaucaacaucacccgcuuccagacccuccuggcccugcaccgguccuaccucacgccgggggacagcagcuccggcuggaccgcgggcgccgccgccuacuacgugggguaccugcagccccgcaccuuccugcucaaguacaacgagaacggcaccaucacggacgcggucgacugcgcccuggacccccugagcgagaccaagugcacccucaaguccuucaccguggagaaggggaucuaccagacgagcaacuuccgggugcagcccaccgaguccaucguccgcuucccgaacaucaccaaccugugccccuucggcgagguguucaacgccacccgguucgccagcgucuacgccuggaaccgcaagcggaucuccaacugcguggcggacuacagcgugcuguacaacuccgccagcuucuccacguucaagugcuacggcgucagccccaccaagcucaacgaccugugcuucaccaacguguacgccgacuccuucgugauccgcggggacgagguccggcagaucgcccccggccagaccgggaagaucgccgacuacaacuacaagcugccggacgacuucacgggcugcgugaucgcguggaacagcaacaaccucgacuccaaggucgggggcaacuacaacuaccuguaccgccuguuccgcaagagcaaccucaagcccuucgagcgggacaucuccaccgagaucuaccaggccggcagcacccccugcaacggggugaagggcuucaacugcuacuucccccugcaguccuacggguuccagccgaccaacggcgugggguaccagcccuaccggguggucgugcugagcuucgagcuccugcacgcccccgccacggugugcggccccaagaaguccaccaaccuggucaagaacaagugcgugaacuucaacuucaacggccucaccgggaccggcgugcugaccgagagcaacaagaaguuccugccguuccagcaguucgggcgcgacaucgccgacacgaccgacgcgguccgcgacccccagacccuggagauccucgacaucacccccugcagcuucggcgggguguccgugaucacgccgggcaccaacaccagcaaccaggucgccgugcuguaccagggcgugaacugcaccgagguccccguggccauccacgccgaccagcugacgcccaccuggcggguguacuccaccggcagcaacgucuuccagacccgcgccgggugccucaucggcgcggagcacgugaacaacuccuacgagugcgacauccccaucggggccggcaucugcgccagcuaccagacgcagaccaacuccccgcggcgcgcccggagcguggcgucccagagcaucaucgccuacaccaugucccugggcgccgagaacagcgucgccuacuccaacaacagcaucgccauccccaccaacuucacgaucuccgugaccaccgagauccugcccgugagcaugaccaagacgagcgucgacugcaccauguacaucugcggggacuccaccgagugcagcaaccuccugcugcaguacggcuccuucugcacccagcucaaccgcgcgcugacggggaucgccguggagcaggacaagaacacccaggagguguucgcccaggucaagcagaucuacaagacgcccccgaucaaggacuucggcggguucaacuucagccagauccugcccgaccccuccaagcccagcaagcgguccuucaucgaggaccuccuguucaacaaggugacccuggccgacgccggcuucaucaagcaguacggcgacugccucggggacaucgcggcccgcgaccugaucugcgcccagaaguucaacggccugaccgugcucccgccccugcugaccgacgagaugaucgcccaguacaccagcgcccuccuggcggggaccaucacguccggcuggaccuucggggccggcgccgcccugcagauccccuucgcgaugcagauggccuaccgguucaacggcaucggggucacccagaacgugcucuacgagaaccagaagcugaucgccaaccaguucaacagcgccaucggcaagauccaggacucccugagcuccaccgccagcgcgcucgggaagcugcaggacguggucaaccagaacgcccaggcccugaacacgcucgugaagcagcuguccagcaacuucggcgccaucuccagcgugcugaacgacauccucucccgccuggacccgcccgaggccgaggugcagaucgaccggcugaucaccgggcgccuccagagccugcagaccuacgugacccagcagcugauccgggcggccgagauccgcgccagcgccaaccucgccgcgaccaagauguccgagugcguccugggccagagcaagcggguggacuucugcggcaagggguaccaccugauguccuucccccagagcgccccgcacggcguggucuuccuccacgugacguacguccccgcccaggagaagaacuucaccaccgcccccgcgaucugccacgacgggaaggcccacuucccccgcgagggcguguucguguccaacgggacccacugguucgucacgcagcggaacuucuacgagccgcagaucaucaccaccgacaacaccuucgugagcggcaacugcgacguggucaucggcaucgugaacaacacgguguacgacccccugcagcccgagcuggacuccuucaaggaggagcucgacaaguacuucaagaaccacaccagccccgacgucgaccugggggacaucuccggcaucaacgccagcguggugaacauccagaaggagaucgaccgccugaacgaggucgccaagaaccucaacgagucccugaucgaccugcaggagcucgggaaguacgagcaguacaucaaguggccgugguacaucuggcugggcuucaucgccggccugaucgcgaucgugauggugaccaucaugcucugcugcaugaccagcugcugcuccugccugaaggggugcugcagcugcggcuccugcugcaaguucgacgaggacgacagcgagcccguccugaagggggugaagcuccacuacacgugaggacuaguuauaagacugacuagcccgaugggccucccaacgggcccuccuccccuccuugcaccgagagaucucaaaggcucuuuucagagccaccaaaaaaaaaaaaaaaaaaaaaaaaaaaaaaaaaaaaaaaaaaaaaaaaaaaaaaaaaaaaaaaaaaaaaaaaaaaaaaaaaaaaaaaaaaaaaaaaaaaaa

SEQ ID NO: 24633 - RNA, 4035 nt, Artificial Sequence
  SARS-CoV-2/Wuhan/WIV05/2019__EPI_ISL_402128 spike protein mRNA gc (1-1273)(K986P_V987P_K986P_V987P_L18F_T20N_P26S_D138Y_R190S_K417T _E484K_N501Y_D614G_H655Y_T1027I)
aggagaaagcuuaccauguucguguuccugguccuccugccccuggugagcucccagugcgugaacuucaccaaccgcacgcagcugccgagcgccuacaccaacagcuucacccggggcgucuacuaccccgacaagguguuccgcuccagcgugcugcacuccacccaggaccucuuccugcccuucuucagcaacgucacgugguuccacgccauccacguguccgggaccaacggcaccaagcgguucgacaacccggugcugcccuucaacgacggggucuacuucgcgagcaccgagaaguccaacaucauccgcggcuggaucuucgggacgacccucgacagcaagacccagucccugcugaucgugaacaacgccaccaacguggucaucaaggugugcgaguuccaguucugcaacuaccccuuccucggcguguacuaccacaagaacaacaagagcuggauggaguccgaguuccgggucuacagcuccgccaacaacugcacguucgaguacgugagccagcccuuccugauggaccuggagggcaagcaggggaacuucaagaaccucagcgaguucguguucaagaacaucgacggcuacuucaagaucuacuccaagcacaccccgaucaaccugguccgggaccugccccagggguucagcgcccucgagccccugguggaccugcccaucggcaucaacaucacccgcuuccagacccuccuggcccugcaccgguccuaccucacgccgggggacagcagcuccggcuggaccgcgggcgccgccgccuacuacgugggguaccugcagccccgcaccuuccugcucaaguacaacgagaacggcaccaucacggacgcggucgacugcgcccuggacccccugagcgagaccaagugcacccucaaguccuucaccguggagaaggggaucuaccagacgagcaacuuccgggugcagcccaccgaguccaucguccgcuucccgaacaucaccaaccugugccccuucggcgagguguucaacgccacccgguucgccagcgucuacgccuggaaccgcaagcggaucuccaacugcguggcggacuacagcgugcuguacaacuccgccagcuucuccacguucaagugcuacggcgucagccccaccaagcucaacgaccugugcuucaccaacguguacgccgacuccuucgugauccgcggggacgagguccggcagaucgcccccggccagaccgggaccaucgccgacuacaacuacaagcugccggacgacuucacgggcugcgugaucgcguggaacagcaacaaccucgacuccaaggucgggggcaacuacaacuaccuguaccgccuguuccgcaagagcaaccucaagcccuucgagcgggacaucuccaccgagaucuaccaggccggcagcacccccugcaacggggugaagggcuucaacugcuacuucccccugcaguccuacggguuccagccgaccuacggcgugggguaccagcccuaccggguggucgugcugagcuucgagcuccugcacgcccccgccacggugugcggccccaagaaguccaccaaccuggucaagaacaagugcgugaacuucaacuucaacggccucaccgggaccggcgugcugaccgagagcaacaagaaguuccugccguuccagcaguucgggcgcgacaucgccgacacgaccgacgcgguccgcgacccccagacccuggagauccucgacaucacccccugcagcuucggcgggguguccgugaucacgccgggcaccaacaccagcaaccaggucgccgugcuguaccagggcgugaacugcaccgagguccccguggccauccacgccgaccagcugacgcccaccuggcggguguacuccaccggcagcaacgucuuccagacccgcgccgggugccucaucggcgcggaguacgugaacaacuccuacgagugcgacauccccaucggggccggcaucugcgccagcuaccagacgcagaccaacuccccgcggcgcgcccggagcguggcgucccagagcaucaucgccuacaccaugucccugggcgccgagaacagcgucgccuacuccaacaacagcaucgccauccccaccaacuucacgaucuccgugaccaccgagauccugcccgugagcaugaccaagacgagcgucgacugcaccauguacaucugcggggacuccaccgagugcagcaaccuccugcugcaguacggcuccuucugcacccagcucaaccgcgcgcugacggggaucgccguggagcaggacaagaacacccaggagguguucgcccaggucaagcagaucuacaagacgcccccgaucaaggacuucggcggguucaacuucagccagauccugcccgaccccuccaagcccagcaagcgguccuucaucgaggaccuccuguucaacaaggugacccuggccgacgccggcuucaucaagcaguacggcgacugccucggggacaucgcggcccgcgaccugaucugcgcccagaaguucaacggccugaccgugcucccgccccugcugaccgacgagaugaucgcccaguacaccagcgcccuccuggcggggaccaucacguccggcuggaccuucggggccggcgccgcccugcagauccccuucgcgaugcagauggccuaccgguucaacggcaucggggucacccagaacgugcucuacgagaaccagaagcugaucgccaaccaguucaacagcgccaucggcaagauccaggacucccugagcuccaccgccagcgcgcucgggaagcugcaggacguggucaaccagaacgcccaggcccugaacacgcucgugaagcagcuguccagcaacuucggcgccaucuccagcgugcugaacgacauccucucccgccuggacccgcccgaggccgaggugcagaucgaccggcugaucaccgggcgccuccagagccugcagaccuacgugacccagcagcugauccgggcggccgagauccgcgccagcgccaaccucgccgcgaucaagauguccgagugcguccugggccagagcaagcggguggacuucugcggcaagggguaccaccugauguccuucccccagagcgccccgcacggcguggucuuccuccacgugacguacguccccgcccaggagaagaacuucaccaccgcccccgcgaucugccacgacgggaaggcccacuucccccgcgagggcguguucguguccaacgggacccacugguucgucacgcagcggaacuucuacgagccgcagaucaucaccaccgacaacaccuucgugagcggcaacugcgacguggucaucggcaucgugaacaacacgguguacgacccccugcagcccgagcuggacuccuucaaggaggagcucgacaaguacuucaagaaccacaccagccccgacgucgaccugggggacaucuccggcaucaacgccagcguggugaacauccagaaggagaucgaccgccugaacgaggucgccaagaaccucaacgagucccugaucgaccugcaggagcucgggaaguacgagcaguacaucaaguggccgugguacaucuggcugggcuucaucgccggccugaucgcgaucgugauggugaccaucaugcucugcugcaugaccagcugcugcuccugccugaaggggugcugcagcugcggcuccugcugcaaguucgacgaggacgacagcgagcccguccugaagggggugaagcuccacuacacgugaggacuaguuauaagacugacuagcccgaugggccucccaacgggcccuccuccccuccuugcaccgagagaucucaaaggcucuuuucagagccaccaaaaaaaaaaaaaaaaaaaaaaaaaaaaaaaaaaaaaaaaaaaaaaaaaaaaaaaaaaaaaaaaaaaaaaaaaaaaaaaaaaaaaaaaaaaaaaaaaaaaa

SEQ ID NO: 24634 - RNA, 4035 nt, Artificial Sequence
  SARS-CoV-2/Wuhan/WIV05/2019__EPI_ISL_402128 spike protein mRNA gc (1-1273)(K986P_V987P_K986P_V987P_S13I_W152C_L452R_D614G)
aggagaaagcuuaccauguucguguuccugguccuccugccccuggugagcauccagugcgugaaccucaccacccgcacgcagcugccgcccgccuacaccaacagcuucacccggggcgucuacuaccccgacaagguguuccgcuccagcgugcugcacuccacccaggaccucuuccugcccuucuucagcaacgucacgugguuccacgccauccacguguccgggaccaacggcaccaagcgguucgacaacccggugcugcccuucaacgacggggucuacuucgcgagcaccgagaaguccaacaucauccgcggcuggaucuucgggacgacccucgacagcaagacccagucccugcugaucgugaacaacgccaccaacguggucaucaaggugugcgaguuccaguucugcaacgaccccuuccucggcguguacuaccacaagaacaacaagagcugcauggaguccgaguuccgggucuacagcuccgccaacaacugcacguucgaguacgugagccagcccuuccugauggaccuggagggcaagcaggggaacuucaagaaccuccgcgaguucguguucaagaacaucgacggcuacuucaagaucuacuccaagcacaccccgaucaaccugguccgggaccugccccagggguucagcgcccucgagccccugguggaccugcccaucggcaucaacaucacccgcuuccagacccuccuggcccugcaccgguccuaccucacgccgggggacagcagcuccggcuggaccgcgggcgccgccgccuacuacgugggguaccugcagccccgcaccuuccugcucaaguacaacgagaacggcaccaucacggacgcggucgacugcgcccuggacccccugagcgagaccaagugcacccucaaguccuucaccguggagaaggggaucuaccagacgagcaacuuccgggugcagcccaccgaguccaucguccgcuucccgaacaucaccaaccugugccccuucggcgagguguucaacgccacccgguucgccagcgucuacgccuggaaccgcaagcggaucuccaacugcguggcggacuacagcgugcuguacaacuccgccagcuucuccacguucaagugcuacggcgucagccccaccaagcucaacgaccugugcuucaccaacguguacgccgacuccuucgugauccgcggggacgagguccggcagaucgcccccggccagaccgggaagaucgccgacuacaacuacaagcugccggacgacuucacgggcugcgugaucgcguggaacagcaacaaccucgacuccaaggucgggggcaacuacaacuaccgcuaccgccuguuccgcaagagcaaccucaagcccuucgagcgggacaucuccaccgagaucuaccaggccggcagcacccccugcaacgggguggagggcuucaacugcuacuucccccugcaguccuacggguuccagccgaccaacggcgugggguaccagcccuaccggguggucgugcugagcuucgagcuccugcacgcccccgccacggugugcggccccaagaaguccaccaaccuggucaagaacaagugcgugaacuucaacuucaacggccucaccgggaccggcgugcugaccgagagcaacaagaaguuccugccguuccagcaguucgggcgcgacaucgccgacacgaccgacgcgguccgcgacccccagacccuggagauccucgacaucacccccugcagcuucggcgggguguccgugaucacgccgggcaccaacaccagcaaccaggucgccgugcuguaccagggcgugaacugcaccgagguccccguggccauccacgccgaccagcugacgcccaccuggcggguguacuccaccggcagcaacgucuuccagacccgcgccgggugccucaucggcgcggagcacgugaacaacuccuacgagugcgacauccccaucggggccggcaucugcgccagcuaccagacgcagaccaacuccccgcggcgcgcccggagcguggcgucccagagcaucaucgccuacaccaugucccugggcgccgagaacagcgucgccuacuccaacaacagcaucgccauccccaccaacuucacgaucuccgugaccaccgagauccugcccgugagcaugaccaagacgagcgucgacugcaccauguacaucugcggggacuccaccgagugcagcaaccuccugcugcaguacggcuccuucugcacccagcucaaccgcgcgcugacggggaucgccguggagcaggacaagaacacccaggagguguucgcccaggucaagcagaucuacaagacgcccccgaucaaggacuucggcggguucaacuucagccagauccugcccgaccccuccaagcccagcaagcgguccuucaucgaggaccuccuguucaacaaggugacccuggccgacgccggcuucaucaagcaguacggcgacugccucggggacaucgcggcccgcgaccugaucugcgcccagaaguucaacggccugaccgugcucccgccccugcugaccgacgagaugaucgcccaguacaccagcgcccuccuggcggggaccaucacguccggcuggaccuucggggccggcgccgcccugcagauccccuucgcgaugcagauggccuaccgguucaacggcaucggggucacccagaacgugcucuacgagaaccagaagcugaucgccaaccaguucaacagcgccaucggcaagauccaggacucccugagcuccaccgccagcgcgcucgggaagcugcaggacguggucaaccagaacgcccaggcccugaacacgcucgugaagcagcuguccagcaacuucggcgccaucuccagcgugcugaacgacauccucucccgccuggacccgcccgaggccgaggugcagaucgaccggcugaucaccgggcgccuccagagccugcagaccuacgugacccagcagcugauccgggcggccgagauccgcgccagcgccaaccucgccgcgaccaagauguccgagugcguccugggccagagcaagcggguggacuucugcggcaagggguaccaccugauguccuucccccagagcgccccgcacggcguggucuuccuccacgugacguacguccccgcccaggagaagaacuucaccaccgcccccgcgaucugccacgacgggaaggcccacuucccccgcgagggcguguucguguccaacgggacccacugguucgucacgcagcggaacuucuacgagccgcagaucaucaccaccgacaacaccuucgugagcggcaacugcgacguggucaucggcaucgugaacaacacgguguacgacccccugcagcccgagcuggacuccuucaaggaggagcucgacaaguacuucaagaaccacaccagccccgacgucgaccugggggacaucuccggcaucaacgccagcguggugaacauccagaaggagaucgaccgccugaacgaggucgccaagaaccucaacgagucccugaucgaccugcaggagcucgggaaguacgagcaguacaucaaguggccgugguacaucuggcugggcuucaucgccggccugaucgcgaucgugauggugaccaucaugcucugcugcaugaccagcugcugcuccugccugaaggggugcugcagcugcggcuccugcugcaaguucgacgaggacgacagcgagcccguccugaagggggugaagcuccacuacacgugaggacuaguuauaagacugacuagcccgaugggccucccaacgggcccuccuccccuccuugcaccgagagaucucaaaggcucuuuucagagccaccaaaaaaaaaaaaaaaaaaaaaaaaaaaaaaaaaaaaaaaaaaaaaaaaaaaaaaaaaaaaaaaaaaaaaaaaaaaaaaaaaaaaaaaaaaaaaaaaaaaaa

SEQ ID NO: 24635 - RNA, 4035 nt, Artificial Sequence
  SARS-CoV-2/Wuhan/WIV05/2019__EPI_ISL_402128 spike protein mRNA gc (1-1273)(K986P_V987P)
aggagaaagcuuaccauguucguguuccugguccuccugccccuggugagcucccagugcgugaaccucaccacccgcacgcagcugccgcccgccuacaccaacagcuucacccggggcgucuacuaccccgacaagguguuccgcuccagcgugcugcacuccacccaggaccucuuccugcccuucuucagcaacgucacgugguuccacgccauccacguguccgggaccaacggcaccaagcgguucgacaacccggugcugcccuucaacgacggggucuacuucgcgagcaccgagaaguccaacaucauccgcggcuggaucuucgggacgacccucgacagcaagacccagucccugcugaucgugaacaacgccaccaacguggucaucaaggugugcgaguuccaguucugcaacgaccccuuccucggcguguacuaccacaagaacaacaagagcuggauggaguccgaguuccgggucuacagcuccgccaacaacugcacguucgaguacgugagccagcccuuccugauggaccuggagggcaagcaggggaacuucaagaaccuccgcgaguucguguucaagaacaucgacggcuacuucaagaucuacuccaagcacaccccgaucaaccugguccgggaccugccccagggguucagcgcccucgagccccugguggaccugcccaucggcaucaacaucacccgcuuccagacccuccuggcccugcaccgguccuaccucacgccgggggacagcagcuccggcuggaccgcgggcgccgccgccuacuacgugggguaccugcagccccgcaccuuccugcucaaguacaacgagaacggcaccaucacggacgcggucgacugcgcccuggacccccugagcgagaccaagugcacccucaaguccuucaccguggagaaggggaucuaccagacgagcaacuuccgggugcagcccaccgaguccaucguccgcuucccgaacaucaccaaccugugccccuucggcgagguguucaacgccacccgguucgccagcgucuacgccuggaaccgcaagcggaucuccaacugcguggcggacuacagcgugcuguacaacuccgccagcuucuccacguucaagugcuacggcgucagccccaccaagcucaacgaccugugcuucaccaacguguacgccgacuccuucgugauccgcggggacgagguccggcagaucgcccccggccagaccgggaagaucgccgacuacaacuacaagcugccggacgacuucacgggcugcgugaucgcguggaacagcaacaaccucgacuccaaggucgggggcaacuacaacuaccuguaccgccuguuccgcaagagcaaccucaagcccuucgagcgggacaucuccaccgagaucuaccaggccggcagcacccccugcaacgggguggagggcuucaacugcuacuucccccugcaguccuacggguuccagccgaccaacggcgugggguaccagcccuaccggguggucgugcugagcuucgagcuccugcacgcccccgccacggugugcggccccaagaaguccaccaaccuggucaagaacaagugcgugaacuucaacuucaacggccucaccgggaccggcgugcugaccgagagcaacaagaaguuccugccguuccagcaguucgggcgcgacaucgccgacacgaccgacgcgguccgcgacccccagacccuggagauccucgacaucacccccugcagcuucggcgggguguccgugaucacgccgggcaccaacaccagcaaccaggucgccgugcuguaccaggacgugaacugcaccgagguccccguggccauccacgccgaccagcugacgcccaccuggcggguguacuccaccggcagcaacgucuuccagacccgcgccgggugccucaucggcgcggagcacgugaacaacuccuacgagugcgacauccccaucggggccggcaucugcgccagcuaccagacgcagaccaacuccccgcggcgcgcccggagcguggcgucccagagcaucaucgccuacaccaugucccugggcgccgagaacagcgucgccuacuccaacaacagcaucgccauccccaccaacuucacgaucuccgugaccaccgagauccugcccgugagcaugaccaagacgagcgucgacugcaccauguacaucugcggggacuccaccgagugcagcaaccuccugcugcaguacggcuccuucugcacccagcucaaccgcgcgcugacggggaucgccguggagcaggacaagaacacccaggagguguucgcccaggucaagcagaucuacaagacgcccccgaucaaggacuucggcggguucaacuucagccagauccugcccgaccccuccaagcccagcaagcgguccuucaucgaggaccuccuguucaacaaggugacccuggccgacgccggcuucaucaagcaguacggcgacugccucggggacaucgcggcccgcgaccugaucugcgcccagaaguucaacggccugaccgugcucccgccccugcugaccgacgagaugaucgcccaguacaccagcgcccuccuggcggggaccaucacguccggcuggaccuucggggccggcgccgcccugcagauccccuucgcgaugcagauggccuaccgguucaacggcaucggggucacccagaacgugcucuacgagaaccagaagcugaucgccaaccaguucaacagcgccaucggcaagauccaggacucccugagcuccaccgccagcgcgcucgggaagcugcaggacguggucaaccagaacgcccaggcccugaacacgcucgugaagcagcuguccagcaacuucggcgccaucuccagcgugcugaacgacauccucucccgccuggacccgcccgaggccgagguccagaucgaccggcugaucaccgggcgccuccagagccugcagaccuacgugacccagcagcugauccgggcggccgagauccgcgccagcgccaaccucgccgcgaccaagauguccgagugcgugcugggccagagcaagcgggucgacuucugcggcaagggguaccaccugauguccuucccccagagcgcgccccacggcgugguguuccuccacgucacguacgugcccgcccaggagaagaacuucaccaccgccccggccaucugccacgacgggaaggcccacuucccccgcgagggcgucuucguguccaacgggacccacugguucgugacgcagcggaacuucuacgagccccagaucaucaccaccgacaacaccuucgucagcggcaacugcgacguggugaucggcaucgucaacaacacgguguacgacccccugcagccggagcuggacuccuucaaggaggagcucgacaaguacuucaagaaccacaccagccccgacguggaccugggggacaucuccggcaucaacgccagcgucgugaacauccagaaggagaucgaccgccugaacgagguggccaagaaccucaacgagucccugaucgaccugcaggagcucgggaaguacgagcaguacaucaaguggcccugguacaucuggcugggcuucaucgccggccugaucgcgaucgucauggugaccaucaugcucugcugcaugaccagcugcugcuccugccugaaggggugcugcagcugcggcuccugcugcaaguucgacgaggacgacagcgagccggugcugaagggggucaagcuccacuacacgugaggacuaguuauaagacugacuagcccgaugggccucccaacgggcccuccuccccuccuugcaccgagagaucucaaaggcucuuuucagagccaccaaaaaaaaaaaaaaaaaaaaaaaaaaaaaaaaaaaaaaaaaaaaaaaaaaaaaaaaaaaaaaaaaaaaaaaaaaaaaaaaaaaaaaaaaaaaaaaaaaaaa

SEQ ID NO: 24636 - RNA, 4035 nt, Artificial Sequence
  SARS-CoV-2/Wuhan/WIV05/2019__EPI_ISL_402128 spike protein mRNA gc (1-1273)(K986P_V987P_ D614G)
aggagaaagcuuaccauguucguguuccugguccuccugccccuggugagcucccagugcgugaaccucaccacccgcacgcagcugccgcccgccuacaccaacagcuucacccggggcgucuacuaccccgacaagguguuccgcuccagcgugcugcacuccacccaggaccucuuccugcccuucuucagcaacgucacgugguuccacgccauccacguguccgggaccaacggcaccaagcgguucgacaacccggugcugcccuucaacgacggggucuacuucgcgagcaccgagaaguccaacaucauccgcggcuggaucuucgggacgacccucgacagcaagacccagucccugcugaucgugaacaacgccaccaacguggucaucaaggugugcgaguuccaguucugcaacgaccccuuccucggcguguacuaccacaagaacaacaagagcuggauggaguccgaguuccgggucuacagcuccgccaacaacugcacguucgaguacgugagccagcccuuccugauggaccuggagggcaagcaggggaacuucaagaaccuccgcgaguucguguucaagaacaucgacggcuacuucaagaucuacuccaagcacaccccgaucaaccugguccgggaccugccccagggguucagcgcccucgagccccugguggaccugcccaucggcaucaacaucacccgcuuccagacccuccuggcccugcaccgguccuaccucacgccgggggacagcagcuccggcuggaccgcgggcgccgccgccuacuacgugggguaccugcagccccgcaccuuccugcucaaguacaacgagaacggcaccaucacggacgcggucgacugcgcccuggacccccugagcgagaccaagugcacccucaaguccuucaccguggagaaggggaucuaccagacgagcaacuuccgggugcagcccaccgaguccaucguccgcuucccgaacaucaccaaccugugccccuucggcgagguguucaacgccacccgguucgccagcgucuacgccuggaaccgcaagcggaucuccaacugcguggcggacuacagcgugcuguacaacuccgccagcuucuccacguucaagugcuacggcgucagccccaccaagcucaacgaccugugcuucaccaacguguacgccgacuccuucgugauccgcggggacgagguccggcagaucgcccccggccagaccgggaagaucgccgacuacaacuacaagcugccggacgacuucacgggcugcgugaucgcguggaacagcaacaaccucgacuccaaggucgggggcaacuacaacuaccuguaccgccuguuccgcaagagcaaccucaagcccuucgagcgggacaucuccaccgagaucuaccaggccggcagcacccccugcaacgggguggagggcuucaacugcuacuucccccugcaguccuacggguuccagccgaccaacggcgugggguaccagcccuaccggguggucgugcugagcuucgagcuccugcacgcccccgccacggugugcggccccaagaaguccaccaaccuggucaagaacaagugcgugaacuucaacuucaacggccucaccgggaccggcgugcugaccgagagcaacaagaaguuccugccguuccagcaguucgggcgcgacaucgccgacacgaccgacgcgguccgcgacccccagacccuggagauccucgacaucacccccugcagcuucggcgggguguccgugaucacgccgggcaccaacaccagcaaccaggucgccgugcuguaccagggcgugaacugcaccgagguccccguggccauccacgccgaccagcugacgcccaccuggcggguguacuccaccgggagcaacgucuuccagacccgcgccggcugccucaucggggcggagcacgugaacaacuccuacgagugcgacauccccaucggcgccggcaucugcgccagcuaccagacgcagaccaacuccccgcggcgcgcccggagcguggcgucccagagcaucaucgccuacaccaugucccugggggccgagaacagcgucgccuacuccaacaacagcaucgccauccccaccaacuucacgaucuccgugaccaccgagauccugcccgugagcaugaccaagacgagcgucgacugcaccauguacaucugcggcgacuccaccgagugcagcaaccuccugcugcaguacggguccuucugcacccagcucaaccgcgcgcugacgggcaucgccguggagcaggacaagaacacccaggagguguucgcccaggucaagcagaucuacaagacgcccccgaucaaggacuucgggggcuucaacuucagccagauccugcccgaccccuccaagcccagcaagcgguccuucaucgaggaccuccuguucaacaaggugacccuggccgacgccggcuucaucaagcaguacggggacugccucggcgacaucgcggcccgcgaccugaucugcgcccagaaguucaacgggcugaccgugcucccgccccugcugaccgacgagaugaucgcccaguacaccagcgcccuccuggcgggcaccaucacguccggguggaccuucggcgccggcgccgcccugcagauccccuucgcgaugcagauggccuaccgguucaacgggaucggcgucacccagaacgugcucuacgagaaccagaagcugaucgccaaccaguucaacagcgccaucgggaagauccaggacucccugagcuccaccgccagcgcgcucggcaagcugcaggacguggucaaccagaacgcccaggcccugaacacgcucgugaagcagcuguccagcaacuucggggccaucuccagcgugcugaacgacauccucucccgccuggacccgcccgaggccgagguccagaucgaccggcugaucaccggccgccuccagagccugcagaccuacgugacccagcagcugauccgggcggccgagauccgcgccagcgccaaccucgccgcgaccaagauguccgagugcgugcugggccagagcaagcgggucgacuucugcgggaagggcuaccaccugauguccuucccccagagcgcgccccacggggugguguuccuccacgucacguacgugcccgcccaggagaagaacuucaccaccgccccggccaucugccacgacggcaaggcccacuucccccgcgagggggucuucguguccaacggcacccacugguucgugacgcagcggaacuucuacgagccccagaucaucaccaccgacaacaccuucgucagcggcaacugcgacguggugaucgggaucgucaacaacacgguguacgacccccugcagccggagcuggacuccuucaaggaggagcucgacaaguacuucaagaaccacaccagccccgacguggaccugggcgacaucuccgggaucaacgccagcgucgugaacauccagaaggagaucgaccgccugaacgagguggccaagaaccucaacgagucccugaucgaccugcaggagcucggcaaguacgagcaguacaucaaguggcccugguacaucuggcugggcuucaucgccgggcugaucgcgaucgucauggugaccaucaugcucugcugcaugaccagcugcugcuccugccugaagggcugcugcagcugcggguccugcugcaaguucgacgaggacgacagcgagccggugcugaagggcgucaagcuccacuacacgugaggacuaguuauaagacugacuagcccgaugggccucccaacgggcccuccuccccuccuugcaccgagagaucucaaaggcucuuuucagagccaccaaaaaaaaaaaaaaaaaaaaaaaaaaaaaaaaaaaaaaaaaaaaaaaaaaaaaaaaaaaaaaaaaaaaaaaaaaaaaaaaaaaaaaaaaaaaaaaaaaaaa

SEQ ID NO: 24637 - RNA, 4035 nt, Artificial Sequence
  SARS-CoV-2/Wuhan/WIV05/2019__EPI_ISL_402128 spike protein mRNA gc (1-1273)(K986P_V987P_A222V_D614G)
aggagaaagcuuaccauguucguguuccugguccuccugccccuggugagcucccagugcgugaaccucaccacccgcacgcagcugccgcccgccuacaccaacagcuucacccggggcgucuacuaccccgacaagguguuccgcuccagcgugcugcacuccacccaggaccucuuccugcccuucuucagcaacgucacgugguuccacgccauccacguguccgggaccaacggcaccaagcgguucgacaacccggugcugcccuucaacgacggggucuacuucgcgagcaccgagaaguccaacaucauccgcggcuggaucuucgggacgacccucgacagcaagacccagucccugcugaucgugaacaacgccaccaacguggucaucaaggugugcgaguuccaguucugcaacgaccccuuccucggcguguacuaccacaagaacaacaagagcuggauggaguccgaguuccgggucuacagcuccgccaacaacugcacguucgaguacgugagccagcccuuccugauggaccuggagggcaagcaggggaacuucaagaaccuccgcgaguucguguucaagaacaucgacggcuacuucaagaucuacuccaagcacaccccgaucaaccugguccgggaccugccccagggguucagcgugcucgagccccugguggaccugcccaucggcaucaacaucacccgcuuccagacccuccuggcccugcaccgguccuaccucacgccgggggacagcagcuccggcuggaccgccggcgcggccgccuacuacgucggguaccugcagccccgcaccuuccugcucaaguacaacgagaacggcaccaucacggacgccguggacugcgcgcuggacccccugagcgagaccaagugcacccucaaguccuucaccguggagaaggggaucuaccagacgagcaacuuccggguccagcccaccgaguccaucgugcgcuucccgaacaucaccaaccugugccccuucggcgaggucuucaacgccacccgguucgccagcguguacgccuggaaccgcaagcggaucuccaacugcguggccgacuacagcguccuguacaacuccgcgagcuucuccacguucaagugcuacggcgugagccccaccaagcucaacgaccugugcuucaccaacguguacgccgacuccuucgucauccgcggggacgaggugcggcagaucgcccccggccagaccgggaagaucgccgacuacaacuacaagcugccggacgacuucacgggcugcgugaucgccuggaacagcaacaaccucgacuccaaggucgggggcaacuacaacuaccuguaccgccuguuccgcaagagcaaccucaagcccuucgagcgggacaucuccaccgagaucuaccaggcgggcagcacccccugcaacgggguggagggcuucaacugcuacuucccccugcaguccuacggguuccagccgaccaacggcgugggguaccagcccuaccgggucguggugcugagcuucgagcuccugcacgcccccgccacggucugcggccccaagaaguccaccaaccuggugaagaacaagugcgugaacuucaacuucaacggccucaccgggaccggcguccugaccgagagcaacaagaaguuccugccguuccagcaguucgggcgcgacaucgccgacacgaccgacgccgugcgcgacccccagacccuggagauccucgacaucacccccugcagcuucggcgggguguccgucaucacgccgggcaccaacaccagcaaccagguggcggugcuguaccagggcgucaacugcaccgaggugcccguggccauccacgccgaccagcugacgcccaccuggcgggucuacuccaccgggagcaacguguuccagacccgcgccggcugccucaucggggccgagcacgugaacaacuccuacgagugcgacauccccaucggcgcgggcaucugcgccagcuaccagacgcagaccaacuccccgcggcgcgcccggagcgucgccucccagagcaucaucgcguacaccaugucccugggggccgagaacagcguggccuacuccaacaacagcaucgccauccccaccaacuucacgaucuccgugaccaccgagauccugcccgucagcaugaccaagacgagcguggacugcaccauguacaucugcggcgacuccaccgagugcagcaaccuccugcugcaguacggguccuucugcacccagcucaaccgcgcccugacgggcaucgcgguggagcaggacaagaacacccaggaggucuucgcccaggugaagcagaucuacaagacgcccccgaucaaggacuucgggggcuucaacuucagccagauccugcccgaccccuccaagcccagcaagcgguccuucaucgaggaccuccuguucaacaaggugacccuggccgacgccggcuucaucaagcaguacggggacugccucggcgacaucgccgcgcgcgaccugaucugcgcccagaaguucaacgggcugaccguccucccgccccugcugaccgacgagaugaucgcccaguacaccagcgcccuccuggccggcaccaucacguccggguggaccuucggcgcgggcgccgcccugcagauccccuucgccaugcagauggcguaccgguucaacgggaucggcgugacccagaacgugcucuacgagaaccagaagcugaucgccaaccaguucaacagcgccaucgggaagauccaggacucccugagcuccaccgccagcgcccucggcaagcugcaggacgucgugaaccagaacgcgcaggcccugaacacgcucgugaagcagcuguccagcaacuucggggccaucuccagcguccugaacgacauccucucccgccuggacccgcccgaggccgaggugcagaucgaccggcugaucaccggccgccuccagagccugcagaccuacgugacccagcagcugauccgggccgcggagauccgcgccagcgccaaccucgccgccaccaagauguccgagugcguccugggccagagcaagcggguggacuucugcgggaagggcuaccaccugauguccuucccccagagcgcgccccacgggguggucuuccuccacgugacguacguccccgcccaggagaagaacuucaccaccgccccggccaucugccacgacggcaaggcgcacuucccccgcgaggggguguucguguccaacggcacccacugguucgucacgcagcggaacuucuacgagccccagaucaucaccaccgacaacaccuucgugagcggcaacugcgacguggucaucgggaucgugaacaacacgguguacgacccccugcagccggagcuggacuccuucaaggaggagcucgacaaguacuucaagaaccacaccagccccgacgucgaccugggcgacaucuccgggaucaacgccagcguggugaacauccagaaggagaucgaccgccugaacgaggucgccaagaaccucaacgagucccugaucgaccugcaggagcucggcaaguacgagcaguacaucaaguggcccugguacaucuggcugggcuucaucgccgggcugaucgccaucgugauggugaccaucaugcucugcugcaugaccagcugcugcuccugccugaagggcugcugcagcugcggguccugcugcaaguucgacgaggacgacagcgagccgguccugaagggcgugaagcuccacuacacgugaggacuaguuauaagacugacuagcccgaugggccucccaacgggcccuccuccccuccuugcaccgagagaucucaaaggcucuuuucagagccaccaaaaaaaaaaaaaaaaaaaaaaaaaaaaaaaaaaaaaaaaaaaaaaaaaaaaaaaaaaaaaaaaaaaaaaaaaaaaaaaaaaaaaaaaaaaaaaaaaaaaa

SEQ ID NO: 24638 - RNA, 4035 nt, Artificial Sequence
  SARS-CoV-2/Wuhan/WIV05/2019__EPI_ISL_402128 spike protein mRNA gc (1-1273)(K986P_V987P_N439K_D614G)
aggagaaagcuuaccauguucguguuccugguccuccugccccuggugagcucccagugcgugaaccucaccacccgcacgcagcugccgcccgccuacaccaacagcuucacccggggcgucuacuaccccgacaagguguuccgcuccagcgugcugcacuccacccaggaccucuuccugcccuucuucagcaacgucacgugguuccacgccauccacguguccgggaccaacggcaccaagcgguucgacaacccggugcugcccuucaacgacggggucuacuucgcgagcaccgagaaguccaacaucauccgcggcuggaucuucgggacgacccucgacagcaagacccagucccugcugaucgugaacaacgccaccaacguggucaucaaggugugcgaguuccaguucugcaacgaccccuuccucggcguguacuaccacaagaacaacaagagcuggauggaguccgaguuccgggucuacagcuccgccaacaacugcacguucgaguacgugagccagcccuuccugauggaccuggagggcaagcaggggaacuucaagaaccuccgcgaguucguguucaagaacaucgacggcuacuucaagaucuacuccaagcacaccccgaucaaccugguccgggaccugccccagggguucagcgcccucgagccccugguggaccugcccaucggcaucaacaucacccgcuuccagacccuccuggcccugcaccgguccuaccucacgccgggggacagcagcuccggcuggaccgcgggcgccgccgccuacuacgugggguaccugcagccccgcaccuuccugcucaaguacaacgagaacggcaccaucacggacgcggucgacugcgcccuggacccccugagcgagaccaagugcacccucaaguccuucaccguggagaaggggaucuaccagacgagcaacuuccgggugcagcccaccgaguccaucguccgcuucccgaacaucaccaaccugugccccuucggcgagguguucaacgccacccgguucgccagcgucuacgccuggaaccgcaagcggaucuccaacugcguggcggacuacagcgugcuguacaacuccgccagcuucuccacguucaagugcuacggcgucagccccaccaagcucaacgaccugugcuucaccaacguguacgccgacuccuucgugauccgcggggacgagguccggcagaucgcccccggccagaccgggaagaucgccgacuacaacuacaagcugccggacgacuucacgggcugcgugaucgcguggaacagcaagaaccucgacuccaaggucgggggcaacuacaacuaccuguaccgccuguuccgcaagagcaaccucaagcccuucgagcgggacaucuccaccgagaucuaccaggccggcagcacccccugcaacgggguggagggcuucaacugcuacuucccccugcaguccuacggguuccagccgaccaacggcgugggguaccagcccuaccggguggucgugcugagcuucgagcuccugcacgcccccgccacggugugcggccccaagaaguccaccaaccuggucaagaacaagugcgugaacuucaacuucaacggccucaccgggaccggcgugcugaccgagagcaacaagaaguuccugccguuccagcaguucgggcgcgacaucgccgacacgaccgacgcgguccgcgacccccagacccuggagauccucgacaucacccccugcagcuucggcgggguguccgugaucacgccgggcaccaacaccagcaaccaggucgccgugcuguaccagggcgugaacugcaccgagguccccguggccauccacgccgaccagcugacgcccaccuggcggguguacuccaccgggagcaacgucuuccagacccgcgccggcugccucaucggggcggagcacgugaacaacuccuacgagugcgacauccccaucggcgccggcaucugcgccagcuaccagacgcagaccaacuccccgcggcgcgcccggagcguggcgucccagagcaucaucgccuacaccaugucccugggggccgagaacagcgucgccuacuccaacaacagcaucgccauccccaccaacuucacgaucuccgugaccaccgagauccugcccgugagcaugaccaagacgagcgucgacugcaccauguacaucugcggcgacuccaccgagugcagcaaccuccugcugcaguacggguccuucugcacccagcucaaccgcgcgcugacgggcaucgccguggagcaggacaagaacacccaggagguguucgcccaggucaagcagaucuacaagacgcccccgaucaaggacuucgggggcuucaacuucagccagauccugcccgaccccuccaagcccagcaagcgguccuucaucgaggaccuccuguucaacaaggugacccuggccgacgccggcuucaucaagcaguacggggacugccucggcgacaucgcggcccgcgaccugaucugcgcccagaaguucaacgggcugaccgugcucccgccccugcugaccgacgagaugaucgcccaguacaccagcgcccuccuggcgggcaccaucacguccggguggaccuucggcgccggcgccgcccugcagauccccuucgcgaugcagauggccuaccgguucaacgggaucggcgucacccagaacgugcucuacgagaaccagaagcugaucgccaaccaguucaacagcgccaucgggaagauccaggacucccugagcuccaccgccagcgcgcucggcaagcugcaggacguggucaaccagaacgcccaggcccugaacacgcucgugaagcagcuguccagcaacuucggggccaucuccagcgugcugaacgacauccucucccgccuggacccgcccgaggccgagguccagaucgaccggcugaucaccggccgccuccagagccugcagaccuacgugacccagcagcugauccgggcggccgagauccgcgccagcgccaaccucgccgcgaccaagauguccgagugcgugcugggccagagcaagcgggucgacuucugcgggaagggcuaccaccugauguccuucccccagagcgcgccccacggggugguguuccuccacgucacguacgugcccgcccaggagaagaacuucaccaccgccccggccaucugccacgacggcaaggcccacuucccccgcgagggggucuucguguccaacggcacccacugguucgugacgcagcggaacuucuacgagccccagaucaucaccaccgacaacaccuucgucagcggcaacugcgacguggugaucgggaucgucaacaacacgguguacgacccccugcagccggagcuggacuccuucaaggaggagcucgacaaguacuucaagaaccacaccagccccgacguggaccugggcgacaucuccgggaucaacgccagcgucgugaacauccagaaggagaucgaccgccugaacgagguggccaagaaccucaacgagucccugaucgaccugcaggagcucggcaaguacgagcaguacaucaaguggcccugguacaucuggcugggcuucaucgccgggcugaucgcgaucgucauggugaccaucaugcucugcugcaugaccagcugcugcuccugccugaagggcugcugcagcugcggguccugcugcaaguucgacgaggacgacagcgagccggugcugaagggcgucaagcuccacuacacgugaggacuaguuauaagacugacuagcccgaugggccucccaacgggcccuccuccccuccuugcaccgagagaucucaaaggcucuuuucagagccaccaaaaaaaaaaaaaaaaaaaaaaaaaaaaaaaaaaaaaaaaaaaaaaaaaaaaaaaaaaaaaaaaaaaaaaaaaaaaaaaaaaaaaaaaaaaaaaaaaaaaa

SEQ ID NO: 24639 - RNA, 4035 nt, Artificial Sequence
  SARS-CoV-2/Wuhan/WIV05/2019__EPI_ISL_402128 spike protein mRNA gc (1-1273)(K986P_V987P_S477N_D614G)
aggagaaagcuuaccauguucguguuccugguccuccugccccuggugagcucccagugcgugaaccucaccacccgcacgcagcugccgcccgccuacaccaacagcuucacccggggcgucuacuaccccgacaagguguuccgcuccagcgugcugcacuccacccaggaccucuuccugcccuucuucagcaacgucacgugguuccacgccauccacguguccgggaccaacggcaccaagcgguucgacaacccggugcugcccuucaacgacggggucuacuucgcgagcaccgagaaguccaacaucauccgcggcuggaucuucgggacgacccucgacagcaagacccagucccugcugaucgugaacaacgccaccaacguggucaucaaggugugcgaguuccaguucugcaacgaccccuuccucggcguguacuaccacaagaacaacaagagcuggauggaguccgaguuccgggucuacagcuccgccaacaacugcacguucgaguacgugagccagcccuuccugauggaccuggagggcaagcaggggaacuucaagaaccuccgcgaguucguguucaagaacaucgacggcuacuucaagaucuacuccaagcacaccccgaucaaccugguccgggaccugccccagggguucagcgcccucgagccccugguggaccugcccaucggcaucaacaucacccgcuuccagacccuccuggcccugcaccgguccuaccucacgccgggggacagcagcuccggcuggaccgcgggcgccgccgccuacuacgugggguaccugcagccccgcaccuuccugcucaaguacaacgagaacggcaccaucacggacgcggucgacugcgcccuggacccccugagcgagaccaagugcacccucaaguccuucaccguggagaaggggaucuaccagacgagcaacuuccgggugcagcccaccgaguccaucguccgcuucccgaacaucaccaaccugugccccuucggcgagguguucaacgccacccgguucgccagcgucuacgccuggaaccgcaagcggaucuccaacugcguggcggacuacagcgugcuguacaacuccgccagcuucuccacguucaagugcuacggcgucagccccaccaagcucaacgaccugugcuucaccaacguguacgccgacuccuucgugauccgcggggacgagguccggcagaucgcccccggccagaccgggaagaucgccgacuacaacuacaagcugccggacgacuucacgggcugcgugaucgcguggaacagcaacaaccucgacuccaaggucgggggcaacuacaacuaccuguaccgccuguuccgcaagagcaaccucaagcccuucgagcgggacaucuccaccgagaucuaccaggccggcaacacccccugcaacgggguggagggcuucaacugcuacuucccccugcagagcuacggguuccagccgaccaacggcgugggguaccagcccuaccggguggucgugcuguccuucgagcuccugcacgcccccgccacggugugcggccccaagaaguccaccaaccuggucaagaacaagugcgugaacuucaacuucaacggccucaccgggaccggcgugcugaccgagagcaacaagaaguuccugccguuccagcaguucgggcgcgacaucgccgacacgaccgacgcgguccgcgacccccagacccuggagauccucgacaucacccccugcagcuucggcggggugagcgugaucacgccgggcaccaacaccuccaaccaggucgccgugcuguaccagggcgugaacugcaccgagguccccguggccauccacgccgaccagcugacgcccaccuggcggguguacagcaccggguccaacgucuuccagacccgcgccggcugccucaucggggcggagcacgugaacaacagcuacgagugcgacauccccaucggcgccggcaucugcgccuccuaccagacgcagaccaacagcccgcggcgcgcccgguccguggcgagccaguccaucaucgccuacaccaugagccugggggccgagaacuccgucgccuacagcaacaacuccaucgccauccccaccaacuucacgaucagcgugaccaccgagauccugcccguguccaugaccaagacgagcgucgacugcaccauguacaucugcggcgacagcaccgagugcuccaaccuccugcugcaguacgggagcuucugcacccagcucaaccgcgcgcugacgggcaucgccguggagcaggacaagaacacccaggagguguucgcccaggucaagcagaucuacaagacgcccccgaucaaggacuucgggggcuucaacuucucccagauccugcccgaccccagcaagcccuccaagcggagcuucaucgaggaccuccuguucaacaaggugacccuggccgacgccggcuucaucaagcaguacggggacugccucggcgacaucgcggcccgcgaccugaucugcgcccagaaguucaacgggcugaccgugcucccgccccugcugaccgacgagaugaucgcccaguacaccuccgcccuccuggcgggcaccaucacgagcggguggaccuucggcgccggcgccgcccugcagauccccuucgcgaugcagauggccuaccgguucaacgggaucggcgucacccagaacgugcucuacgagaaccagaagcugaucgccaaccaguucaacuccgccaucgggaagauccaggacagccuguccagcaccgccuccgcgcucggcaagcugcaggacguggucaaccagaacgcccaggcccugaacacgcucgugaagcagcugagcuccaacuucggggccaucagcuccgugcugaacgacauccucagccgccuggacccgcccgaggccgagguccagaucgaccggcugaucaccggccgccuccagucccugcagaccuacgugacccagcagcugauccgggcggccgagauccgcgccagcgccaaccucgccgcgaccaagaugagcgagugcgugcugggccaguccaagcgggucgacuucugcgggaagggcuaccaccugaugagcuucccccaguccgcgccccacggggugguguuccuccacgucacguacgugcccgcccaggagaagaacuucaccaccgccccggccaucugccacgacggcaaggcccacuucccccgcgagggggucuucgugagcaacggcacccacugguucgugacgcagcggaacuucuacgagccccagaucaucaccaccgacaacaccuucgucuccggcaacugcgacguggugaucgggaucgucaacaacacgguguacgacccccugcagccggagcuggacagcuucaaggaggagcucgacaaguacuucaagaaccacaccucccccgacguggaccugggcgacaucagcgggaucaacgccuccgucgugaacauccagaaggagaucgaccgccugaacgagguggccaagaaccucaacgagagccugaucgaccugcaggagcucggcaaguacgagcaguacaucaaguggcccugguacaucuggcugggcuucaucgccgggcugaucgcgaucgucauggugaccaucaugcucugcugcaugaccuccugcugcagcugccugaagggcugcugcuccugcgggagcugcugcaaguucgacgaggacgacuccgagccggugcugaagggcgucaagcuccacuacacgugaggacuaguuauaagacugacuagcccgaugggccucccaacgggcccuccuccccuccuugcaccgagagaucucaaaggcucuuuucagagccaccaaaaaaaaaaaaaaaaaaaaaaaaaaaaaaaaaaaaaaaaaaaaaaaaaaaaaaaaaaaaaaaaaaaaaaaaaaaaaaaaaaaaaaaaaaaaaaaaaaaaa

SEQ ID NO: 24640 - RNA, 4035 nt, Artificial Sequence
  SARS-CoV-2/Wuhan/WIV05/2019__EPI_ISL_402128 spike protein mRNA gc (1-1273)(K986P_V987P_N501Y_D614G)
aggagaaagcuuaccauguucguguuccugguccuccugccccuggugagcucccagugcgugaaccucaccacccgcacgcagcugccgcccgccuacaccaacagcuucacccggggcgucuacuaccccgacaagguguuccgcuccagcgugcugcacuccacccaggaccucuuccugcccuucuucagcaacgucacgugguuccacgccauccacguguccgggaccaacggcaccaagcgguucgacaacccggugcugcccuucaacgacggggucuacuucgcgagcaccgagaaguccaacaucauccgcggcuggaucuucgggacgacccucgacagcaagacccagucccugcugaucgugaacaacgccaccaacguggucaucaaggugugcgaguuccaguucugcaacgaccccuuccucggcguguacuaccacaagaacaacaagagcuggauggaguccgaguuccgggucuacagcuccgccaacaacugcacguucgaguacgugagccagcccuuccugauggaccuggagggcaagcaggggaacuucaagaaccuccgcgaguucguguucaagaacaucgacggcuacuucaagaucuacuccaagcacaccccgaucaaccugguccgggaccugccccagggguucagcgcccucgagccccugguggaccugcccaucggcaucaacaucacccgcuuccagacccuccuggcccugcaccgguccuaccucacgccgggggacagcagcuccggcuggaccgcgggcgccgccgccuacuacgugggguaccugcagccccgcaccuuccugcucaaguacaacgagaacggcaccaucacggacgcggucgacugcgcccuggacccccugagcgagaccaagugcacccucaaguccuucaccguggagaaggggaucuaccagacgagcaacuuccgggugcagcccaccgaguccaucguccgcuucccgaacaucaccaaccugugccccuucggcgagguguucaacgccacccgguucgccagcgucuacgccuggaaccgcaagcggaucuccaacugcguggcggacuacagcgugcuguacaacuccgccagcuucuccacguucaagugcuacggcgucagccccaccaagcucaacgaccugugcuucaccaacguguacgccgacuccuucgugauccgcggggacgagguccggcagaucgcccccggccagaccgggaagaucgccgacuacaacuacaagcugccggacgacuucacgggcugcgugaucgcguggaacagcaacaaccucgacuccaaggucgggggcaacuacaacuaccuguaccgccuguuccgcaagagcaaccucaagcccuucgagcgggacaucuccaccgagaucuaccaggccggcagcacccccugcaacgggguggagggcuucaacugcuacuucccccugcaguccuacggguuccagccgaccuacggcgugggguaccagcccuaccggguggucgugcugagcuucgagcuccugcacgcccccgccacggugugcggccccaagaaguccaccaaccuggucaagaacaagugcgugaacuucaacuucaacggccucaccgggaccggcgugcugaccgagagcaacaagaaguuccugccguuccagcaguucgggcgcgacaucgccgacacgaccgacgcgguccgcgacccccagacccuggagauccucgacaucacccccugcagcuucggcgggguguccgugaucacgccgggcaccaacaccagcaaccaggucgccgugcuguaccagggcgugaacugcaccgagguccccguggccauccacgccgaccagcugacgcccaccuggcggguguacuccaccgggagcaacgucuuccagacccgcgccggcugccucaucggggcggagcacgugaacaacuccuacgagugcgacauccccaucggcgccggcaucugcgccagcuaccagacgcagaccaacuccccgcggcgcgcccggagcguggcgucccagagcaucaucgccuacaccaugucccugggggccgagaacagcgucgccuacuccaacaacagcaucgccauccccaccaacuucacgaucuccgugaccaccgagauccugcccgugagcaugaccaagacgagcgucgacugcaccauguacaucugcggcgacuccaccgagugcagcaaccuccugcugcaguacggguccuucugcacccagcucaaccgcgcgcugacgggcaucgccguggagcaggacaagaacacccaggagguguucgcccaggucaagcagaucuacaagacgcccccgaucaaggacuucgggggcuucaacuucagccagauccugcccgaccccuccaagcccagcaagcgguccuucaucgaggaccuccuguucaacaaggugacccuggccgacgccggcuucaucaagcaguacggggacugccucggcgacaucgcggcccgcgaccugaucugcgcccagaaguucaacgggcugaccgugcucccgccccugcugaccgacgagaugaucgcccaguacaccagcgcccuccuggcgggcaccaucacguccggguggaccuucggcgccggcgccgcccugcagauccccuucgcgaugcagauggccuaccgguucaacgggaucggcgucacccagaacgugcucuacgagaaccagaagcugaucgccaaccaguucaacagcgccaucgggaagauccaggacucccugagcuccaccgccagcgcgcucggcaagcugcaggacguggucaaccagaacgcccaggcccugaacacgcucgugaagcagcuguccagcaacuucggggccaucuccagcgugcugaacgacauccucucccgccuggacccgcccgaggccgagguccagaucgaccggcugaucaccggccgccuccagagccugcagaccuacgugacccagcagcugauccgggcggccgagauccgcgccagcgccaaccucgccgcgaccaagauguccgagugcgugcugggccagagcaagcgggucgacuucugcgggaagggcuaccaccugauguccuucccccagagcgcgccccacggggugguguuccuccacgucacguacgugcccgcccaggagaagaacuucaccaccgccccggccaucugccacgacggcaaggcccacuucccccgcgagggggucuucguguccaacggcacccacugguucgugacgcagcggaacuucuacgagccccagaucaucaccaccgacaacaccuucgucagcggcaacugcgacguggugaucgggaucgucaacaacacgguguacgacccccugcagccggagcuggacuccuucaaggaggagcucgacaaguacuucaagaaccacaccagccccgacguggaccugggcgacaucuccgggaucaacgccagcgucgugaacauccagaaggagaucgaccgccugaacgagguggccaagaaccucaacgagucccugaucgaccugcaggagcucggcaaguacgagcaguacaucaaguggcccugguacaucuggcugggcuucaucgccgggcugaucgcgaucgucauggugaccaucaugcucugcugcaugaccagcugcugcuccugccugaagggcugcugcagcugcggguccugcugcaaguucgacgaggacgacagcgagccggugcugaagggcgucaagcuccacuacacgugaggacuaguuauaagacugacuagcccgaugggccucccaacgggcccuccuccccuccuugcaccgagagaucucaaaggcucuuuucagagccaccaaaaaaaaaaaaaaaaaaaaaaaaaaaaaaaaaaaaaaaaaaaaaaaaaaaaaaaaaaaaaaaaaaaaaaaaaaaaaaaaaaaaaaaaaaaaaaaaaaaaa

SEQ ID NO: 24641 - RNA, 4029 nt, Artificial Sequence
  SARS-CoV-2/Wuhan/WIV05/2019__EPI_ISL_402128 spike protein mRNA gc (1-1273)(K986P_V987P_H69del_V70del_D614G)
aggagaaagcuuaccauguucguguuccugguccuccugccccuggugagcucccagugcgugaaccucaccacccgcacgcagcugccgcccgccuacaccaacagcuucacccggggcgucuacuaccccgacaagguguuccgcuccagcgugcugcacuccacccaggaccucuuccugcccuucuucagcaacgucacgugguuccacgccaucuccgggaccaacggcaccaagcgguucgacaacccggugcugcccuucaacgacgggguguacuucgcgagcaccgagaaguccaacaucauccgcggcuggaucuucgggacgacccucgacagcaagacccagucccugcugaucgucaacaacgccaccaacguggugaucaaggucugcgaguuccaguucugcaacgaccccuuccucggcguguacuaccacaagaacaacaagagcuggauggaguccgaguuccggguguacagcuccgccaacaacugcacguucgaguacgucagccagcccuuccugauggaccuggagggcaagcaggggaacuucaagaaccuccgcgaguucguguucaagaacaucgacggcuacuucaagaucuacuccaagcacaccccgaucaaccuggugcgggaccugccccagggguucagcgcccucgagccccuggucgaccugcccaucggcaucaacaucacccgcuuccagacccuccuggcccugcaccgguccuaccucacgccgggggacagcagcuccggcuggaccgcgggcgccgccgccuacuacgugggguaccugcagccccgcaccuuccugcucaaguacaacgagaacggcaccaucacggacgcgguggacugcgcccuggacccccugagcgagaccaagugcacccucaaguccuucaccgucgagaaggggaucuaccagacgagcaacuuccgggugcagcccaccgaguccaucgugcgcuucccgaacaucaccaaccugugccccuucggcgaggucuucaacgccacccgguucgccagcguguacgccuggaaccgcaagcggaucuccaacugcgucgcggacuacagcgugcuguacaacuccgccagcuucuccacguucaagugcuacggcgugagccccaccaagcucaacgaccugugcuucaccaacgucuacgccgacuccuucgugauccgcggggacgaggugcggcagaucgcccccggccagaccgggaagaucgccgacuacaacuacaagcugccggacgacuucacgggcugcgucaucgcguggaacagcaacaaccucgacuccaaggucgggggcaacuacaacuaccuguaccgccuguuccgcaagagcaaccucaagcccuucgagcgggacaucuccaccgagaucuaccaggccggcagcacccccugcaacgggguggagggcuucaacugcuacuucccccugcaguccuacggguuccagccgaccaacggcgugggguaccagcccuaccggguggugguccugagcuucgagcuccugcacgcccccgccacggugugcggccccaagaaguccaccaaccuggugaagaacaagugcgucaacuucaacuucaacggccucaccgggaccggcgugcugaccgagagcaacaagaaguuccugccguuccagcaguucgggcgcgacaucgccgacacgaccgacgcggugcgcgacccccagacccuggagauccucgacaucacccccugcagcuucggcggggucuccgugaucacgccgggcaccaacaccagcaaccagguggccguccuguaccagggcgugaacugcaccgaggugcccgucgccauccacgccgaccagcugacgcccaccuggcggguguacuccaccgggagcaacguguuccagacccgcgccggcugccucaucggggcggagcacgucaacaacuccuacgagugcgacauccccaucggcgccggcaucugcgccagcuaccagacgcagaccaacuccccgcggcgcgcccggagcguggcgucccagagcaucaucgccuacaccaugucccugggggccgagaacagcguggccuacuccaacaacagcaucgccauccccaccaacuucacgaucuccgucaccaccgagauccugcccgugagcaugaccaagacgagcguggacugcaccauguacaucugcggcgacuccaccgagugcagcaaccuccugcugcaguacggguccuucugcacccagcucaaccgcgcgcugacgggcaucgccgucgagcaggacaagaacacccaggagguguucgcccaggugaagcagaucuacaagacgcccccgaucaaggacuucgggggcuucaacuucagccagauccugcccgaccccuccaagcccagcaagcgguccuucaucgaggaccuccuguucaacaaggucacccuggccgacgccggcuucaucaagcaguacggggacugccucggcgacaucgcggcccgcgaccugaucugcgcccagaaguucaacgggcugaccgugcucccgccccugcugaccgacgagaugaucgcccaguacaccagcgcccuccuggcgggcaccaucacguccggguggaccuucggcgccggcgccgcccugcagauccccuucgcgaugcagauggccuaccgguucaacgggaucggcgugacccagaacguccucuacgagaaccagaagcugaucgccaaccaguucaacagcgccaucgggaagauccaggacucccugagcuccaccgccagcgcgcucggcaagcugcaggacguggugaaccagaacgcccaggcccugaacacgcucgucaagcagcuguccagcaacuucggggccaucuccagcgugcugaacgacauccucucccgccuggacccgcccgaggccgaggugcagaucgaccggcugaucaccggccgccuccagagccugcagaccuacgucacccagcagcugauccgggcggccgagauccgcgccagcgccaaccucgccgcgaccaagauguccgagugcgugcugggccagagcaagcggguggacuucugcgggaagggcuaccaccugauguccuucccccagagcgcgccccacggggucguguuccuccacgugacguacguccccgcccaggagaagaacuucaccaccgccccggccaucugccacgacggcaaggcccacuucccccgcgaggggguguucgucuccaacggcacccacugguucgugacgcagcggaacuucuacgagccccagaucaucaccaccgacaacaccuucgugagcggcaacugcgacgucgugaucgggaucgugaacaacacggucuacgacccccugcagccggagcuggacuccuucaaggaggagcucgacaaguacuucaagaaccacaccagccccgacguggaccugggcgacaucuccgggaucaacgccagcguggucaacauccagaaggagaucgaccgccugaacgagguggccaagaaccucaacgagucccugaucgaccugcaggagcucggcaaguacgagcaguacaucaaguggcccugguacaucuggcugggcuucaucgccgggcugaucgcgaucgugauggucaccaucaugcucugcugcaugaccagcugcugcuccugccugaagggcugcugcagcugcggguccugcugcaaguucgacgaggacgacagcgagccggugcugaagggcgugaagcuccacuacacgugaggacuaguuauaagacugacuagcccgaugggccucccaacgggcccuccuccccuccuugcaccgagagaucucaaaggcucuuuucagagccaccaaaaaaaaaaaaaaaaaaaaaaaaaaaaaaaaaaaaaaaaaaaaaaaaaaaaaaaaaaaaaaaaaaaaaaaaaaaaaaaaaaaaaaaaaaaaaaaaaaaaa

SEQ ID NO: 24642 - RNA, 4035 nt, Artificial Sequence
  SARS-CoV-2/Wuhan/WIV05/2019__EPI_ISL_402128 spike protein mRNA gc (1-1273)(K986P_V987P_Y453F_D614G)
aggagaaagcuuaccauguucguguuccugguccuccugccccuggugagcucccagugcgugaaccucaccacccgcacgcagcugccgcccgccuacaccaacagcuucacccggggcgucuacuaccccgacaagguguuccgcuccagcgugcugcacuccacccaggaccucuuccugcccuucuucagcaacgucacgugguuccacgccauccacguguccgggaccaacggcaccaagcgguucgacaacccggugcugcccuucaacgacggggucuacuucgcgagcaccgagaaguccaacaucauccgcggcuggaucuucgggacgacccucgacagcaagacccagucccugcugaucgugaacaacgccaccaacguggucaucaaggugugcgaguuccaguucugcaacgaccccuuccucggcguguacuaccacaagaacaacaagagcuggauggaguccgaguuccgggucuacagcuccgccaacaacugcacguucgaguacgugagccagcccuuccugauggaccuggagggcaagcaggggaacuucaagaaccuccgcgaguucguguucaagaacaucgacggcuacuucaagaucuacuccaagcacaccccgaucaaccugguccgggaccugccccagggguucagcgcccucgagccccugguggaccugcccaucggcaucaacaucacccgcuuccagacccuccuggcccugcaccgguccuaccucacgccgggggacagcagcuccggcuggaccgcgggcgccgccgccuacuacgugggguaccugcagccccgcaccuuccugcucaaguacaacgagaacggcaccaucacggacgcggucgacugcgcccuggacccccugagcgagaccaagugcacccucaaguccuucaccguggagaaggggaucuaccagacgagcaacuuccgggugcagcccaccgaguccaucguccgcuucccgaacaucaccaaccugugccccuucggcgagguguucaacgccacccgguucgccagcgucuacgccuggaaccgcaagcggaucuccaacugcguggcggacuacagcgugcuguacaacuccgccagcuucuccacguucaagugcuacggcgucagccccaccaagcucaacgaccugugcuucaccaacguguacgccgacuccuucgugauccgcggggacgagguccggcagaucgcccccggccagaccgggaagaucgccgacuacaacuacaagcugccggacgacuucacgggcugcgugaucgcguggaacagcaacaaccucgacuccaaggucgggggcaacuacaacuaccuguuccgccuguuccgcaagagcaaccucaagcccuucgagcgggacaucuccaccgagaucuaccaggccggcagcacccccugcaacgggguggagggcuucaacugcuacuucccccugcaguccuacggguuccagccgaccaacggcgugggguaccagcccuaccggguggucgugcugagcuucgagcuccugcacgcccccgccacggugugcggccccaagaaguccaccaaccuggucaagaacaagugcgugaacuucaacuucaacggccucaccgggaccggcgugcugaccgagagcaacaagaaguuccugccguuccagcaguucgggcgcgacaucgccgacacgaccgacgcgguccgcgacccccagacccuggagauccucgacaucacccccugcagcuucggcgggguguccgugaucacgccgggcaccaacaccagcaaccaggucgccgugcuguaccagggcgugaacugcaccgagguccccguggccauccacgccgaccagcugacgcccaccuggcggguguacuccaccgggagcaacgucuuccagacccgcgccggcugccucaucggggcggagcacgugaacaacuccuacgagugcgacauccccaucggcgccggcaucugcgccagcuaccagacgcagaccaacuccccgcggcgcgcccggagcguggcgucccagagcaucaucgccuacaccaugucccugggggccgagaacagcgucgccuacuccaacaacagcaucgccauccccaccaacuucacgaucuccgugaccaccgagauccugcccgugagcaugaccaagacgagcgucgacugcaccauguacaucugcggcgacuccaccgagugcagcaaccuccugcugcaguacggguccuucugcacccagcucaaccgcgcgcugacgggcaucgccguggagcaggacaagaacacccaggagguguucgcccaggucaagcagaucuacaagacgcccccgaucaaggacuucgggggcuucaacuucagccagauccugcccgaccccuccaagcccagcaagcgguccuucaucgaggaccuccuguucaacaaggugacccuggccgacgccggcuucaucaagcaguacggggacugccucggcgacaucgcggcccgcgaccugaucugcgcccagaaguucaacgggcugaccgugcucccgccccugcugaccgacgagaugaucgcccaguacaccagcgcccuccuggcgggcaccaucacguccggguggaccuucggcgccggcgccgcccugcagauccccuucgcgaugcagauggccuaccgguucaacgggaucggcgucacccagaacgugcucuacgagaaccagaagcugaucgccaaccaguucaacagcgccaucgggaagauccaggacucccugagcuccaccgccagcgcgcucggcaagcugcaggacguggucaaccagaacgcccaggcccugaacacgcucgugaagcagcuguccagcaacuucggggccaucuccagcgugcugaacgacauccucucccgccuggacccgcccgaggccgagguccagaucgaccggcugaucaccggccgccuccagagccugcagaccuacgugacccagcagcugauccgggcggccgagauccgcgccagcgccaaccucgccgcgaccaagauguccgagugcgugcugggccagagcaagcgggucgacuucugcgggaagggcuaccaccugauguccuucccccagagcgcgccccacggggugguguuccuccacgucacguacgugcccgcccaggagaagaacuucaccaccgccccggccaucugccacgacggcaaggcccacuucccccgcgagggggucuucguguccaacggcacccacugguucgugacgcagcggaacuucuacgagccccagaucaucaccaccgacaacaccuucgucagcggcaacugcgacguggugaucgggaucgucaacaacacgguguacgacccccugcagccggagcuggacuccuucaaggaggagcucgacaaguacuucaagaaccacaccagccccgacguggaccugggcgacaucuccgggaucaacgccagcgucgugaacauccagaaggagaucgaccgccugaacgagguggccaagaaccucaacgagucccugaucgaccugcaggagcucggcaaguacgagcaguacaucaaguggcccugguacaucuggcugggcuucaucgccgggcugaucgcgaucgucauggugaccaucaugcucugcugcaugaccagcugcugcuccugccugaagggcugcugcagcugcggguccugcugcaaguucgacgaggacgacagcgagccggugcugaagggcgucaagcuccacuacacgugaggacuaguuauaagacugacuagcccgaugggccucccaacgggcccuccuccccuccuugcaccgagagaucucaaaggcucuuuucagagccaccaaaaaaaaaaaaaaaaaaaaaaaaaaaaaaaaaaaaaaaaaaaaaaaaaaaaaaaaaaaaaaaaaaaaaaaaaaaaaaaaaaaaaaaaaaaaaaaaaaaaa

SEQ ID NO: 24643 - RNA, 4035 nt, Artificial Sequence
  SARS-CoV-2/Wuhan/WIV05/2019__EPI_ISL_402128 spike protein mRNA gc (1-1273)(K986P_V987P_D614G_I692V)
aggagaaagcuuaccauguucguguuccugguccuccugccccuggugagcucccagugcgugaaccucaccacccgcacgcagcugccgcccgccuacaccaacagcuucacccggggcgucuacuaccccgacaagguguuccgcuccagcgugcugcacuccacccaggaccucuuccugcccuucuucagcaacgucacgugguuccacgccauccacguguccgggaccaacggcaccaagcgguucgacaacccggugcugcccuucaacgacggggucuacuucgcgagcaccgagaaguccaacaucauccgcggcuggaucuucgggacgacccucgacagcaagacccagucccugcugaucgugaacaacgccaccaacguggucaucaaggugugcgaguuccaguucugcaacgaccccuuccucggcguguacuaccacaagaacaacaagagcuggauggaguccgaguuccgggucuacagcuccgccaacaacugcacguucgaguacgugagccagcccuuccugauggaccuggagggcaagcaggggaacuucaagaaccuccgcgaguucguguucaagaacaucgacggcuacuucaagaucuacuccaagcacaccccgaucaaccugguccgggaccugccccagggguucagcgcccucgagccccugguggaccugcccaucggcaucaacaucacccgcuuccagacccuccuggcccugcaccgguccuaccucacgccgggggacagcagcuccggcuggaccgcgggcgccgccgccuacuacgugggguaccugcagccccgcaccuuccugcucaaguacaacgagaacggcaccaucacggacgcggucgacugcgcccuggacccccugagcgagaccaagugcacccucaaguccuucaccguggagaaggggaucuaccagacgagcaacuuccgggugcagcccaccgaguccaucguccgcuucccgaacaucaccaaccugugccccuucggcgagguguucaacgccacccgguucgccagcgucuacgccuggaaccgcaagcggaucuccaacugcguggcggacuacagcgugcuguacaacuccgccagcuucuccacguucaagugcuacggcgucagccccaccaagcucaacgaccugugcuucaccaacguguacgccgacuccuucgugauccgcggggacgagguccggcagaucgcccccggccagaccgggaagaucgccgacuacaacuacaagcugccggacgacuucacgggcugcgugaucgcguggaacagcaacaaccucgacuccaaggucgggggcaacuacaacuaccuguaccgccuguuccgcaagagcaaccucaagcccuucgagcgggacaucuccaccgagaucuaccaggccggcagcacccccugcaacgggguggagggcuucaacugcuacuucccccugcaguccuacggguuccagccgaccaacggcgugggguaccagcccuaccggguggucgugcugagcuucgagcuccugcacgcccccgccacggugugcggccccaagaaguccaccaaccuggucaagaacaagugcgugaacuucaacuucaacggccucaccgggaccggcgugcugaccgagagcaacaagaaguuccugccguuccagcaguucgggcgcgacaucgccgacacgaccgacgcgguccgcgacccccagacccuggagauccucgacaucacccccugcagcuucggcgggguguccgugaucacgccgggcaccaacaccagcaaccaggucgccgugcuguaccagggcgugaacugcaccgagguccccguggccauccacgccgaccagcugacgcccaccuggcggguguacuccaccgggagcaacgucuuccagacccgcgccggcugccucaucggggcggagcacgugaacaacuccuacgagugcgacauccccaucggcgccggcaucugcgccagcuaccagacgcagaccaacuccccgcggcgcgcccggagcguggcgucccagagcgucaucgccuacaccaugucccugggggccgagaacagcguggccuacuccaacaacagcaucgccauccccaccaacuucacgaucuccgugaccaccgagauccugcccgucagcaugaccaagacgagcguggacugcaccauguacaucugcggcgacuccaccgagugcagcaaccuccugcugcaguacggguccuucugcacccagcucaaccgcgcgcugacgggcaucgccguggagcaggacaagaacacccaggaggucuucgcccaggugaagcagaucuacaagacgcccccgaucaaggacuucgggggcuucaacuucagccagauccugcccgaccccuccaagcccagcaagcgguccuucaucgaggaccuccuguucaacaaggugacccuggccgacgccggcuucaucaagcaguacggggacugccucggcgacaucgcggcccgcgaccugaucugcgcccagaaguucaacgggcugaccguccucccgccccugcugaccgacgagaugaucgcccaguacaccagcgcccuccuggcgggcaccaucacguccggguggaccuucggcgccggcgccgcccugcagauccccuucgcgaugcagauggccuaccgguucaacgggaucggcgugacccagaacgugcucuacgagaaccagaagcugaucgccaaccaguucaacagcgccaucgggaagauccaggacucccugagcuccaccgccagcgcgcucggcaagcugcaggacgucgugaaccagaacgcccaggcccugaacacgcucgugaagcagcuguccagcaacuucggggccaucuccagcguccugaacgacauccucucccgccuggacccgcccgaggccgaggugcagaucgaccggcugaucaccggccgccuccagagccugcagaccuacgugacccagcagcugauccgggcggccgagauccgcgccagcgccaaccucgccgcgaccaagauguccgagugcguccugggccagagcaagcggguggacuucugcgggaagggcuaccaccugauguccuucccccagagcgcgccccacgggguggucuuccuccacgugacguacguccccgcccaggagaagaacuucaccaccgccccggccaucugccacgacggcaaggcccacuucccccgcgaggggguguucguguccaacggcacccacugguucgucacgcagcggaacuucuacgagccccagaucaucaccaccgacaacaccuucgugagcggcaacugcgacguggucaucgggaucgugaacaacacgguguacgacccccugcagccggagcuggacuccuucaaggaggagcucgacaaguacuucaagaaccacaccagccccgacgucgaccugggcgacaucuccgggaucaacgccagcguggugaacauccagaaggagaucgaccgccugaacgaggucgccaagaaccucaacgagucccugaucgaccugcaggagcucggcaaguacgagcaguacaucaaguggcccugguacaucuggcugggcuucaucgccgggcugaucgcgaucgugauggugaccaucaugcucugcugcaugaccagcugcugcuccugccugaagggcugcugcagcugcggguccugcugcaaguucgacgaggacgacagcgagccgguccugaagggcgugaagcuccacuacacgugaggacuaguuauaagacugacuagcccgaugggccucccaacgggcccuccuccccuccuugcaccgagagaucucaaaggcucuuuucagagccaccaaaaaaaaaaaaaaaaaaaaaaaaaaaaaaaaaaaaaaaaaaaaaaaaaaaaaaaaaaaaaaaaaaaaaaaaaaaaaaaaaaaaaaaaaaaaaaaaaaaaa

SEQ ID NO: 24644 - RNA, 4035 nt, Artificial Sequence
  SARS-CoV-2/Wuhan/WIV05/2019__EPI_ISL_402128 spike protein mRNA gc (1-1273)(K986P_V987P_D614G_M1229I)
aggagaaagcuuaccauguucguguuccugguccuccugccccuggugagcucccagugcgugaaccucaccacccgcacgcagcugccgcccgccuacaccaacagcuucacccggggcgucuacuaccccgacaagguguuccgcuccagcgugcugcacuccacccaggaccucuuccugcccuucuucagcaacgucacgugguuccacgccauccacguguccgggaccaacggcaccaagcgguucgacaacccggugcugcccuucaacgacggggucuacuucgcgagcaccgagaaguccaacaucauccgcggcuggaucuucgggacgacccucgacagcaagacccagucccugcugaucgugaacaacgccaccaacguggucaucaaggugugcgaguuccaguucugcaacgaccccuuccucggcguguacuaccacaagaacaacaagagcuggauggaguccgaguuccgggucuacagcuccgccaacaacugcacguucgaguacgugagccagcccuuccugauggaccuggagggcaagcaggggaacuucaagaaccuccgcgaguucguguucaagaacaucgacggcuacuucaagaucuacuccaagcacaccccgaucaaccugguccgggaccugccccagggguucagcgcccucgagccccugguggaccugcccaucggcaucaacaucacccgcuuccagacccuccuggcccugcaccgguccuaccucacgccgggggacagcagcuccggcuggaccgcgggcgccgccgccuacuacgugggguaccugcagccccgcaccuuccugcucaaguacaacgagaacggcaccaucacggacgcggucgacugcgcccuggacccccugagcgagaccaagugcacccucaaguccuucaccguggagaaggggaucuaccagacgagcaacuuccgggugcagcccaccgaguccaucguccgcuucccgaacaucaccaaccugugccccuucggcgagguguucaacgccacccgguucgccagcgucuacgccuggaaccgcaagcggaucuccaacugcguggcggacuacagcgugcuguacaacuccgccagcuucuccacguucaagugcuacggcgucagccccaccaagcucaacgaccugugcuucaccaacguguacgccgacuccuucgugauccgcggggacgagguccggcagaucgcccccggccagaccgggaagaucgccgacuacaacuacaagcugccggacgacuucacgggcugcgugaucgcguggaacagcaacaaccucgacuccaaggucgggggcaacuacaacuaccuguaccgccuguuccgcaagagcaaccucaagcccuucgagcgggacaucuccaccgagaucuaccaggccggcagcacccccugcaacgggguggagggcuucaacugcuacuucccccugcaguccuacggguuccagccgaccaacggcgugggguaccagcccuaccggguggucgugcugagcuucgagcuccugcacgcccccgccacggugugcggccccaagaaguccaccaaccuggucaagaacaagugcgugaacuucaacuucaacggccucaccgggaccggcgugcugaccgagagcaacaagaaguuccugccguuccagcaguucgggcgcgacaucgccgacacgaccgacgcgguccgcgacccccagacccuggagauccucgacaucacccccugcagcuucggcgggguguccgugaucacgccgggcaccaacaccagcaaccaggucgccgugcuguaccagggcgugaacugcaccgagguccccguggccauccacgccgaccagcugacgcccaccuggcggguguacuccaccgggagcaacgucuuccagacccgcgccggcugccucaucggggcggagcacgugaacaacuccuacgagugcgacauccccaucggcgccggcaucugcgccagcuaccagacgcagaccaacuccccgcggcgcgcccggagcguggcgucccagagcaucaucgccuacaccaugucccugggggccgagaacagcgucgccuacuccaacaacagcaucgccauccccaccaacuucacgaucuccgugaccaccgagauccugcccgugagcaugaccaagacgagcgucgacugcaccauguacaucugcggcgacuccaccgagugcagcaaccuccugcugcaguacggguccuucugcacccagcucaaccgcgcgcugacgggcaucgccguggagcaggacaagaacacccaggagguguucgcccaggucaagcagaucuacaagacgcccccgaucaaggacuucgggggcuucaacuucagccagauccugcccgaccccuccaagcccagcaagcgguccuucaucgaggaccuccuguucaacaaggugacccuggccgacgccggcuucaucaagcaguacggggacugccucggcgacaucgcggcccgcgaccugaucugcgcccagaaguucaacgggcugaccgugcucccgccccugcugaccgacgagaugaucgcccaguacaccagcgcccuccuggcgggcaccaucacguccggguggaccuucggcgccggcgccgcccugcagauccccuucgcgaugcagauggccuaccgguucaacgggaucggcgucacccagaacgugcucuacgagaaccagaagcugaucgccaaccaguucaacagcgccaucgggaagauccaggacucccugagcuccaccgccagcgcgcucggcaagcugcaggacguggucaaccagaacgcccaggcccugaacacgcucgugaagcagcuguccagcaacuucggggccaucuccagcgugcugaacgacauccucucccgccuggacccgcccgaggccgagguccagaucgaccggcugaucaccggccgccuccagagccugcagaccuacgugacccagcagcugauccgggcggccgagauccgcgccagcgccaaccucgccgcgaccaagauguccgagugcgugcugggccagagcaagcgggucgacuucugcgggaagggcuaccaccugauguccuucccccagagcgcgccccacggggugguguuccuccacgucacguacgugcccgcccaggagaagaacuucaccaccgccccggccaucugccacgacggcaaggcccacuucccccgcgagggggucuucguguccaacggcacccacugguucgugacgcagcggaacuucuacgagccccagaucaucaccaccgacaacaccuucgucagcggcaacugcgacguggugaucgggaucgucaacaacacgguguacgacccccugcagccggagcuggacuccuucaaggaggagcucgacaaguacuucaagaaccacaccagccccgacguggaccugggcgacaucuccgggaucaacgccagcgucgugaacauccagaaggagaucgaccgccugaacgagguggccaagaaccucaacgagucccugaucgaccugcaggagcucggcaaguacgagcaguacaucaaguggcccugguacaucuggcugggcuucaucgccgggcugaucgcgaucgucaucgugaccaucaugcucugcugcaugaccagcugcugcuccugccugaagggcugcugcagcugcggguccugcugcaaguucgacgaggacgacagcgagccggugcugaagggcgucaagcuccacuacacgugaggacuaguuauaagacugacuagcccgaugggccucccaacgggcccuccuccccuccuugcaccgagagaucucaaaggcucuuuucagagccaccaaaaaaaaaaaaaaaaaaaaaaaaaaaaaaaaaaaaaaaaaaaaaaaaaaaaaaaaaaaaaaaaaaaaaaaaaaaaaaaaaaaaaaaaaaaaaaaaaaaaa

SEQ ID NO: 24645 - RNA, 4029 nt, Artificial Sequence
  SARS-CoV-2/Wuhan/WIV05/2019__EPI_ISL_402128 spike protein mRNA gc (1-1273)(K986P_V987P_H69del_V70del_A222V_Y453F_S477N_D614G_I692V)
aggagaaagcuuaccauguucguguuccugguccuccugccccuggugagcucccagugcgugaaccucaccacccgcacgcagcugccgcccgccuacaccaacagcuucacccggggcgucuacuaccccgacaagguguuccgcuccagcgugcugcacuccacccaggaccucuuccugcccuucuucagcaacgucacgugguuccacgccaucuccgggaccaacggcaccaagcgguucgacaacccggugcugcccuucaacgacgggguguacuucgcgagcaccgagaaguccaacaucauccgcggcuggaucuucgggacgacccucgacagcaagacccagucccugcugaucgucaacaacgccaccaacguggugaucaaggucugcgaguuccaguucugcaacgaccccuuccucggcguguacuaccacaagaacaacaagagcuggauggaguccgaguuccggguguacagcuccgccaacaacugcacguucgaguacgucagccagcccuuccugauggaccuggagggcaagcaggggaacuucaagaaccuccgcgaguucguguucaagaacaucgacggcuacuucaagaucuacuccaagcacaccccgaucaaccuggugcgggaccugccccagggguucagcguccucgagccccugguggaccugcccaucggcaucaacaucacccgcuuccagacccuccuggcccugcaccgguccuaccucacgccgggggacagcagcuccggcuggaccgccggcgcggccgccuacuacgugggguaccugcagccccgcaccuuccugcucaaguacaacgagaacggcaccaucacggacgccgucgacugcgcgcuggacccccugagcgagaccaagugcacccucaaguccuucaccguggagaaggggaucuaccagacgagcaacuuccgggugcagcccaccgaguccaucguccgcuucccgaacaucaccaaccugugccccuucggcgagguguucaacgccacccgguucgccagcgucuacgccuggaaccgcaagcggaucuccaacugcguggccgacuacagcgugcuguacaacuccgcgagcuucuccacguucaagugcuacggcgucagccccaccaagcucaacgaccugugcuucaccaacguguacgccgacuccuucgugauccgcggggacgagguccggcagaucgcccccggccagaccgggaagaucgccgacuacaacuacaagcugccggacgacuucacgggcugcgugaucgccuggaacagcaacaaccucgacuccaaggucgggggcaacuacaacuaccuguuccgccuguuccgcaagagcaaccucaagcccuucgagcgggacaucuccaccgagaucuaccaggcgggcaacacccccugcaacgggguggagggcuucaacugcuacuucccccugcagagcuacggguuccagccgaccaacggcgugggguaccagcccuaccggguggucgugcuguccuucgagcuccugcacgcccccgccacggugugcggccccaagaaguccaccaaccuggucaagaacaagugcgugaacuucaacuucaacggccucaccgggaccggcgugcugaccgagagcaacaagaaguuccugccguuccagcaguucgggcgcgacaucgccgacacgaccgacgccguccgcgacccccagacccuggagauccucgacaucacccccugcagcuucggcggggugagcgugaucacgccgggcaccaacaccuccaaccaggucgcggugcuguaccagggcgugaacugcaccgagguccccguggccauccacgccgaccagcugacgcccaccuggcggguguacagcaccggguccaacgucuuccagacccgcgccggcugccucaucggggccgagcacgugaacaacagcuacgagugcgacauccccaucggcgcgggcaucugcgccuccuaccagacgcagaccaacagcccgcggcgcgcccgguccguggccagccaguccgucaucgcguacaccaugagccugggggccgagaacuccguggccuacagcaacaacuccaucgccauccccaccaacuucacgaucagcgugaccaccgagauccugcccgucuccaugaccaagacgagcguggacugcaccauguacaucugcggcgacagcaccgagugcuccaaccuccugcugcaguacgggagcuucugcacccagcucaaccgcgcccugacgggcaucgcgguggagcaggacaagaacacccaggaggucuucgcccaggugaagcagaucuacaagacgcccccgaucaaggacuucgggggcuucaacuucucccagauccugcccgaccccagcaagcccuccaagcggagcuucaucgaggaccuccuguucaacaaggugacccuggccgacgccggcuucaucaagcaguacggggacugccucggcgacaucgccgcgcgcgaccugaucugcgcccagaaguucaacgggcugaccguccucccgccccugcugaccgacgagaugaucgcccaguacaccuccgcccuccuggccggcaccaucacgagcggguggaccuucggcgcgggcgccgcccugcagauccccuucgccaugcagauggcguaccgguucaacgggaucggcgugacccagaacgugcucuacgagaaccagaagcugaucgccaaccaguucaacuccgccaucgggaagauccaggacagccuguccagcaccgccuccgcccucggcaagcugcaggacgucgugaaccagaacgcgcaggcccugaacacgcucgugaagcagcugagcuccaacuucggggccaucagcuccguccugaacgacauccucagccgccuggacccgcccgaggccgaggugcagaucgaccggcugaucaccggccgccuccagucccugcagaccuacgugacccagcagcugauccgggccgcggagauccgcgccagcgccaaccucgccgccaccaagaugagcgagugcguccugggccaguccaagcggguggacuucugcgggaagggcuaccaccugaugagcuucccccaguccgcgccccacgggguggucuuccuccacgugacguacguccccgcccaggagaagaacuucaccaccgccccggccaucugccacgacggcaaggcgcacuucccccgcgaggggguguucgugagcaacggcacccacugguucgucacgcagcggaacuucuacgagccccagaucaucaccaccgacaacaccuucguguccggcaacugcgacguggucaucgggaucgugaacaacacgguguacgacccccugcagccggagcuggacagcuucaaggaggagcucgacaaguacuucaagaaccacaccucccccgacgucgaccugggcgacaucagcgggaucaacgccuccguggugaacauccagaaggagaucgaccgccugaacgaggucgccaagaaccucaacgagagccugaucgaccugcaggagcucggcaaguacgagcaguacaucaaguggcccugguacaucuggcugggcuucaucgccgggcugaucgccaucgugauggugaccaucaugcucugcugcaugaccuccugcugcagcugccugaagggcugcugcuccugcgggagcugcugcaaguucgacgaggacgacuccgagccgguccugaagggcgugaagcuccacuacacgugaggacuaguuauaagacugacuagcccgaugggccucccaacgggcccuccuccccuccuugcaccgagagaucucaaaggcucuuuucagagccaccaaaaaaaaaaaaaaaaaaaaaaaaaaaaaaaaaaaaaaaaaaaaaaaaaaaaaaaaaaaaaaaaaaaaaaaaaaaaaaaaaaaaaaaaaaaaaaaaaaaaa

SEQ ID NO: 24646 - RNA, 4029 nt, Artificial Sequence
  SARS-CoV-2/Wuhan/WIV05/2019__EPI_ISL_402128 spike protein mRNA gc (1-1273)(K986P_V987P_H69del_V70del_Y453F_D614G_I692V_M1229I)
aggagaaagcuuaccauguucguguuccugguccuccugccccuggugagcucccagugcgugaaccucaccacccgcacgcagcugccgcccgccuacaccaacagcuucacccggggcgucuacuaccccgacaagguguuccgcuccagcgugcugcacuccacccaggaccucuuccugcccuucuucagcaacgucacgugguuccacgccaucuccgggaccaacggcaccaagcgguucgacaacccggugcugcccuucaacgacgggguguacuucgcgagcaccgagaaguccaacaucauccgcggcuggaucuucgggacgacccucgacagcaagacccagucccugcugaucgucaacaacgccaccaacguggugaucaaggucugcgaguuccaguucugcaacgaccccuuccucggcguguacuaccacaagaacaacaagagcuggauggaguccgaguuccggguguacagcuccgccaacaacugcacguucgaguacgucagccagcccuuccugauggaccuggagggcaagcaggggaacuucaagaaccuccgcgaguucguguucaagaacaucgacggcuacuucaagaucuacuccaagcacaccccgaucaaccuggugcgggaccugccccagggguucagcgcccucgagccccuggucgaccugcccaucggcaucaacaucacccgcuuccagacccuccuggcccugcaccgguccuaccucacgccgggggacagcagcuccggcuggaccgcgggcgccgccgccuacuacgugggguaccugcagccccgcaccuuccugcucaaguacaacgagaacggcaccaucacggacgcgguggacugcgcccuggacccccugagcgagaccaagugcacccucaaguccuucaccgucgagaaggggaucuaccagacgagcaacuuccgggugcagcccaccgaguccaucgugcgcuucccgaacaucaccaaccugugccccuucggcgaggucuucaacgccacccgguucgccagcguguacgccuggaaccgcaagcggaucuccaacugcgucgcggacuacagcgugcuguacaacuccgccagcuucuccacguucaagugcuacggcgugagccccaccaagcucaacgaccugugcuucaccaacgucuacgccgacuccuucgugauccgcggggacgaggugcggcagaucgcccccggccagaccgggaagaucgccgacuacaacuacaagcugccggacgacuucacgggcugcgucaucgcguggaacagcaacaaccucgacuccaaggucgggggcaacuacaacuaccuguuccgccuguuccgcaagagcaaccucaagcccuucgagcgggacaucuccaccgagaucuaccaggccggcagcacccccugcaacgggguggagggcuucaacugcuacuucccccugcaguccuacggguuccagccgaccaacggcgugggguaccagcccuaccggguggugguccugagcuucgagcuccugcacgcccccgccacggugugcggccccaagaaguccaccaaccuggugaagaacaagugcgucaacuucaacuucaacggccucaccgggaccggcgugcugaccgagagcaacaagaaguuccugccguuccagcaguucgggcgcgacaucgccgacacgaccgacgcggugcgcgacccccagacccuggagauccucgacaucacccccugcagcuucggcggggucuccgugaucacgccgggcaccaacaccagcaaccagguggccguccuguaccagggcgugaacugcaccgaggugcccgucgccauccacgccgaccagcugacgcccaccuggcggguguacuccaccgggagcaacguguuccagacccgcgccggcugccucaucggggcggagcacgucaacaacuccuacgagugcgacauccccaucggcgccggcaucugcgccagcuaccagacgcagaccaacuccccgcggcgcgcccggagcguggcgucccagagcgugaucgccuacaccaugucccugggggccgagaacagcgucgccuacuccaacaacagcaucgccauccccaccaacuucacgaucuccgugaccaccgagauccugcccgugagcaugaccaagacgagcgucgacugcaccauguacaucugcggcgacuccaccgagugcagcaaccuccugcugcaguacggguccuucugcacccagcucaaccgcgcgcugacgggcaucgccguggagcaggacaagaacacccaggagguguucgcccaggucaagcagaucuacaagacgcccccgaucaaggacuucgggggcuucaacuucagccagauccugcccgaccccuccaagcccagcaagcgguccuucaucgaggaccuccuguucaacaaggugacccuggccgacgccggcuucaucaagcaguacggggacugccucggcgacaucgcggcccgcgaccugaucugcgcccagaaguucaacgggcugaccgugcucccgccccugcugaccgacgagaugaucgcccaguacaccagcgcccuccuggcgggcaccaucacguccggguggaccuucggcgccggcgccgcccugcagauccccuucgcgaugcagauggccuaccgguucaacgggaucggcgucacccagaacgugcucuacgagaaccagaagcugaucgccaaccaguucaacagcgccaucgggaagauccaggacucccugagcuccaccgccagcgcgcucggcaagcugcaggacguggucaaccagaacgcccaggcccugaacacgcucgugaagcagcuguccagcaacuucggggccaucuccagcgugcugaacgacauccucucccgccuggacccgcccgaggccgagguccagaucgaccggcugaucaccggccgccuccagagccugcagaccuacgugacccagcagcugauccgggcggccgagauccgcgccagcgccaaccucgccgcgaccaagauguccgagugcgugcugggccagagcaagcgggucgacuucugcgggaagggcuaccaccugauguccuucccccagagcgcgccccacggggugguguuccuccacgucacguacgugcccgcccaggagaagaacuucaccaccgccccggccaucugccacgacggcaaggcccacuucccccgcgagggggucuucguguccaacggcacccacugguucgugacgcagcggaacuucuacgagccccagaucaucaccaccgacaacaccuucgucagcggcaacugcgacguggugaucgggaucgucaacaacacgguguacgacccccugcagccggagcuggacuccuucaaggaggagcucgacaaguacuucaagaaccacaccagccccgacguggaccugggcgacaucuccgggaucaacgccagcgucgugaacauccagaaggagaucgaccgccugaacgagguggccaagaaccucaacgagucccugaucgaccugcaggagcucggcaaguacgagcaguacaucaaguggcccugguacaucuggcugggcuucaucgccgggcugaucgcgaucgucaucgugaccaucaugcucugcugcaugaccagcugcugcuccugccugaagggcugcugcagcugcggguccugcugcaaguucgacgaggacgacagcgagccggugcugaagggcgucaagcuccacuacacgugaggacuaguuauaagacugacuagcccgaugggccucccaacgggcccuccuccccuccuugcaccgagagaucucaaaggcucuuuucagagccaccaaaaaaaaaaaaaaaaaaaaaaaaaaaaaaaaaaaaaaaaaaaaaaaaaaaaaaaaaaaaaaaaaaaaaaaaaaaaaaaaaaaaaaaaaaaaaaaaaaaaa

SEQ ID NO: 24647 - RNA, 4026 nt, Artificial Sequence
  SARS-CoV-2/Wuhan/WIV05/2019__EPI_ISL_402128 spike protein mRNA gc (1-1273)(K986P_V987P_K986P_V987P_H69del_V70del_Y144del_N501Y_A570 D_D614G_P681H_T716I_S982A_D1118H)
aggagaaagcuuaccauguucguguuccugguccuccugccccuggugagcucccagugcgugaaccucaccacccgcacgcagcugccgcccgccuacaccaacagcuucacccggggcgucuacuaccccgacaagguguuccgcuccagcgugcugcacuccacccaggaccucuuccugcccuucuucagcaacgucacgugguuccacgccaucuccgggaccaacggcaccaagcgguucgacaacccggugcugcccuucaacgacgggguguacuucgcgagcaccgagaaguccaacaucauccgcggcuggaucuucgggacgacccucgacagcaagacccagucccugcugaucgucaacaacgccaccaacguggugaucaaggucugcgaguuccaguucugcaacgaccccuuccucggcguguaccacaagaacaacaagagcuggauggaguccgaguuccggguguacagcuccgccaacaacugcacguucgaguacgucagccagcccuuccugauggaccuggagggcaagcaggggaacuucaagaaccuccgcgaguucguguucaagaacaucgacggcuacuucaagaucuacuccaagcacaccccgaucaaccuggugcgggaccugccccagggguucagcgcccucgagccccuggucgaccugcccaucggcaucaacaucacccgcuuccagacccuccuggcccugcaccgguccuaccucacgccgggggacagcagcuccggcuggaccgcgggcgccgccgccuacuacgugggguaccugcagccccgcaccuuccugcucaaguacaacgagaacggcaccaucacggacgcgguggacugcgcccuggacccccugagcgagaccaagugcacccucaaguccuucaccgucgagaaggggaucuaccagacgagcaacuuccgggugcagcccaccgaguccaucgugcgcuucccgaacaucaccaaccugugccccuucggcgaggucuucaacgccacccgguucgccagcguguacgccuggaaccgcaagcggaucuccaacugcgucgcggacuacagcgugcuguacaacuccgccagcuucuccacguucaagugcuacggcgugagccccaccaagcucaacgaccugugcuucaccaacgucuacgccgacuccuucgugauccgcggggacgaggugcggcagaucgcccccggccagaccgggaagaucgccgacuacaacuacaagcugccggacgacuucacgggcugcgucaucgcguggaacagcaacaaccucgacuccaaggucgggggcaacuacaacuaccuguaccgccuguuccgcaagagcaaccucaagcccuucgagcgggacaucuccaccgagaucuaccaggccggcagcacccccugcaacgggguggagggcuucaacugcuacuucccccugcaguccuacggguuccagccgaccuacggcgugggguaccagcccuaccggguggugguccugagcuucgagcuccugcacgcccccgccacggugugcggccccaagaaguccaccaaccuggugaagaacaagugcgucaacuucaacuucaacggccucaccgggaccggcgugcugaccgagagcaacaagaaguuccugccguuccagcaguucgggcgcgacaucgacgacacgaccgacgccgugcgcgacccccagacccuggagauccucgacaucacccccugcagcuucggcggggucuccgugaucacgccgggcaccaacaccagcaaccagguggcgguccuguaccagggcgugaacugcaccgaggugcccgucgccauccacgccgaccagcugacgcccaccuggcggguguacuccaccgggagcaacguguuccagacccgcgccggcugccucaucggggccgagcacgucaacaacuccuacgagugcgacauccccaucggcgcgggcaucugcgccagcuaccagacgcagaccaacucccaccggcgcgcccggagcguggccucccagagcaucaucgcguacaccaugucccugggggccgagaacagcguggccuacuccaacaacagcaucgccaucccgaucaacuucaccaucuccgucacgaccgagauccugcccgugagcaugaccaagaccagcguggacugcacgauguacaucugcggcgacuccaccgagugcagcaaccuccugcugcaguacggguccuucugcacccagcucaaccgcgcccugaccggcaucgcggucgagcaggacaagaacacgcaggagguguucgcccaggugaagcagaucuacaagaccccgcccaucaaggacuucgggggcuucaacuucagccagauccugcccgaccccuccaagcccagcaagcgguccuucaucgaggaccuccuguucaacaaggucacccuggccgacgccggcuucaucaagcaguacggggacugccucggcgacaucgccgcgcgcgaccugaucugcgcccagaaguucaacgggcugaccgugcugcccccgcuccugacggacgagaugaucgcccaguacaccagcgcccuccuggccggcaccaucaccuccggguggacguucggcgcgggcgccgcccugcagauccccuucgccaugcagauggcguaccgguucaacgggaucggcgugacccagaacguccucuacgagaaccagaagcugaucgccaaccaguucaacagcgccaucgggaagauccaggacucccugagcuccaccgccagcgcccucggcaagcugcaggacguggugaaccagaacgcgcaggcccugaacacccucgucaagcagcuguccagcaacuucggggccaucuccagcgugcugaacgacauccucgcccgccuggacccgcccgaggccgaggugcagaucgaccggcugaucacgggccgccuccagucccugcagaccuacgucacccagcagcugauccgggcggccgagauccgcgccagcgccaaccucgccgcgaccaagaugagcgagugcgugcugggccaguccaagcggguggacuucugcgggaagggcuaccaccugaugagcuucccccaguccgcgccccacggggucguguuccuccacgugaccuacguccccgcccaggagaagaacuucacgaccgcccccgccaucugccacgacggcaaggcccacuucccgcgcgaggggguguucgucagcaacggcacccacugguucgugacccagcggaacuucuacgagccccagaucaucacgacccacaacaccuucguguccggcaacugcgacgucgugaucgggaucgugaacaacaccgucuacgacccccugcagcccgagcuggacagcuucaaggaggagcucgacaaguacuucaagaaccacacguccccggacguggaccugggcgacaucagcgggaucaacgccuccguggucaacauccagaaggagaucgaccgccugaacgagguggccaagaaccucaacgagagccugaucgaccugcaggagcucggcaaguacgagcaguacaucaaguggcccugguacaucuggcugggcuucaucgccgggcugaucgcgaucgugauggucaccaucaugcucugcugcaugaccuccugcugcagcugccugaagggcugcugcuccugcgggagcugcugcaaguucgacgaggacgacuccgagcccgugcugaagggcgugaagcuccacuacaccugaggacuaguuauaagacugacuagcccgaugggccucccaacgggcccuccuccccuccuugcaccgagagaucucaaaggcucuuuucagagccaccaaaaaaaaaaaaaaaaaaaaaaaaaaaaaaaaaaaaaaaaaaaaaaaaaaaaaaaaaaaaaaaaaaaaaaaaaaaaaaaaaaaaaaaaaaaaaaaaaaaaa

SEQ ID NO: 24648 - RNA, 4035 nt, Artificial Sequence
  SARS-CoV-2/Wuhan/WIV05/2019__EPI_ISL_402128 spike protein mRNA gc (1-1273)(K986P_V987P_K986P_V987P_K417N_E484K_N501Y_D614G)
aggagaaagcuuaccauguucguguuccugguccuccugccccuggugagcucccagugcgugaaccucaccacccgcacgcagcugccgcccgccuacaccaacagcuucacccggggcgucuacuaccccgacaagguguuccgcuccagcgugcugcacuccacccaggaccucuuccugcccuucuucagcaacgucacgugguuccacgccauccacguguccgggaccaacggcaccaagcgguucgacaacccggugcugcccuucaacgacggggucuacuucgcgagcaccgagaaguccaacaucauccgcggcuggaucuucgggacgacccucgacagcaagacccagucccugcugaucgugaacaacgccaccaacguggucaucaaggugugcgaguuccaguucugcaacgaccccuuccucggcguguacuaccacaagaacaacaagagcuggauggaguccgaguuccgggucuacagcuccgccaacaacugcacguucgaguacgugagccagcccuuccugauggaccuggagggcaagcaggggaacuucaagaaccuccgcgaguucguguucaagaacaucgacggcuacuucaagaucuacuccaagcacaccccgaucaaccugguccgggaccugccccagggguucagcgcccucgagccccugguggaccugcccaucggcaucaacaucacccgcuuccagacccuccuggcccugcaccgguccuaccucacgccgggggacagcagcuccggcuggaccgcgggcgccgccgccuacuacgugggguaccugcagccccgcaccuuccugcucaaguacaacgagaacggcaccaucacggacgcggucgacugcgcccuggacccccugagcgagaccaagugcacccucaaguccuucaccguggagaaggggaucuaccagacgagcaacuuccgggugcagcccaccgaguccaucguccgcuucccgaacaucaccaaccugugccccuucggcgagguguucaacgccacccgguucgccagcgucuacgccuggaaccgcaagcggaucuccaacugcguggcggacuacagcgugcuguacaacuccgccagcuucuccacguucaagugcuacggcgucagccccaccaagcucaacgaccugugcuucaccaacguguacgccgacuccuucgugauccgcggggacgagguccggcagaucgcccccggccagaccgggaacaucgccgacuacaacuacaagcugccggacgacuucacgggcugcgugaucgcguggaacagcaacaaccucgacuccaaggucgggggcaacuacaacuaccuguaccgccuguuccgcaagagcaaccucaagcccuucgagcgggacaucuccaccgagaucuaccaggccggcagcacccccugcaacggggugaagggcuucaacugcuacuucccccugcaguccuacggguuccagccgaccuacggcgugggguaccagcccuaccggguggucgugcugagcuucgagcuccugcacgcccccgccacggugugcggccccaagaaguccaccaaccuggucaagaacaagugcgugaacuucaacuucaacggccucaccgggaccggcgugcugaccgagagcaacaagaaguuccugccguuccagcaguucgggcgcgacaucgccgacacgaccgacgcgguccgcgacccccagacccuggagauccucgacaucacccccugcagcuucggcgggguguccgugaucacgccgggcaccaacaccagcaaccaggucgccgugcuguaccagggcgugaacugcaccgagguccccguggccauccacgccgaccagcugacgcccaccuggcggguguacuccaccgggagcaacgucuuccagacccgcgccggcugccucaucggggcggagcacgugaacaacuccuacgagugcgacauccccaucggcgccggcaucugcgccagcuaccagacgcagaccaacuccccgcggcgcgcccggagcguggcgucccagagcaucaucgccuacaccaugucccugggggccgagaacagcgucgccuacuccaacaacagcaucgccauccccaccaacuucacgaucuccgugaccaccgagauccugcccgugagcaugaccaagacgagcgucgacugcaccauguacaucugcggcgacuccaccgagugcagcaaccuccugcugcaguacggguccuucugcacccagcucaaccgcgcgcugacgggcaucgccguggagcaggacaagaacacccaggagguguucgcccaggucaagcagaucuacaagacgcccccgaucaaggacuucgggggcuucaacuucagccagauccugcccgaccccuccaagcccagcaagcgguccuucaucgaggaccuccuguucaacaaggugacccuggccgacgccggcuucaucaagcaguacggggacugccucggcgacaucgcggcccgcgaccugaucugcgcccagaaguucaacgggcugaccgugcucccgccccugcugaccgacgagaugaucgcccaguacaccagcgcccuccuggcgggcaccaucacguccggguggaccuucggcgccggcgccgcccugcagauccccuucgcgaugcagauggccuaccgguucaacgggaucggcgucacccagaacgugcucuacgagaaccagaagcugaucgccaaccaguucaacagcgccaucgggaagauccaggacucccugagcuccaccgccagcgcgcucggcaagcugcaggacguggucaaccagaacgcccaggcccugaacacgcucgugaagcagcuguccagcaacuucggggccaucuccagcgugcugaacgacauccucucccgccuggacccgcccgaggccgagguccagaucgaccggcugaucaccggccgccuccagagccugcagaccuacgugacccagcagcugauccgggcggccgagauccgcgccagcgccaaccucgccgcgaccaagauguccgagugcgugcugggccagagcaagcgggucgacuucugcgggaagggcuaccaccugauguccuucccccagagcgcgccccacggggugguguuccuccacgucacguacgugcccgcccaggagaagaacuucaccaccgccccggccaucugccacgacggcaaggcccacuucccccgcgagggggucuucguguccaacggcacccacugguucgugacgcagcggaacuucuacgagccccagaucaucaccaccgacaacaccuucgucagcggcaacugcgacguggugaucgggaucgucaacaacacgguguacgacccccugcagccggagcuggacuccuucaaggaggagcucgacaaguacuucaagaaccacaccagccccgacguggaccugggcgacaucuccgggaucaacgccagcgucgugaacauccagaaggagaucgaccgccugaacgagguggccaagaaccucaacgagucccugaucgaccugcaggagcucggcaaguacgagcaguacaucaaguggcccugguacaucuggcugggcuucaucgccgggcugaucgcgaucgucauggugaccaucaugcucugcugcaugaccagcugcugcuccugccugaagggcugcugcagcugcggguccugcugcaaguucgacgaggacgacagcgagccggugcugaagggcgucaagcuccacuacacgugaggacuaguuauaagacugacuagcccgaugggccucccaacgggcccuccuccccuccuugcaccgagagaucucaaaggcucuuuucagagccaccaaaaaaaaaaaaaaaaaaaaaaaaaaaaaaaaaaaaaaaaaaaaaaaaaaaaaaaaaaaaaaaaaaaaaaaaaaaaaaaaaaaaaaaaaaaaaaaaaaaaa

SEQ ID NO: 24649 - RNA, 4026 nt, Artificial Sequence
  SARS-CoV-2/Wuhan/WIV05/2019__EPI_ISL_402128 spike protein mRNA gc (1-1273)(K986P_V987P_K986P_V987P_L18F_D80A_D215G_L242del_A243del_ L244del_R246I_K417N_E484K_N501Y_D614G_A701V)
aggagaaagcuuaccauguucguguuccugguccuccugccccuggugagcucccagugcgugaacuucaccacccgcacgcagcucccgcccgccuacaccaacagcuucacccggggcgucuacuaccccgacaagguguuccgcuccagcgugcugcacuccacccaggaccuguuccuccccuucuucagcaacgucacgugguuccacgccauccacguguccgggaccaacggcaccaagcgguucgcgaacccggugcugcccuucaacgacggggucuacuucgccagcaccgagaaguccaacaucauccgcggcuggaucuucgggacgacccuggacagcaagacccagucccuccugaucgugaacaacgccaccaacguggucaucaaggugugcgaguuccaguucugcaacgaccccuuccugggcguguacuaccacaagaacaacaagagcuggauggaguccgaguuccgggucuacagcuccgccaacaacugcacguucgaguacgugagccagcccuuccucauggaccuggagggcaagcaggggaacuucaagaaccugcgcgaguucguguucaagaacaucgacggcuacuucaagaucuacuccaagcacaccccgaucaaccucguccgggggcugccccagggcuucagcgcccuggagccccucguggaccugcccaucgggaucaacaucacccgcuuccagacccugcacaucuccuaccucacgccgggcgacagcagcuccggcuggaccgcgggggccgccgccuacuacgugggcuaccugcagccccggaccuuccugcucaaguacaacgagaacgggaccaucacggacgcggucgacugcgcccuggacccccugagcgagaccaagugcacccucaaguccuucaccguggagaagggcaucuaccagacgagcaacuuccgcgugcagcccaccgaguccaucguccgguucccgaacaucaccaaccugugccccuucggcgagguguucaacgccacccgcuucgccagcgucuacgccuggaaccggaagcgcaucuccaacugcguggcggacuacagcgugcuguacaacuccgccagcuucuccacguucaagugcuacggggucagccccaccaagcucaacgaccugugcuucaccaacguguacgccgacuccuucgugauccggggcgacgagguccgccagaucgcccccgggcagaccggcaacaucgccgacuacaacuacaagcugccggacgacuucacggggugcgugaucgcguggaacagcaacaaccucgacuccaaggugggcggcaacuacaacuaccuguaccggcuguuccgcaagagcaaccucaagcccuucgagcgggacaucuccaccgagaucuaccaggccgggagcacccccugcaacggcgucaagggguucaacugcuacuucccccugcaguccuacggcuuccagccgaccuacggggugggcuaccagcccuaccgcguggucgugcugagcuucgagcuccugcacgcccccgccacggugugcggccccaagaaguccaccaaccuggucaagaacaagugcgugaacuucaacuucaacgggcucaccggcaccggggugcugaccgagagcaacaagaaguuccugccguuccagcaguucggccgggacaucgccgacacgaccgacgcgguccgcgacccccagacccucgagauccuggacaucacccccugcagcuucgggggcguguccgugaucacgccgggcaccaacaccagcaaccaggucgccgugcuguaccagggggugaacugcaccgagguccccguggccauccacgccgaccagcugacgcccaccuggcgcguguacuccaccggcagcaacgucuuccagacccgggccgggugccucaucggcgcggagcacgugaacaacuccuacgagugcgacauccccaucggcgccgggaucugcgccagcuaccagacgcagaccaacuccccgcgccgggcccgcagcguggcgucccagagcaucaucgccuacaccaugucccugggcgucgagaacagcguggccuacuccaacaacagcaucgccauccccaccaacuucacgaucuccgugaccaccgagauccugcccgucagcaugaccaagacgagcguggacugcaccauguacaucugcggggacuccaccgagugcagcaaccuccugcugcaguacggcuccuucugcacccagcucaaccgggcccugacggggaucgcgguggagcaggacaagaacacccaggaggucuucgcccaggugaagcagaucuacaagacgcccccgaucaaggacuucggcggcuucaacuucagccagauccugcccgaccccuccaagcccagcaagcgcuccuucaucgaggaccuccuguucaacaaggugacccuggccgacgccggguucaucaagcaguacggcgacugccucggggacaucgccgcgcgggaccugaucugcgcccagaaguucaacggccugaccguccucccgccccugcugaccgacgagaugaucgcccaguacaccagcgcccuccuggccgggaccaucacguccggcuggaccuucggcgcgggggccgcccugcagauccccuucgccaugcagauggcguaccgcuucaacggcaucggggugacccagaacgugcucuacgagaaccagaagcugaucgccaaccaguucaacagcgccaucggcaagauccaggacucccugagcuccaccgccagcgcccucgggaagcugcaggacgucgugaaccagaacgcgcaggcccugaacacgcucgugaagcagcuguccagcaacuucggcgccaucuccagcguccugaacgacauccucucccggcuggacccgcccgaggccgaggugcagaucgaccgccugaucaccggccggcuccagagccugcagaccuacgugacccagcagcugauccgcgccgcggagauccgggccagcgccaaccucgccgccaccaagauguccgagugcguccuggggcagagcaagcgcguggacuucugcggcaagggguaccaccugauguccuucccccagagcgcgccccacggcguggucuuccuccacgugacguacguccccgcccaggagaagaacuucaccaccgccccggccaucugccacgacgggaaggcgcacuucccccgggagggcguguucguguccaacggcacccacugguucgucacgcagcgcaacuucuacgagccccagaucaucaccaccgacaacaccuucgugagcgggaacugcgacguggucaucggcaucgugaacaacacgguguacgacccccugcagccggagcuggacuccuucaaggaggagcucgacaaguacuucaagaaccacaccagccccgacgucgaccugggggacaucuccggcaucaacgccagcguggugaacauccagaaggagaucgaccggcugaacgaggucgccaagaaccucaacgagucccugaucgaccugcaggagcucggcaaguacgagcaguacaucaaguggcccugguacaucuggcugggguucaucgccggccugaucgccaucgugauggugaccaucaugcucugcugcaugaccagcugcugcuccugccugaaggggugcugcagcugcggcuccugcugcaaguucgacgaggacgacagcgagccgguccugaagggggugaagcuccacuacacgugaggacuaguuauaagacugacuagcccgaugggccucccaacgggcccuccuccccuccuugcaccgagagaucucaaaggcucuuuucagagccaccaaaaaaaaaaaaaaaaaaaaaaaaaaaaaaaaaaaaaaaaaaaaaaaaaaaaaaaaaaaaaaaaaaaaaaaaaaaaaaaaaaaaaaaaaaaaaaaaaaaaa

SEQ ID NO: 24650 - RNA, 4035 nt, Artificial Sequence
  SARS-CoV-2/Wuhan/WIV05/2019__EPI_ISL_402128 spike protein mRNA gc (1-1273)(K986P_V987P_K986P_V987P_E484K_D614G)
aggagaaagcuuaccauguucguguuccugguccuccugccccuggugagcucccagugcgugaaccucaccacccgcacgcagcugccgcccgccuacaccaacagcuucacccggggcgucuacuaccccgacaagguguuccgcuccagcgugcugcacuccacccaggaccucuuccugcccuucuucagcaacgucacgugguuccacgccauccacguguccgggaccaacggcaccaagcgguucgacaacccggugcugcccuucaacgacggggucuacuucgcgagcaccgagaaguccaacaucauccgcggcuggaucuucgggacgacccucgacagcaagacccagucccugcugaucgugaacaacgccaccaacguggucaucaaggugugcgaguuccaguucugcaacgaccccuuccucggcguguacuaccacaagaacaacaagagcuggauggaguccgaguuccgggucuacagcuccgccaacaacugcacguucgaguacgugagccagcccuuccugauggaccuggagggcaagcaggggaacuucaagaaccuccgcgaguucguguucaagaacaucgacggcuacuucaagaucuacuccaagcacaccccgaucaaccugguccgggaccugccccagggguucagcgcccucgagccccugguggaccugcccaucggcaucaacaucacccgcuuccagacccuccuggcccugcaccgguccuaccucacgccgggggacagcagcuccggcuggaccgcgggcgccgccgccuacuacgugggguaccugcagccccgcaccuuccugcucaaguacaacgagaacggcaccaucacggacgcggucgacugcgcccuggacccccugagcgagaccaagugcacccucaaguccuucaccguggagaaggggaucuaccagacgagcaacuuccgggugcagcccaccgaguccaucguccgcuucccgaacaucaccaaccugugccccuucggcgagguguucaacgccacccgguucgccagcgucuacgccuggaaccgcaagcggaucuccaacugcguggcggacuacagcgugcuguacaacuccgccagcuucuccacguucaagugcuacggcgucagccccaccaagcucaacgaccugugcuucaccaacguguacgccgacuccuucgugauccgcggggacgagguccggcagaucgcccccggccagaccgggaagaucgccgacuacaacuacaagcugccggacgacuucacgggcugcgugaucgcguggaacagcaacaaccucgacuccaaggucgggggcaacuacaacuaccuguaccgccuguuccgcaagagcaaccucaagcccuucgagcgggacaucuccaccgagaucuaccaggccggcagcacccccugcaacggggugaagggcuucaacugcuacuucccccugcaguccuacggguuccagccgaccaacggcgugggguaccagcccuaccggguggucgugcugagcuucgagcuccugcacgcccccgccacggugugcggccccaagaaguccaccaaccuggucaagaacaagugcgugaacuucaacuucaacggccucaccgggaccggcgugcugaccgagagcaacaagaaguuccugccguuccagcaguucgggcgcgacaucgccgacacgaccgacgcgguccgcgacccccagacccuggagauccucgacaucacccccugcagcuucggcgggguguccgugaucacgccgggcaccaacaccagcaaccaggucgccgugcuguaccagggcgugaacugcaccgagguccccguggccauccacgccgaccagcugacgcccaccuggcggguguacuccaccgggagcaacgucuuccagacccgcgccggcugccucaucggggcggagcacgugaacaacuccuacgagugcgacauccccaucggcgccggcaucugcgccagcuaccagacgcagaccaacuccccgcggcgcgcccggagcguggcgucccagagcaucaucgccuacaccaugucccugggggccgagaacagcgucgccuacuccaacaacagcaucgccauccccaccaacuucacgaucuccgugaccaccgagauccugcccgugagcaugaccaagacgagcgucgacugcaccauguacaucugcggcgacuccaccgagugcagcaaccuccugcugcaguacggguccuucugcacccagcucaaccgcgcgcugacgggcaucgccguggagcaggacaagaacacccaggagguguucgcccaggucaagcagaucuacaagacgcccccgaucaaggacuucgggggcuucaacuucagccagauccugcccgaccccuccaagcccagcaagcgguccuucaucgaggaccuccuguucaacaaggugacccuggccgacgccggcuucaucaagcaguacggggacugccucggcgacaucgcggcccgcgaccugaucugcgcccagaaguucaacgggcugaccgugcucccgccccugcugaccgacgagaugaucgcccaguacaccagcgcccuccuggcgggcaccaucacguccggguggaccuucggcgccggcgccgcccugcagauccccuucgcgaugcagauggccuaccgguucaacgggaucggcgucacccagaacgugcucuacgagaaccagaagcugaucgccaaccaguucaacagcgccaucgggaagauccaggacucccugagcuccaccgccagcgcgcucggcaagcugcaggacguggucaaccagaacgcccaggcccugaacacgcucgugaagcagcuguccagcaacuucggggccaucuccagcgugcugaacgacauccucucccgccuggacccgcccgaggccgagguccagaucgaccggcugaucaccggccgccuccagagccugcagaccuacgugacccagcagcugauccgggcggccgagauccgcgccagcgccaaccucgccgcgaccaagauguccgagugcgugcugggccagagcaagcgggucgacuucugcgggaagggcuaccaccugauguccuucccccagagcgcgccccacggggugguguuccuccacgucacguacgugcccgcccaggagaagaacuucaccaccgccccggccaucugccacgacggcaaggcccacuucccccgcgagggggucuucguguccaacggcacccacugguucgugacgcagcggaacuucuacgagccccagaucaucaccaccgacaacaccuucgucagcggcaacugcgacguggugaucgggaucgucaacaacacgguguacgacccccugcagccggagcuggacuccuucaaggaggagcucgacaaguacuucaagaaccacaccagccccgacguggaccugggcgacaucuccgggaucaacgccagcgucgugaacauccagaaggagaucgaccgccugaacgagguggccaagaaccucaacgagucccugaucgaccugcaggagcucggcaaguacgagcaguacaucaaguggcccugguacaucuggcugggcuucaucgccgggcugaucgcgaucgucauggugaccaucaugcucugcugcaugaccagcugcugcuccugccugaagggcugcugcagcugcggguccugcugcaaguucgacgaggacgacagcgagccggugcugaagggcgucaagcuccacuacacgugaggacuaguuauaagacugacuagcccgaugggccucccaacgggcccuccuccccuccuugcaccgagagaucucaaaggcucuuuucagagccaccaaaaaaaaaaaaaaaaaaaaaaaaaaaaaaaaaaaaaaaaaaaaaaaaaaaaaaaaaaaaaaaaaaaaaaaaaaaaaaaaaaaaaaaaaaaaaaaaaaaaa

SEQ ID NO: 24651 - RNA, 4035 nt, Artificial Sequence
  SARS-CoV-2/Wuhan/WIV05/2019__EPI_ISL_402128 spike protein mRNA gc (1-1273)(K986P_V987P_K986P_V987P_L18F_T20N_P26S_D138Y_R190S_K417T _E484K_N501Y_D614G_H655Y_T1027I)
aggagaaagcuuaccauguucguguuccugguccuccugccccuggugagcucccagugcgugaacuucaccaaccgcacccagcucccgagcgccuacacgaacuccuucacccggggcgucuacuaccccgacaagguguuccgcagcuccgugcugcacagcacccaggaccuguuccuccccuucuucuccaacgucaccugguuccacgccauccacgugagcgggacgaacggcaccaagcgguucgacaaccccgugcugccguucaacgacggggucuacuucgcguccaccgagaaguccaacaucauccgcggcuggaucuucgggaccacgcuggacuccaagacccagagccuccugaucgugaacaacgccaccaacguggucaucaaggugugcgaguuccaguucugcaacuaccccuuccugggcguguacuaccacaagaacaacaaguccuggauggagagcgaguuccgggucuacuccagcgccaacaacugcaccuucgaguacgugucccagcccuuccucauggaccuggagggcaagcaggggaacuucaagaaccugagcgaguucguguucaagaacaucgacggcuacuucaagaucuacuccaagcacacgcccaucaaccucguccgcgaccugccgcagggguucagcgcccuggagccccucguggaccugcccaucggcaucaacaucacccgguuccagacccugcucgcccugcaccgcagcuaccugacccccggggacuccagcuccggcuggacggcgggcgccgccgccuacuacgugggguaccuccagccgcggaccuuccugcugaaguacaacgagaacggcaccaucaccgacgcggucgacugcgcccucgacccccugagcgagacgaagugcacccugaaguccuucaccguggagaaggggaucuaccagaccagcaacuuccgcgugcagcccacggaguccaucguccgguuccccaacaucaccaaccucugcccguucggcgagguguucaacgccacccgcuucgccagcgucuacgccuggaaccggaagcgcaucuccaacugcguggcggacuacagcgugcuguacaacuccgccagcuucuccaccuucaagugcuacggcgucagccccacgaagcugaacgaccucugcuucaccaacguguacgccgacuccuucgugauccgcggggacgagguccggcagaucgcccccggccagaccgggaccaucgccgacuacaacuacaagcugcccgacgacuucacgggcugcgugaucgcguggaacagcaacaaccuggacuccaaggucgggggcaacuacaacuaccucuaccggcuguuccgcaagagcaaccugaagccguucgagcgggacaucuccaccgagaucuaccaggccggcagcacccccugcaacggggugaagggcuucaacugcuacuucccccuccagagcuacggguuccagcccaccuacggcgugggguaccagccguaccgcguggucgugcuguccuucgagcugcuccacgcccccgccacggugugcggccccaagaaguccaccaaccuggucaagaacaagugcgugaacuucaacuucaacggccugaccgggaccggcgugcucaccgagagcaacaagaaguuccugcccuuccagcaguucgggcgggacaucgccgacacgaccgacgcgguccgcgacccgcagacccuggagauccuggacaucacccccugcagcuucggcgggguguccgugaucacgcccggcaccaacaccagcaaccaggucgccgugcucuaccagggcgugaacugcaccgaggucccgguggccauccacgccgaccagcugacgcccaccuggcgcguguacuccaccgggagcaacgucuuccagacccgggccggcugccugaucggggcggaguacgugaacaacuccuacgagugcgacauccccaucggcgccggcaucugcgccagcuaccagacgcagaccaacagcccccgccgggcccgcagcguggcgucccagagcaucaucgccuacaccaugucccucggggccgagaacagcgucgccuacuccaacaacagcaucgccaucccgaccaacuucacgaucagcgugaccaccgagauccugcccguguccaugaccaagacgagcgucgacugcaccauguacaucugcggcgacuccaccgagugcagcaaccugcuccugcaguacggguccuucugcacccagcugaaccgggcgcucacgggcaucgccguggagcaggacaagaacacccaggagguguucgcccaggucaagcagaucuacaagaccccgcccaucaaggacuucgggggcuucaacuucagccagauccugcccgaccccuccaagcccagcaagcgcuccuucaucgaggaccuccuguucaacaaggugacccuggccgacgccggcuucaucaagcaguacggggacugccugggcgacaucgcggcccgggaccucaucugcgcccagaaguucaacgggcugacggugcugcccccgcuccugaccgacgagaugaucgcccaguacaccagcgcccugcucgcgggcaccaucacguccggguggaccuucggcgccggcgccgcccugcagauccccuucgcgaugcagauggccuaccgcuucaacgggaucggcgucacccagaacgugcuguacgagaaccagaagcucaucgccaaccaguucaacagcgccaucgggaagauccaggacucccugagcuccaccgccagcgcgcugggcaagcuccaggacguggucaaccagaacgcccaggcccugaacacgcuggugaagcagcucuccagcaacuucggggccaucuccagcgugcugaacgacauccugagccggcucgacccgcccgaggccgagguccagaucgaccgccugaucaccggccggcugcagucccuccagaccuacgugacccagcagcugauccgcgcggccgagauccgggccagcgccaaccuggccgcgaucaagauguccgagugcgugcucggccagagcaagcgcgucgacuucugcgggaagggcuaccaccugauguccuucccccagagcgcgccccacggggugguguuccugcacgucaccuacgugcccgcccaggagaagaacuucacgaccgcccccgccaucugccacgacggcaaggcccacuucccgcgggagggggucuucguguccaacggcacccacugguucgugacccagcgcaacuucuacgagccccagaucaucacgaccgacaacaccuucgucagcggcaacugcgacguggugaucgggaucgucaacaacaccguguacgacccccuccagcccgagcuggacuccuucaaggaggagcuggacaaguacuucaagaaccacacgagcccggacguggaccucggcgacaucuccgggaucaacgccagcgucgugaacauccagaaggagaucgaccggcugaacgagguggccaagaaccugaacgagucccucaucgaccugcaggagcugggcaaguacgagcaguacaucaaguggcccugguacaucuggcucggcuucaucgccgggcugaucgcgaucgucauggugaccaucaugcugugcugcaugaccagcugcugcuccugccucaagggcugcugcagcugcggguccugcugcaaguucgacgaggacgacagcgagcccgugcugaagggcgucaagcugcacuacaccugaggacuaguuauaagacugacuagcccgaugggccucccaacgggcccuccuccccuccuugcaccgagagaucucaaaggcucuuuucagagccaccaaaaaaaaaaaaaaaaaaaaaaaaaaaaaaaaaaaaaaaaaaaaaaaaaaaaaaaaaaaaaaaaaaaaaaaaaaaaaaaaaaaaaaaaaaaaaaaaaaaaa

SEQ ID NO: 24652 - RNA, 4035 nt, Artificial Sequence
  SARS-CoV-2/Wuhan/WIV05/2019__EPI_ISL_402128 spike protein mRNA gc (1-1273)(K986P_V987P_K986P_V987P_S13I_W152C_L452R_D614G)
aggagaaagcuuaccauguucguguuccugguccuccugccccuggugagcauccagugcgugaaccucaccacccgcacgcagcugccgcccgccuacaccaacuccuucacccggggcgucuacuaccccgacaagguguuccgcagcuccgugcugcacagcacccaggaccucuuccugcccuucuucuccaacgucacgugguuccacgccauccacgugagcgggaccaacggcaccaagcgguucgacaacccggugcugcccuucaacgacggggucuacuucgcguccaccgagaaguccaacaucauccgcggcuggaucuucgggacgacccucgacagcaagacccagagccugcugaucgugaacaacgccaccaacguggucaucaaggugugcgaguuccaguucugcaacgaccccuuccucggcguguacuaccacaagaacaacaaguccugcauggagagcgaguuccgggucuacuccagcgccaacaacugcacguucgaguacgugucccagcccuuccugauggaccuggagggcaagcaggggaacuucaagaaccuccgcgaguucguguucaagaacaucgacggcuacuucaagaucuacagcaagcacaccccgaucaaccugguccgggaccugccccagggguucuccgcccucgagccccugguggaccugcccaucggcaucaacaucacccgcuuccagacccuccuggcccugcaccggagcuaccucacgccgggggacuccagcagcggcuggaccgcgggcgccgccgccuacuacgugggguaccugcagccccgcaccuuccugcucaaguacaacgagaacggcaccaucacggacgcggucgacugcgcccuggacccccuguccgagaccaagugcacccucaagagcuucaccguggagaaggggaucuaccagacguccaacuuccgggugcagcccaccgagagcaucguccgcuucccgaacaucaccaaccugugccccuucggcgagguguucaacgccacccgguucgccuccgucuacgccuggaaccgcaagcggaucagcaacugcguggcggacuacuccgugcuguacaacagcgccuccuucagcacguucaagugcuacggcgucucccccaccaagcucaacgaccugugcuucaccaacguguacgccgacagcuucgugauccgcggggacgagguccggcagaucgcccccggccagaccgggaagaucgccgacuacaacuacaagcugccggacgacuucacgggcugcgugaucgcguggaacuccaacaaccucgacagcaaggucgggggcaacuacaacuaccgcuaccggcuguuccgcaaguccaaccugaagcccuucgagcgggacaucagcaccgagaucuaccaggccggcuccacccccugcaacgggguggagggcuucaacugcuacuucccccuccagagcuacggguuccagccgaccaacggcgugggguaccagcccuaccgcguggucgugcuguccuucgagcugcuccacgcccccgccacggugugcggccccaagaaguccaccaaccuggucaagaacaagugcgugaacuucaacuucaacggccugaccgggaccggcgugcucaccgagagcaacaagaaguuccugccguuccagcaguucgggcgcgacaucgccgacacgaccgacgcgguccgggacccccagacccuggagauccuggacaucacccccugcagcuucggcggggugagcgugaucacgccgggcaccaacaccuccaaccaggucgccgugcucuaccagggcgugaacugcaccgagguccccguggccauccacgccgaccagcugacgcccaccuggcgcguguacagcaccggguccaacgucuuccagacccgggccggcugccugaucggggcggagcacgugaacaacagcuacgagugcgacauccccaucggcgccggcaucugcgccuccuaccagacgcagaccaacagcccgcgccgggcccgcuccguggcgagccaguccaucaucgccuacaccaugagccucggggccgagaacuccgucgccuacagcaacaacuccaucgccauccccaccaacuucacgaucagcgugaccaccgagauccugcccguguccaugaccaagacgagcgucgacugcaccauguacaucugcggcgacagcaccgagugcuccaaccugcuccugcaguacgggagcuucugcacccagcugaaccgggcgcucacgggcaucgccguggagcaggacaagaacacccaggagguguucgcccaggucaagcagaucuacaagacgcccccgaucaaggacuucgggggcuucaacuucucccagauccugcccgaccccagcaagcccuccaagcgcagcuucaucgaggaccuccuguucaacaaggugacccuggccgacgccggcuucaucaagcaguacggggacugccugggcgacaucgcggcccgggaccucaucugcgcccagaaguucaacgggcugaccgugcugccgccccuccugaccgacgagaugaucgcccaguacaccuccgcccugcucgcgggcaccaucacgagcggguggaccuucggcgccggcgccgcccugcagauccccuucgcgaugcagauggccuaccgcuucaacgggaucggcgucacccagaacgugcuguacgagaaccagaagcucaucgccaaccaguucaacuccgccaucgggaagauccaggacagccuguccagcaccgccuccgcgcugggcaagcuccaggacguggucaaccagaacgcccaggcccugaacacgcuggugaagcagcucagcuccaacuucggggccaucagcuccgugcugaacgacauccugagccggcucgacccgcccgaggccgagguccagaucgaccgccugaucaccggccggcugcagucccuccagaccuacgugacccagcagcugauccgcgcggccgagauccgggccagcgccaaccuggccgcgaccaagaugagcgagugcgugcucggccaguccaagcgcgucgacuucugcgggaagggcuaccaccugaugagcuucccccaguccgcgccccacggggugguguuccugcacgucacguacgugcccgcccaggagaagaacuucaccaccgccccggccaucugccacgacggcaaggcccacuucccccgggagggggucuucgugagcaacggcacccacugguucgugacgcagcgcaacuucuacgagccccagaucaucaccaccgacaacaccuucgucuccggcaacugcgacguggugaucgggaucgucaacaacacgguguacgacccccuccagccggagcuggacagcuucaaggaggagcuggacaaguacuucaagaaccacaccucccccgacguggaccucggcgacaucagcgggaucaacgccuccgucgugaacauccagaaggagaucgaccggcugaacgagguggccaagaaccugaacgagagccucaucgaccugcaggagcugggcaaguacgagcaguacaucaaguggcccugguacaucuggcucggcuucaucgccgggcugaucgcgaucgucauggugaccaucaugcugugcugcaugaccuccugcugcagcugccucaagggcugcugcuccugcgggagcugcugcaaguucgacgaggacgacuccgagccggugcugaagggcgucaagcugcacuacacgugaggacuaguuauaagacugacuagcccgaugggccucccaacgggcccuccuccccuccuugcaccgagagaucucaaaggcucuuuucagagccaccaaaaaaaaaaaaaaaaaaaaaaaaaaaaaaaaaaaaaaaaaaaaaaaaaaaaaaaaaaaaaaaaaaaaaaaaaaaaaaaaaaaaaaaaaaaaaaaaaaaaa

SEQ ID NO: 24653 - RNA, 4035 nt, Artificial Sequence
  SARS-CoV-2/Wuhan/WIV05/2019__EPI_ISL_402128 spike protein mRNA gc (1-1273)(K986P_V987P)
aggagaaagcuuaccauguucguguuccuggugcugcugccccuggugagcagccagugcgugaaccugaccacccggacccagcugccaccagccuacaccaacagcuucacccggggcgucuacuaccccgacaagguguuccggagcagcguccugcacagcacccaggaccuguuccugcccuucuucagcaacgugaccugguuccacgccauccacgugagcggcaccaacggcaccaagcgguucgacaaccccgugcugcccuucaacgacggcguguacuucgccagcaccgagaagagcaacaucauccggggcuggaucuucggcaccacccuggacagcaagacccagagccugcugaucgugaauaacgccaccaacguggugaucaaggugugcgaguuccaguucugcaacgaccccuuccugggcguguacuaccacaagaacaacaagagcuggauggagagcgaguuccggguguacagcagcgccaacaacugcaccuucgaguacgugagccagcccuuccugauggaccuggagggcaagcagggcaacuucaagaaccugcgggaguucguguucaagaacaucgacggcuacuucaagaucuacagcaagcacaccccaaucaaccuggugcgggaucugccccagggcuucucagcccuggagccccugguggaccugcccaucggcaucaacaucacccgguuccagacccugcuggcccugcaccggagcuaccugaccccaggcgacagcagcagcggguggacagcaggcgcggcugcuuacuacgugggcuaccugcagccccggaccuuccugcugaaguacaacgagaacggcaccaucaccgacgccguggacugcgcccuggacccucugagcgagaccaagugcacccugaagagcuucaccguggagaagggcaucuaccagaccagcaacuuccgggugcagcccaccgagagcaucgugcgguuccccaacaucaccaaccugugccccuucggcgagguguucaacgccacccgguucgccagcguguacgccuggaaccggaagcggaucagcaacugcguggccgacuacagcgugcuguacaacagcgccagcuucagcaccuucaagugcuacggcgugagccccaccaagcugaacgaccugugcuucaccaacguguacgccgacagcuucgugauccguggcgacgaggugcggcagaucgcacccggccagacaggcaagaucgccgacuacaacuacaagcugcccgacgacuucaccggcugcgugaucgccuggaacagcaacaaccucgacagcaaggugggcggcaacuacaacuaccuguaccggcuguuccggaagagcaaccugaagcccuucgagcgggacaucagcaccgagaucuaccaagccggcuccaccccuugcaacggcguggagggcuucaacugcuacuucccucugcagagcuacggcuuccagcccaccaacggcgugggcuaccagcccuaccgggugguggugcugagcuucgagcugcugcacgccccagccaccguguguggccccaagaagagcaccaaccuggugaagaacaagugcgugaacuucaacuucaacggccuuaccggcaccggcgugcugaccgagagcaacaagaaauuccugcccuuucagcaguucggccgggacaucgccgacaccaccgacgcugugcgggauccccagacccuggagauccuggacaucaccccuugcagcuucggcggcgugagcgugaucaccccaggcaccaacaccagcaaccagguggccgugcuguaccaggacgugaacugcaccgaggugcccguggccauccacgccgaccagcugacacccaccuggcgggucuacagcaccggcagcaacguguuccagacccgggccgguugccugaucggcgccgagcacgugaacaacagcuacgagugcgacauccccaucggcgccggcaucugugccagcuaccagacccagaccaauucaccccggagggcaaggagcguggccagccagagcaucaucgccuacaccaugagccugggcgccgagaacagcguggccuacagcaacaacagcaucgccauccccaccaacuucaccaucagcgugaccaccgagauucugcccgugagcaugaccaagaccagcguggacugcaccauguacaucugcggcgacagcaccgagugcagcaaccugcugcugcaguacggcagcuucugcacccagcugaaccgggcccugaccggcaucgccguggagcaggacaagaacacccaggagguguucgcccaggugaagcagaucuacaagaccccucccaucaaggacuucggcggcuucaacuucagccagauccugcccgaccccagcaagcccagcaagcggagcuucaucgaggaccugcuguucaacaaggugacccuagccgacgccggcuucaucaagcaguacggcgacugccucggcgacauagccgcccgggaccugaucugcgcccagaaguucaacggccugaccgugcugccuccccugcugaccgacgagaugaucgcccaguacaccagcgcccuguuagccggaaccaucaccagcggcuggacuuucggcgcuggagccgcucugcagauccccuucgccaugcagauggccuaccgguucaacggcaucggcgugacccagaacgugcuguacgagaaccagaagcugaucgccaaccaguucaacagcgccaucggcaagauccaggacagccugagcagcaccgcuagcgcccugggcaagcugcaggacguggugaaccagaacgcccaggcccugaacacccuggugaagcagcugagcagcaacuucggcgccaucagcagcgugcugaacgacauccugagccggcuggacccucccgaggccgaggugcagaucgaccggcugaucacuggccggcugcagagccugcagaccuacgugacccagcagcugauccgggccgccgagauucgggccagcgccaaccuggccgccaccaagaugagcgagugcgugcugggccagagcaagcggguggacuucugcggcaagggcuaccaccugaugagcuuuccccagagcgcaccccacggagugguguuccugcacgugaccuacgugcccgcccaggagaagaacuucaccaccgccccagccaucugccacgacggcaaggcccacuuuccccgggagggcguguucgugagcaacggcacccacugguucgugacccagcggaacuucuacgagccccagaucaucaccaccgacaacaccuucgugagcggcaacugcgacguggugaucggcaucgugaacaacaccguguacgauccccugcagcccgagcuggacagcuucaaggaggagcuggacaaguacuucaagaaucacaccagccccgacguggaccugggcgacaucagcggcaucaacgccagcguggugaacauccagaaggagaucgaucggcugaacgagguggccaagaaccugaacgagagccugaucgaccugcaggagcugggcaaguacgagcaguacaucaaguggcccugguacaucuggcugggcuucaucgccggccugaucgccaucgugauggugaccaucaugcugugcugcaugaccagcugcugcagcugccugaagggcuguugcagcugcggcagcugcugcaaguucgacgaggacgacagcgagcccgugcugaagggcgugaagcugcacuacaccugaggacuaguuauaagacugacuagcccgaugggccucccaacgggcccuccuccccuccuugcaccgagagaucucaaaggcucuuuucagagccaccaaaaaaaaaaaaaaaaaaaaaaaaaaaaaaaaaaaaaaaaaaaaaaaaaaaaaaaaaaaaaaaaaaaaaaaaaaaaaaaaaaaaaaaaaaaaaaaaaaaaa

SEQ ID NO: 24654 - RNA, 4035 nt, Artificial Sequence
  SARS-CoV-2/Wuhan/WIV05/2019__EPI_ISL_402128 spike protein mRNA gc (1-1273)(K986P_V987P_ D614G)
aggagaaagcuuaccauguucguguuccuggugcugcugccccuggugagcagccagugcgugaaccugaccacccggacccagcugccaccagccuacaccaacagcuucacccggggcgucuacuaccccgacaagguguuccggagcagcguccugcacagcacccaggaccuguuccugcccuucuucagcaacgugaccugguuccacgccauccacgugagcggcaccaacggcaccaagcgguucgacaaccccgugcugcccuucaacgacggcguguacuucgccagcaccgagaagagcaacaucauccggggcuggaucuucggcaccacccuggacagcaagacccagagccugcugaucgugaauaacgccaccaacguggugaucaaggugugcgaguuccaguucugcaacgaccccuuccugggcguguacuaccacaagaacaacaagagcuggauggagagcgaguuccggguguacagcagcgccaacaacugcaccuucgaguacgugagccagcccuuccugauggaccuggagggcaagcagggcaacuucaagaaccugcgggaguucguguucaagaacaucgacggcuacuucaagaucuacagcaagcacaccccaaucaaccuggugcgggaucugccccagggcuucucagcccuggagccccugguggaccugcccaucggcaucaacaucacccgguuccagacccugcuggcccugcaccggagcuaccugaccccaggcgacagcagcagcggguggacagcaggcgcggcugcuuacuacgugggcuaccugcagccccggaccuuccugcugaaguacaacgagaacggcaccaucaccgacgccguggacugcgcccuggacccucugagcgagaccaagugcacccugaagagcuucaccguggagaagggcaucuaccagaccagcaacuuccgggugcagcccaccgagagcaucgugcgguuccccaacaucaccaaccugugccccuucggcgagguguucaacgccacccgguucgccagcguguacgccuggaaccggaagcggaucagcaacugcguggccgacuacagcgugcuguacaacagcgccagcuucagcaccuucaagugcuacggcgugagccccaccaagcugaacgaccugugcuucaccaacguguacgccgacagcuucgugauccguggcgacgaggugcggcagaucgcacccggccagacaggcaagaucgccgacuacaacuacaagcugcccgacgacuucaccggcugcgugaucgccuggaacagcaacaaccucgacagcaaggugggcggcaacuacaacuaccuguaccggcuguuccggaagagcaaccugaagcccuucgagcgggacaucagcaccgagaucuaccaagccggcuccaccccuugcaacggcguggagggcuucaacugcuacuucccucugcagagcuacggcuuccagcccaccaacggcgugggcuaccagcccuaccgggugguggugcugagcuucgagcugcugcacgccccagccaccguguguggccccaagaagagcaccaaccuggugaagaacaagugcgugaacuucaacuucaacggccuuaccggcaccggcgugcugaccgagagcaacaagaaauuccugcccuuucagcaguucggccgggacaucgccgacaccaccgacgcugugcgggauccccagacccuggagauccuggacaucaccccuugcagcuucggcggcgugagcgugaucaccccaggcaccaacaccagcaaccagguggccgugcuguaccagggcgugaacugcaccgaggugcccguggccauccacgccgaccagcugacacccaccuggcgggucuacagcaccggcagcaacguguuccagacccgggccgguugccugaucggcgccgagcacgugaacaacagcuacgagugcgacauccccaucggcgccggcaucugugccagcuaccagacccagaccaauucaccccggagggcaaggagcguggccagccagagcaucaucgccuacaccaugagccugggcgccgagaacagcguggccuacagcaacaacagcaucgccauccccaccaacuucaccaucagcgugaccaccgagauucugcccgugagcaugaccaagaccagcguggacugcaccauguacaucugcggcgacagcaccgagugcagcaaccugcugcugcaguacggcagcuucugcacccagcugaaccgggcccugaccggcaucgccguggagcaggacaagaacacccaggagguguucgcccaggugaagcagaucuacaagaccccucccaucaaggacuucggcggcuucaacuucagccagauccugcccgaccccagcaagcccagcaagcggagcuucaucgaggaccugcuguucaacaaggugacccuagccgacgccggcuucaucaagcaguacggcgacugccucggcgacauagccgcccgggaccugaucugcgcccagaaguucaacggccugaccgugcugccuccccugcugaccgacgagaugaucgcccaguacaccagcgcccuguuagccggaaccaucaccagcggcuggacuuucggcgcuggagccgcucugcagauccccuucgccaugcagauggccuaccgguucaacggcaucggcgugacccagaacgugcuguacgagaaccagaagcugaucgccaaccaguucaacagcgccaucggcaagauccaggacagccugagcagcaccgcuagcgcccugggcaagcugcaggacguggugaaccagaacgcccaggcccugaacacccuggugaagcagcugagcagcaacuucggcgccaucagcagcgugcugaacgacauccugagccggcuggacccucccgaggccgaggugcagaucgaccggcugaucacuggccggcugcagagccugcagaccuacgugacccagcagcugauccgggccgccgagauucgggccagcgccaaccuggccgccaccaagaugagcgagugcgugcugggccagagcaagcggguggacuucugcggcaagggcuaccaccugaugagcuuuccccagagcgcaccccacggagugguguuccugcacgugaccuacgugcccgcccaggagaagaacuucaccaccgccccagccaucugccacgacggcaaggcccacuuuccccgggagggcguguucgugagcaacggcacccacugguucgugacccagcggaacuucuacgagccccagaucaucaccaccgacaacaccuucgugagcggcaacugcgacguggugaucggcaucgugaacaacaccguguacgauccccugcagcccgagcuggacagcuucaaggaggagcuggacaaguacuucaagaaucacaccagccccgacguggaccugggcgacaucagcggcaucaacgccagcguggugaacauccagaaggagaucgaucggcugaacgagguggccaagaaccugaacgagagccugaucgaccugcaggagcugggcaaguacgagcaguacaucaaguggcccugguacaucuggcugggcuucaucgccggccugaucgccaucgugauggugaccaucaugcugugcugcaugaccagcugcugcagcugccugaagggcuguugcagcugcggcagcugcugcaaguucgacgaggacgacagcgagcccgugcugaagggcgugaagcugcacuacaccugaggacuaguuauaagacugacuagcccgaugggccucccaacgggcccuccuccccuccuugcaccgagagaucucaaaggcucuuuucagagccaccaaaaaaaaaaaaaaaaaaaaaaaaaaaaaaaaaaaaaaaaaaaaaaaaaaaaaaaaaaaaaaaaaaaaaaaaaaaaaaaaaaaaaaaaaaaaaaaaaaaaa

SEQ ID NO: 24655 - RNA, 4035 nt, Artificial Sequence
  SARS-CoV-2/Wuhan/WIV05/2019__EPI_ISL_402128 spike protein mRNA gc (1-1273)(K986P_V987P_A222V_D614G)
aggagaaagcuuaccauguucguguuccuggugcugcugccccuggugagcagccagugcgugaaccugaccacccggacccagcugccaccagccuacaccaacagcuucacccggggcgucuacuaccccgacaagguguuccggagcagcguccugcacagcacccaggaccuguuccugcccuucuucagcaacgugaccugguuccacgccauccacgugagcggcaccaacggcaccaagcgguucgacaaccccgugcugcccuucaacgacggcguguacuucgccagcaccgagaagagcaacaucauccggggcuggaucuucggcaccacccuggacagcaagacccagagccugcugaucgugaauaacgccaccaacguggugaucaaggugugcgaguuccaguucugcaacgaccccuuccugggcguguacuaccacaagaacaacaagagcuggauggagagcgaguuccggguguacagcagcgccaacaacugcaccuucgaguacgugagccagcccuuccugauggaccuggagggcaagcagggcaacuucaagaaccugcgggaguucguguucaagaacaucgacggcuacuucaagaucuacagcaagcacaccccaaucaaccuggugcgggaucugccccagggcuucucagugcuggagccccugguggaccugcccaucggcaucaacaucacccgguuccagacccugcuggcccugcaccggagcuaccugaccccaggcgacagcagcagcggguggacagcaggcgcggcugcuuacuacgugggcuaccugcagccccggaccuuccugcugaaguacaacgagaacggcaccaucaccgacgccguggacugcgcccuggacccucugagcgagaccaagugcacccugaagagcuucaccguggagaagggcaucuaccagaccagcaacuuccgggugcagcccaccgagagcaucgugcgguuccccaacaucaccaaccugugccccuucggcgagguguucaacgccacccgguucgccagcguguacgccuggaaccggaagcggaucagcaacugcguggccgacuacagcgugcuguacaacagcgccagcuucagcaccuucaagugcuacggcgugagccccaccaagcugaacgaccugugcuucaccaacguguacgccgacagcuucgugauccguggcgacgaggugcggcagaucgcacccggccagacaggcaagaucgccgacuacaacuacaagcugcccgacgacuucaccggcugcgugaucgccuggaacagcaacaaccucgacagcaaggugggcggcaacuacaacuaccuguaccggcuguuccggaagagcaaccugaagcccuucgagcgggacaucagcaccgagaucuaccaagccggcuccaccccuugcaacggcguggagggcuucaacugcuacuucccucugcagagcuacggcuuccagcccaccaacggcgugggcuaccagcccuaccgggugguggugcugagcuucgagcugcugcacgccccagccaccguguguggccccaagaagagcaccaaccuggugaagaacaagugcgugaacuucaacuucaacggccuuaccggcaccggcgugcugaccgagagcaacaagaaauuccugcccuuucagcaguucggccgggacaucgccgacaccaccgacgcugugcgggauccccagacccuggagauccuggacaucaccccuugcagcuucggcggcgugagcgugaucaccccaggcaccaacaccagcaaccagguggccgugcuguaccagggcgugaacugcaccgaggugcccguggccauccacgccgaccagcugacacccaccuggcgggucuacagcaccggcagcaacguguuccagacccgggccgguugccugaucggcgccgagcacgugaacaacagcuacgagugcgacauccccaucggcgccggcaucugugccagcuaccagacccagaccaauucaccccggagggcaaggagcguggccagccagagcaucaucgccuacaccaugagccugggcgccgagaacagcguggccuacagcaacaacagcaucgccauccccaccaacuucaccaucagcgugaccaccgagauucugcccgugagcaugaccaagaccagcguggacugcaccauguacaucugcggcgacagcaccgagugcagcaaccugcugcugcaguacggcagcuucugcacccagcugaaccgggcccugaccggcaucgccguggagcaggacaagaacacccaggagguguucgcccaggugaagcagaucuacaagaccccucccaucaaggacuucggcggcuucaacuucagccagauccugcccgaccccagcaagcccagcaagcggagcuucaucgaggaccugcuguucaacaaggugacccuagccgacgccggcuucaucaagcaguacggcgacugccucggcgacauagccgcccgggaccugaucugcgcccagaaguucaacggccugaccgugcugccuccccugcugaccgacgagaugaucgcccaguacaccagcgcccuguuagccggaaccaucaccagcggcuggacuuucggcgcuggagccgcucugcagauccccuucgccaugcagauggccuaccgguucaacggcaucggcgugacccagaacgugcuguacgagaaccagaagcugaucgccaaccaguucaacagcgccaucggcaagauccaggacagccugagcagcaccgcuagcgcccugggcaagcugcaggacguggugaaccagaacgcccaggcccugaacacccuggugaagcagcugagcagcaacuucggcgccaucagcagcgugcugaacgacauccugagccggcuggacccucccgaggccgaggugcagaucgaccggcugaucacuggccggcugcagagccugcagaccuacgugacccagcagcugauccgggccgccgagauucgggccagcgccaaccuggccgccaccaagaugagcgagugcgugcugggccagagcaagcggguggacuucugcggcaagggcuaccaccugaugagcuuuccccagagcgcaccccacggagugguguuccugcacgugaccuacgugcccgcccaggagaagaacuucaccaccgccccagccaucugccacgacggcaaggcccacuuuccccgggagggcguguucgugagcaacggcacccacugguucgugacccagcggaacuucuacgagccccagaucaucaccaccgacaacaccuucgugagcggcaacugcgacguggugaucggcaucgugaacaacaccguguacgauccccugcagcccgagcuggacagcuucaaggaggagcuggacaaguacuucaagaaucacaccagccccgacguggaccugggcgacaucagcggcaucaacgccagcguggugaacauccagaaggagaucgaucggcugaacgagguggccaagaaccugaacgagagccugaucgaccugcaggagcugggcaaguacgagcaguacaucaaguggcccugguacaucuggcugggcuucaucgccggccugaucgccaucgugauggugaccaucaugcugugcugcaugaccagcugcugcagcugccugaagggcuguugcagcugcggcagcugcugcaaguucgacgaggacgacagcgagcccgugcugaagggcgugaagcugcacuacaccugaggacuaguuauaagacugacuagcccgaugggccucccaacgggcccuccuccccuccuugcaccgagagaucucaaaggcucuuuucagagccaccaaaaaaaaaaaaaaaaaaaaaaaaaaaaaaaaaaaaaaaaaaaaaaaaaaaaaaaaaaaaaaaaaaaaaaaaaaaaaaaaaaaaaaaaaaaaaaaaaaaaa

SEQ ID NO: 24656 - RNA, 4035 nt, Artificial Sequence
  SARS-CoV-2/Wuhan/WIV05/2019__EPI_ISL_402128 spike protein mRNA gc (1-1273)(K986P_V987P_N439K_D614G)
aggagaaagcuuaccauguucguguuccuggugcugcugccccuggugagcagccagugcgugaaccugaccacccggacccagcugccaccagccuacaccaacagcuucacccggggcgucuacuaccccgacaagguguuccggagcagcguccugcacagcacccaggaccuguuccugcccuucuucagcaacgugaccugguuccacgccauccacgugagcggcaccaacggcaccaagcgguucgacaaccccgugcugcccuucaacgacggcguguacuucgccagcaccgagaagagcaacaucauccggggcuggaucuucggcaccacccuggacagcaagacccagagccugcugaucgugaauaacgccaccaacguggugaucaaggugugcgaguuccaguucugcaacgaccccuuccugggcguguacuaccacaagaacaacaagagcuggauggagagcgaguuccggguguacagcagcgccaacaacugcaccuucgaguacgugagccagcccuuccugauggaccuggagggcaagcagggcaacuucaagaaccugcgggaguucguguucaagaacaucgacggcuacuucaagaucuacagcaagcacaccccaaucaaccuggugcgggaucugccccagggcuucucagcccuggagccccugguggaccugcccaucggcaucaacaucacccgguuccagacccugcuggcccugcaccggagcuaccugaccccaggcgacagcagcagcggguggacagcaggcgcggcugcuuacuacgugggcuaccugcagccccggaccuuccugcugaaguacaacgagaacggcaccaucaccgacgccguggacugcgcccuggacccucugagcgagaccaagugcacccugaagagcuucaccguggagaagggcaucuaccagaccagcaacuuccgggugcagcccaccgagagcaucgugcgguuccccaacaucaccaaccugugccccuucggcgagguguucaacgccacccgguucgccagcguguacgccuggaaccggaagcggaucagcaacugcguggccgacuacagcgugcuguacaacagcgccagcuucagcaccuucaagugcuacggcgugagccccaccaagcugaacgaccugugcuucaccaacguguacgccgacagcuucgugauccguggcgacgaggugcggcagaucgcacccggccagacaggcaagaucgccgacuacaacuacaagcugcccgacgacuucaccggcugcgugaucgccuggaacagcaagaaccucgacagcaaggugggcggcaacuacaacuaccuguaccggcuguuccggaagagcaaccugaagcccuucgagcgggacaucagcaccgagaucuaccaagccggcuccaccccuugcaacggcguggagggcuucaacugcuacuucccucugcagagcuacggcuuccagcccaccaacggcgugggcuaccagcccuaccgggugguggugcugagcuucgagcugcugcacgccccagccaccguguguggccccaagaagagcaccaaccuggugaagaacaagugcgugaacuucaacuucaacggccuuaccggcaccggcgugcugaccgagagcaacaagaaauuccugcccuuucagcaguucggccgggacaucgccgacaccaccgacgcugugcgggauccccagacccuggagauccuggacaucaccccuugcagcuucggcggcgugagcgugaucaccccaggcaccaacaccagcaaccagguggccgugcuguaccagggcgugaacugcaccgaggugcccguggccauccacgccgaccagcugacacccaccuggcgggucuacagcaccggcagcaacguguuccagacccgggccgguugccugaucggcgccgagcacgugaacaacagcuacgagugcgacauccccaucggcgccggcaucugugccagcuaccagacccagaccaauucaccccggagggcaaggagcguggccagccagagcaucaucgccuacaccaugagccugggcgccgagaacagcguggccuacagcaacaacagcaucgccauccccaccaacuucaccaucagcgugaccaccgagauucugcccgugagcaugaccaagaccagcguggacugcaccauguacaucugcggcgacagcaccgagugcagcaaccugcugcugcaguacggcagcuucugcacccagcugaaccgggcccugaccggcaucgccguggagcaggacaagaacacccaggagguguucgcccaggugaagcagaucuacaagaccccucccaucaaggacuucggcggcuucaacuucagccagauccugcccgaccccagcaagcccagcaagcggagcuucaucgaggaccugcuguucaacaaggugacccuagccgacgccggcuucaucaagcaguacggcgacugccucggcgacauagccgcccgggaccugaucugcgcccagaaguucaacggccugaccgugcugccuccccugcugaccgacgagaugaucgcccaguacaccagcgcccuguuagccggaaccaucaccagcggcuggacuuucggcgcuggagccgcucugcagauccccuucgccaugcagauggccuaccgguucaacggcaucggcgugacccagaacgugcuguacgagaaccagaagcugaucgccaaccaguucaacagcgccaucggcaagauccaggacagccugagcagcaccgcuagcgcccugggcaagcugcaggacguggugaaccagaacgcccaggcccugaacacccuggugaagcagcugagcagcaacuucggcgccaucagcagcgugcugaacgacauccugagccggcuggacccucccgaggccgaggugcagaucgaccggcugaucacuggccggcugcagagccugcagaccuacgugacccagcagcugauccgggccgccgagauucgggccagcgccaaccuggccgccaccaagaugagcgagugcgugcugggccagagcaagcggguggacuucugcggcaagggcuaccaccugaugagcuuuccccagagcgcaccccacggagugguguuccugcacgugaccuacgugcccgcccaggagaagaacuucaccaccgccccagccaucugccacgacggcaaggcccacuuuccccgggagggcguguucgugagcaacggcacccacugguucgugacccagcggaacuucuacgagccccagaucaucaccaccgacaacaccuucgugagcggcaacugcgacguggugaucggcaucgugaacaacaccguguacgauccccugcagcccgagcuggacagcuucaaggaggagcuggacaaguacuucaagaaucacaccagccccgacguggaccugggcgacaucagcggcaucaacgccagcguggugaacauccagaaggagaucgaucggcugaacgagguggccaagaaccugaacgagagccugaucgaccugcaggagcugggcaaguacgagcaguacaucaaguggcccugguacaucuggcugggcuucaucgccggccugaucgccaucgugauggugaccaucaugcugugcugcaugaccagcugcugcagcugccugaagggcuguugcagcugcggcagcugcugcaaguucgacgaggacgacagcgagcccgugcugaagggcgugaagcugcacuacaccugaggacuaguuauaagacugacuagcccgaugggccucccaacgggcccuccuccccuccuugcaccgagagaucucaaaggcucuuuucagagccaccaaaaaaaaaaaaaaaaaaaaaaaaaaaaaaaaaaaaaaaaaaaaaaaaaaaaaaaaaaaaaaaaaaaaaaaaaaaaaaaaaaaaaaaaaaaaaaaaaaaaa

SEQ ID NO: 24657 - RNA, 4035 nt, Artificial Sequence
  SARS-CoV-2/Wuhan/WIV05/2019__EPI_ISL_402128 spike protein mRNA gc (1-1273)(K986P_V987P_S477N_D614G)
aggagaaagcuuaccauguucguguuccuggugcugcugccccuggugagcagccagugcgugaaccugaccacccggacccagcugccaccagccuacaccaacagcuucacccggggcgucuacuaccccgacaagguguuccggagcagcguccugcacagcacccaggaccuguuccugcccuucuucagcaacgugaccugguuccacgccauccacgugagcggcaccaacggcaccaagcgguucgacaaccccgugcugcccuucaacgacggcguguacuucgccagcaccgagaagagcaacaucauccggggcuggaucuucggcaccacccuggacagcaagacccagagccugcugaucgugaauaacgccaccaacguggugaucaaggugugcgaguuccaguucugcaacgaccccuuccugggcguguacuaccacaagaacaacaagagcuggauggagagcgaguuccggguguacagcagcgccaacaacugcaccuucgaguacgugagccagcccuuccugauggaccuggagggcaagcagggcaacuucaagaaccugcgggaguucguguucaagaacaucgacggcuacuucaagaucuacagcaagcacaccccaaucaaccuggugcgggaucugccccagggcuucucagcccuggagccccugguggaccugcccaucggcaucaacaucacccgguuccagacccugcuggcccugcaccggagcuaccugaccccaggcgacagcagcagcggguggacagcaggcgcggcugcuuacuacgugggcuaccugcagccccggaccuuccugcugaaguacaacgagaacggcaccaucaccgacgccguggacugcgcccuggacccucugagcgagaccaagugcacccugaagagcuucaccguggagaagggcaucuaccagaccagcaacuuccgggugcagcccaccgagagcaucgugcgguuccccaacaucaccaaccugugccccuucggcgagguguucaacgccacccgguucgccagcguguacgccuggaaccggaagcggaucagcaacugcguggccgacuacagcgugcuguacaacagcgccagcuucagcaccuucaagugcuacggcgugagccccaccaagcugaacgaccugugcuucaccaacguguacgccgacagcuucgugauccguggcgacgaggugcggcagaucgcacccggccagacaggcaagaucgccgacuacaacuacaagcugcccgacgacuucaccggcugcgugaucgccuggaacagcaacaaccucgacagcaaggugggcggcaacuacaacuaccuguaccggcuguuccggaagagcaaccugaagcccuucgagcgggacaucagcaccgagaucuaccaagccggcaacaccccuugcaacggcguggagggcuucaacugcuacuucccucugcagagcuacggcuuccagcccaccaacggcgugggcuaccagcccuaccgggugguggugcugagcuucgagcugcugcacgccccagccaccguguguggccccaagaagagcaccaaccuggugaagaacaagugcgugaacuucaacuucaacggccuuaccggcaccggcgugcugaccgagagcaacaagaaauuccugcccuuucagcaguucggccgggacaucgccgacaccaccgacgcugugcgggauccccagacccuggagauccuggacaucaccccuugcagcuucggcggcgugagcgugaucaccccaggcaccaacaccagcaaccagguggccgugcuguaccagggcgugaacugcaccgaggugcccguggccauccacgccgaccagcugacacccaccuggcgggucuacagcaccggcagcaacguguuccagacccgggccgguugccugaucggcgccgagcacgugaacaacagcuacgagugcgacauccccaucggcgccggcaucugugccagcuaccagacccagaccaauucaccccggagggcaaggagcguggccagccagagcaucaucgccuacaccaugagccugggcgccgagaacagcguggccuacagcaacaacagcaucgccauccccaccaacuucaccaucagcgugaccaccgagauucugcccgugagcaugaccaagaccagcguggacugcaccauguacaucugcggcgacagcaccgagugcagcaaccugcugcugcaguacggcagcuucugcacccagcugaaccgggcccugaccggcaucgccguggagcaggacaagaacacccaggagguguucgcccaggugaagcagaucuacaagaccccucccaucaaggacuucggcggcuucaacuucagccagauccugcccgaccccagcaagcccagcaagcggagcuucaucgaggaccugcuguucaacaaggugacccuagccgacgccggcuucaucaagcaguacggcgacugccucggcgacauagccgcccgggaccugaucugcgcccagaaguucaacggccugaccgugcugccuccccugcugaccgacgagaugaucgcccaguacaccagcgcccuguuagccggaaccaucaccagcggcuggacuuucggcgcuggagccgcucugcagauccccuucgccaugcagauggccuaccgguucaacggcaucggcgugacccagaacgugcuguacgagaaccagaagcugaucgccaaccaguucaacagcgccaucggcaagauccaggacagccugagcagcaccgcuagcgcccugggcaagcugcaggacguggugaaccagaacgcccaggcccugaacacccuggugaagcagcugagcagcaacuucggcgccaucagcagcgugcugaacgacauccugagccggcuggacccucccgaggccgaggugcagaucgaccggcugaucacuggccggcugcagagccugcagaccuacgugacccagcagcugauccgggccgccgagauucgggccagcgccaaccuggccgccaccaagaugagcgagugcgugcugggccagagcaagcggguggacuucugcggcaagggcuaccaccugaugagcuuuccccagagcgcaccccacggagugguguuccugcacgugaccuacgugcccgcccaggagaagaacuucaccaccgccccagccaucugccacgacggcaaggcccacuuuccccgggagggcguguucgugagcaacggcacccacugguucgugacccagcggaacuucuacgagccccagaucaucaccaccgacaacaccuucgugagcggcaacugcgacguggugaucggcaucgugaacaacaccguguacgauccccugcagcccgagcuggacagcuucaaggaggagcuggacaaguacuucaagaaucacaccagccccgacguggaccugggcgacaucagcggcaucaacgccagcguggugaacauccagaaggagaucgaucggcugaacgagguggccaagaaccugaacgagagccugaucgaccugcaggagcugggcaaguacgagcaguacaucaaguggcccugguacaucuggcugggcuucaucgccggccugaucgccaucgugauggugaccaucaugcugugcugcaugaccagcugcugcagcugccugaagggcuguugcagcugcggcagcugcugcaaguucgacgaggacgacagcgagcccgugcugaagggcgugaagcugcacuacaccugaggacuaguuauaagacugacuagcccgaugggccucccaacgggcccuccuccccuccuugcaccgagagaucucaaaggcucuuuucagagccaccaaaaaaaaaaaaaaaaaaaaaaaaaaaaaaaaaaaaaaaaaaaaaaaaaaaaaaaaaaaaaaaaaaaaaaaaaaaaaaaaaaaaaaaaaaaaaaaaaaaaa

SEQ ID NO: 24658 - RNA, 4035 nt, Artificial Sequence
  SARS-CoV-2/Wuhan/WIV05/2019__EPI_ISL_402128 spike protein mRNA gc (1-1273)(K986P_V987P_N501Y_D614G)
aggagaaagcuuaccauguucguguuccuggugcugcugccccuggugagcagccagugcgugaaccugaccacccggacccagcugccaccagccuacaccaacagcuucacccggggcgucuacuaccccgacaagguguuccggagcagcguccugcacagcacccaggaccuguuccugcccuucuucagcaacgugaccugguuccacgccauccacgugagcggcaccaacggcaccaagcgguucgacaaccccgugcugcccuucaacgacggcguguacuucgccagcaccgagaagagcaacaucauccggggcuggaucuucggcaccacccuggacagcaagacccagagccugcugaucgugaauaacgccaccaacguggugaucaaggugugcgaguuccaguucugcaacgaccccuuccugggcguguacuaccacaagaacaacaagagcuggauggagagcgaguuccggguguacagcagcgccaacaacugcaccuucgaguacgugagccagcccuuccugauggaccuggagggcaagcagggcaacuucaagaaccugcgggaguucguguucaagaacaucgacggcuacuucaagaucuacagcaagcacaccccaaucaaccuggugcgggaucugccccagggcuucucagcccuggagccccugguggaccugcccaucggcaucaacaucacccgguuccagacccugcuggcccugcaccggagcuaccugaccccaggcgacagcagcagcggguggacagcaggcgcggcugcuuacuacgugggcuaccugcagccccggaccuuccugcugaaguacaacgagaacggcaccaucaccgacgccguggacugcgcccuggacccucugagcgagaccaagugcacccugaagagcuucaccguggagaagggcaucuaccagaccagcaacuuccgggugcagcccaccgagagcaucgugcgguuccccaacaucaccaaccugugccccuucggcgagguguucaacgccacccgguucgccagcguguacgccuggaaccggaagcggaucagcaacugcguggccgacuacagcgugcuguacaacagcgccagcuucagcaccuucaagugcuacggcgugagccccaccaagcugaacgaccugugcuucaccaacguguacgccgacagcuucgugauccguggcgacgaggugcggcagaucgcacccggccagacaggcaagaucgccgacuacaacuacaagcugcccgacgacuucaccggcugcgugaucgccuggaacagcaacaaccucgacagcaaggugggcggcaacuacaacuaccuguaccggcuguuccggaagagcaaccugaagcccuucgagcgggacaucagcaccgagaucuaccaagccggcuccaccccuugcaacggcguggagggcuucaacugcuacuucccucugcagagcuacggcuuccagcccaccuacggcgugggcuaccagcccuaccgggugguggugcugagcuucgagcugcugcacgccccagccaccguguguggccccaagaagagcaccaaccuggugaagaacaagugcgugaacuucaacuucaacggccuuaccggcaccggcgugcugaccgagagcaacaagaaauuccugcccuuucagcaguucggccgggacaucgccgacaccaccgacgcugugcgggauccccagacccuggagauccuggacaucaccccuugcagcuucggcggcgugagcgugaucaccccaggcaccaacaccagcaaccagguggccgugcuguaccagggcgugaacugcaccgaggugcccguggccauccacgccgaccagcugacacccaccuggcgggucuacagcaccggcagcaacguguuccagacccgggccgguugccugaucggcgccgagcacgugaacaacagcuacgagugcgacauccccaucggcgccggcaucugugccagcuaccagacccagaccaauucaccccggagggcaaggagcguggccagccagagcaucaucgccuacaccaugagccugggcgccgagaacagcguggccuacagcaacaacagcaucgccauccccaccaacuucaccaucagcgugaccaccgagauucugcccgugagcaugaccaagaccagcguggacugcaccauguacaucugcggcgacagcaccgagugcagcaaccugcugcugcaguacggcagcuucugcacccagcugaaccgggcccugaccggcaucgccguggagcaggacaagaacacccaggagguguucgcccaggugaagcagaucuacaagaccccucccaucaaggacuucggcggcuucaacuucagccagauccugcccgaccccagcaagcccagcaagcggagcuucaucgaggaccugcuguucaacaaggugacccuagccgacgccggcuucaucaagcaguacggcgacugccucggcgacauagccgcccgggaccugaucugcgcccagaaguucaacggccugaccgugcugccuccccugcugaccgacgagaugaucgcccaguacaccagcgcccuguuagccggaaccaucaccagcggcuggacuuucggcgcuggagccgcucugcagauccccuucgccaugcagauggccuaccgguucaacggcaucggcgugacccagaacgugcuguacgagaaccagaagcugaucgccaaccaguucaacagcgccaucggcaagauccaggacagccugagcagcaccgcuagcgcccugggcaagcugcaggacguggugaaccagaacgcccaggcccugaacacccuggugaagcagcugagcagcaacuucggcgccaucagcagcgugcugaacgacauccugagccggcuggacccucccgaggccgaggugcagaucgaccggcugaucacuggccggcugcagagccugcagaccuacgugacccagcagcugauccgggccgccgagauucgggccagcgccaaccuggccgccaccaagaugagcgagugcgugcugggccagagcaagcggguggacuucugcggcaagggcuaccaccugaugagcuuuccccagagcgcaccccacggagugguguuccugcacgugaccuacgugcccgcccaggagaagaacuucaccaccgccccagccaucugccacgacggcaaggcccacuuuccccgggagggcguguucgugagcaacggcacccacugguucgugacccagcggaacuucuacgagccccagaucaucaccaccgacaacaccuucgugagcggcaacugcgacguggugaucggcaucgugaacaacaccguguacgauccccugcagcccgagcuggacagcuucaaggaggagcuggacaaguacuucaagaaucacaccagccccgacguggaccugggcgacaucagcggcaucaacgccagcguggugaacauccagaaggagaucgaucggcugaacgagguggccaagaaccugaacgagagccugaucgaccugcaggagcugggcaaguacgagcaguacaucaaguggcccugguacaucuggcugggcuucaucgccggccugaucgccaucgugauggugaccaucaugcugugcugcaugaccagcugcugcagcugccugaagggcuguugcagcugcggcagcugcugcaaguucgacgaggacgacagcgagcccgugcugaagggcgugaagcugcacuacaccugaggacuaguuauaagacugacuagcccgaugggccucccaacgggcccuccuccccuccuugcaccgagagaucucaaaggcucuuuucagagccaccaaaaaaaaaaaaaaaaaaaaaaaaaaaaaaaaaaaaaaaaaaaaaaaaaaaaaaaaaaaaaaaaaaaaaaaaaaaaaaaaaaaaaaaaaaaaaaaaaaaaa

SEQ ID NO: 24659 - RNA, 4029 nt, Artificial Sequence
  SARS-CoV-2/Wuhan/WIV05/2019__EPI_ISL_402128 spike protein mRNA gc (1-1273)(K986P_V987P_H69del_V70del_D614G)
aggagaaagcuuaccauguucguguuccuggugcugcugccccuggugagcagccagugcgugaaccugaccacccggacccagcugccaccagccuacaccaacagcuucacccggggcgucuacuaccccgacaagguguuccggagcagcguccugcacagcacccaggaccuguuccugcccuucuucagcaacgugaccugguuccacgccaucagcggcaccaacggcaccaagcgguucgacaaccccgugcugcccuucaacgacggcguguacuucgccagcaccgagaagagcaacaucauccggggcuggaucuucggcaccacccuggacagcaagacccagagccugcugaucgugaauaacgccaccaacguggugaucaaggugugcgaguuccaguucugcaacgaccccuuccugggcguguacuaccacaagaacaacaagagcuggauggagagcgaguuccggguguacagcagcgccaacaacugcaccuucgaguacgugagccagcccuuccugauggaccuggagggcaagcagggcaacuucaagaaccugcgggaguucguguucaagaacaucgacggcuacuucaagaucuacagcaagcacaccccaaucaaccuggugcgggaucugccccagggcuucucagcccuggagccccugguggaccugcccaucggcaucaacaucacccgguuccagacccugcuggcccugcaccggagcuaccugaccccaggcgacagcagcagcggguggacagcaggcgcggcugcuuacuacgugggcuaccugcagccccggaccuuccugcugaaguacaacgagaacggcaccaucaccgacgccguggacugcgcccuggacccucugagcgagaccaagugcacccugaagagcuucaccguggagaagggcaucuaccagaccagcaacuuccgggugcagcccaccgagagcaucgugcgguuccccaacaucaccaaccugugccccuucggcgagguguucaacgccacccgguucgccagcguguacgccuggaaccggaagcggaucagcaacugcguggccgacuacagcgugcuguacaacagcgccagcuucagcaccuucaagugcuacggcgugagccccaccaagcugaacgaccugugcuucaccaacguguacgccgacagcuucgugauccguggcgacgaggugcggcagaucgcacccggccagacaggcaagaucgccgacuacaacuacaagcugcccgacgacuucaccggcugcgugaucgccuggaacagcaacaaccucgacagcaaggugggcggcaacuacaacuaccuguaccggcuguuccggaagagcaaccugaagcccuucgagcgggacaucagcaccgagaucuaccaagccggcuccaccccuugcaacggcguggagggcuucaacugcuacuucccucugcagagcuacggcuuccagcccaccaacggcgugggcuaccagcccuaccgggugguggugcugagcuucgagcugcugcacgccccagccaccguguguggccccaagaagagcaccaaccuggugaagaacaagugcgugaacuucaacuucaacggccuuaccggcaccggcgugcugaccgagagcaacaagaaauuccugcccuuucagcaguucggccgggacaucgccgacaccaccgacgcugugcgggauccccagacccuggagauccuggacaucaccccuugcagcuucggcggcgugagcgugaucaccccaggcaccaacaccagcaaccagguggccgugcuguaccagggcgugaacugcaccgaggugcccguggccauccacgccgaccagcugacacccaccuggcgggucuacagcaccggcagcaacguguuccagacccgggccgguugccugaucggcgccgagcacgugaacaacagcuacgagugcgacauccccaucggcgccggcaucugugccagcuaccagacccagaccaauucaccccggagggcaaggagcguggccagccagagcaucaucgccuacaccaugagccugggcgccgagaacagcguggccuacagcaacaacagcaucgccauccccaccaacuucaccaucagcgugaccaccgagauucugcccgugagcaugaccaagaccagcguggacugcaccauguacaucugcggcgacagcaccgagugcagcaaccugcugcugcaguacggcagcuucugcacccagcugaaccgggcccugaccggcaucgccguggagcaggacaagaacacccaggagguguucgcccaggugaagcagaucuacaagaccccucccaucaaggacuucggcggcuucaacuucagccagauccugcccgaccccagcaagcccagcaagcggagcuucaucgaggaccugcuguucaacaaggugacccuagccgacgccggcuucaucaagcaguacggcgacugccucggcgacauagccgcccgggaccugaucugcgcccagaaguucaacggccugaccgugcugccuccccugcugaccgacgagaugaucgcccaguacaccagcgcccuguuagccggaaccaucaccagcggcuggacuuucggcgcuggagccgcucugcagauccccuucgccaugcagauggccuaccgguucaacggcaucggcgugacccagaacgugcuguacgagaaccagaagcugaucgccaaccaguucaacagcgccaucggcaagauccaggacagccugagcagcaccgcuagcgcccugggcaagcugcaggacguggugaaccagaacgcccaggcccugaacacccuggugaagcagcugagcagcaacuucggcgccaucagcagcgugcugaacgacauccugagccggcuggacccucccgaggccgaggugcagaucgaccggcugaucacuggccggcugcagagccugcagaccuacgugacccagcagcugauccgggccgccgagauucgggccagcgccaaccuggccgccaccaagaugagcgagugcgugcugggccagagcaagcggguggacuucugcggcaagggcuaccaccugaugagcuuuccccagagcgcaccccacggagugguguuccugcacgugaccuacgugcccgcccaggagaagaacuucaccaccgccccagccaucugccacgacggcaaggcccacuuuccccgggagggcguguucgugagcaacggcacccacugguucgugacccagcggaacuucuacgagccccagaucaucaccaccgacaacaccuucgugagcggcaacugcgacguggugaucggcaucgugaacaacaccguguacgauccccugcagcccgagcuggacagcuucaaggaggagcuggacaaguacuucaagaaucacaccagccccgacguggaccugggcgacaucagcggcaucaacgccagcguggugaacauccagaaggagaucgaucggcugaacgagguggccaagaaccugaacgagagccugaucgaccugcaggagcugggcaaguacgagcaguacaucaaguggcccugguacaucuggcugggcuucaucgccggccugaucgccaucgugauggugaccaucaugcugugcugcaugaccagcugcugcagcugccugaagggcuguugcagcugcggcagcugcugcaaguucgacgaggacgacagcgagcccgugcugaagggcgugaagcugcacuacaccugaggacuaguuauaagacugacuagcccgaugggccucccaacgggcccuccuccccuccuugcaccgagagaucucaaaggcucuuuucagagccaccaaaaaaaaaaaaaaaaaaaaaaaaaaaaaaaaaaaaaaaaaaaaaaaaaaaaaaaaaaaaaaaaaaaaaaaaaaaaaaaaaaaaaaaaaaaaaaaaaaaaa

SEQ ID NO: 24660 - RNA, 4035 nt, Artificial Sequence
  SARS-CoV-2/Wuhan/WIV05/2019__EPI_ISL_402128 spike protein mRNA gc (1-1273)(K986P_V987P_Y453F_D614G)
aggagaaagcuuaccauguucguguuccuggugcugcugccccuggugagcagccagugcgugaaccugaccacccggacccagcugccaccagccuacaccaacagcuucacccggggcgucuacuaccccgacaagguguuccggagcagcguccugcacagcacccaggaccuguuccugcccuucuucagcaacgugaccugguuccacgccauccacgugagcggcaccaacggcaccaagcgguucgacaaccccgugcugcccuucaacgacggcguguacuucgccagcaccgagaagagcaacaucauccggggcuggaucuucggcaccacccuggacagcaagacccagagccugcugaucgugaauaacgccaccaacguggugaucaaggugugcgaguuccaguucugcaacgaccccuuccugggcguguacuaccacaagaacaacaagagcuggauggagagcgaguuccggguguacagcagcgccaacaacugcaccuucgaguacgugagccagcccuuccugauggaccuggagggcaagcagggcaacuucaagaaccugcgggaguucguguucaagaacaucgacggcuacuucaagaucuacagcaagcacaccccaaucaaccuggugcgggaucugccccagggcuucucagcccuggagccccugguggaccugcccaucggcaucaacaucacccgguuccagacccugcuggcccugcaccggagcuaccugaccccaggcgacagcagcagcggguggacagcaggcgcggcugcuuacuacgugggcuaccugcagccccggaccuuccugcugaaguacaacgagaacggcaccaucaccgacgccguggacugcgcccuggacccucugagcgagaccaagugcacccugaagagcuucaccguggagaagggcaucuaccagaccagcaacuuccgggugcagcccaccgagagcaucgugcgguuccccaacaucaccaaccugugccccuucggcgagguguucaacgccacccgguucgccagcguguacgccuggaaccggaagcggaucagcaacugcguggccgacuacagcgugcuguacaacagcgccagcuucagcaccuucaagugcuacggcgugagccccaccaagcugaacgaccugugcuucaccaacguguacgccgacagcuucgugauccguggcgacgaggugcggcagaucgcacccggccagacaggcaagaucgccgacuacaacuacaagcugcccgacgacuucaccggcugcgugaucgccuggaacagcaacaaccucgacagcaaggugggcggcaacuacaacuaccuguuccggcuguuccggaagagcaaccugaagcccuucgagcgggacaucagcaccgagaucuaccaagccggcuccaccccuugcaacggcguggagggcuucaacugcuacuucccucugcagagcuacggcuuccagcccaccaacggcgugggcuaccagcccuaccgggugguggugcugagcuucgagcugcugcacgccccagccaccguguguggccccaagaagagcaccaaccuggugaagaacaagugcgugaacuucaacuucaacggccuuaccggcaccggcgugcugaccgagagcaacaagaaauuccugcccuuucagcaguucggccgggacaucgccgacaccaccgacgcugugcgggauccccagacccuggagauccuggacaucaccccuugcagcuucggcggcgugagcgugaucaccccaggcaccaacaccagcaaccagguggccgugcuguaccagggcgugaacugcaccgaggugcccguggccauccacgccgaccagcugacacccaccuggcgggucuacagcaccggcagcaacguguuccagacccgggccgguugccugaucggcgccgagcacgugaacaacagcuacgagugcgacauccccaucggcgccggcaucugugccagcuaccagacccagaccaauucaccccggagggcaaggagcguggccagccagagcaucaucgccuacaccaugagccugggcgccgagaacagcguggccuacagcaacaacagcaucgccauccccaccaacuucaccaucagcgugaccaccgagauucugcccgugagcaugaccaagaccagcguggacugcaccauguacaucugcggcgacagcaccgagugcagcaaccugcugcugcaguacggcagcuucugcacccagcugaaccgggcccugaccggcaucgccguggagcaggacaagaacacccaggagguguucgcccaggugaagcagaucuacaagaccccucccaucaaggacuucggcggcuucaacuucagccagauccugcccgaccccagcaagcccagcaagcggagcuucaucgaggaccugcuguucaacaaggugacccuagccgacgccggcuucaucaagcaguacggcgacugccucggcgacauagccgcccgggaccugaucugcgcccagaaguucaacggccugaccgugcugccuccccugcugaccgacgagaugaucgcccaguacaccagcgcccuguuagccggaaccaucaccagcggcuggacuuucggcgcuggagccgcucugcagauccccuucgccaugcagauggccuaccgguucaacggcaucggcgugacccagaacgugcuguacgagaaccagaagcugaucgccaaccaguucaacagcgccaucggcaagauccaggacagccugagcagcaccgcuagcgcccugggcaagcugcaggacguggugaaccagaacgcccaggcccugaacacccuggugaagcagcugagcagcaacuucggcgccaucagcagcgugcugaacgacauccugagccggcuggacccucccgaggccgaggugcagaucgaccggcugaucacuggccggcugcagagccugcagaccuacgugacccagcagcugauccgggccgccgagauucgggccagcgccaaccuggccgccaccaagaugagcgagugcgugcugggccagagcaagcggguggacuucugcggcaagggcuaccaccugaugagcuuuccccagagcgcaccccacggagugguguuccugcacgugaccuacgugcccgcccaggagaagaacuucaccaccgccccagccaucugccacgacggcaaggcccacuuuccccgggagggcguguucgugagcaacggcacccacugguucgugacccagcggaacuucuacgagccccagaucaucaccaccgacaacaccuucgugagcggcaacugcgacguggugaucggcaucgugaacaacaccguguacgauccccugcagcccgagcuggacagcuucaaggaggagcuggacaaguacuucaagaaucacaccagccccgacguggaccugggcgacaucagcggcaucaacgccagcguggugaacauccagaaggagaucgaucggcugaacgagguggccaagaaccugaacgagagccugaucgaccugcaggagcugggcaaguacgagcaguacaucaaguggcccugguacaucuggcugggcuucaucgccggccugaucgccaucgugauggugaccaucaugcugugcugcaugaccagcugcugcagcugccugaagggcuguugcagcugcggcagcugcugcaaguucgacgaggacgacagcgagcccgugcugaagggcgugaagcugcacuacaccugaggacuaguuauaagacugacuagcccgaugggccucccaacgggcccuccuccccuccuugcaccgagagaucucaaaggcucuuuucagagccaccaaaaaaaaaaaaaaaaaaaaaaaaaaaaaaaaaaaaaaaaaaaaaaaaaaaaaaaaaaaaaaaaaaaaaaaaaaaaaaaaaaaaaaaaaaaaaaaaaaaaa

SEQ ID NO: 24661 - RNA, 4035 nt, Artificial Sequence
  SARS-CoV-2/Wuhan/WIV05/2019__EPI_ISL_402128 spike protein mRNA gc (1-1273)(K986P_V987P_D614G_I692V)
aggagaaagcuuaccauguucguguuccuggugcugcugccccuggugagcagccagugcgugaaccugaccacccggacccagcugccaccagccuacaccaacagcuucacccggggcgucuacuaccccgacaagguguuccggagcagcguccugcacagcacccaggaccuguuccugcccuucuucagcaacgugaccugguuccacgccauccacgugagcggcaccaacggcaccaagcgguucgacaaccccgugcugcccuucaacgacggcguguacuucgccagcaccgagaagagcaacaucauccggggcuggaucuucggcaccacccuggacagcaagacccagagccugcugaucgugaauaacgccaccaacguggugaucaaggugugcgaguuccaguucugcaacgaccccuuccugggcguguacuaccacaagaacaacaagagcuggauggagagcgaguuccggguguacagcagcgccaacaacugcaccuucgaguacgugagccagcccuuccugauggaccuggagggcaagcagggcaacuucaagaaccugcgggaguucguguucaagaacaucgacggcuacuucaagaucuacagcaagcacaccccaaucaaccuggugcgggaucugccccagggcuucucagcccuggagccccugguggaccugcccaucggcaucaacaucacccgguuccagacccugcuggcccugcaccggagcuaccugaccccaggcgacagcagcagcggguggacagcaggcgcggcugcuuacuacgugggcuaccugcagccccggaccuuccugcugaaguacaacgagaacggcaccaucaccgacgccguggacugcgcccuggacccucugagcgagaccaagugcacccugaagagcuucaccguggagaagggcaucuaccagaccagcaacuuccgggugcagcccaccgagagcaucgugcgguuccccaacaucaccaaccugugccccuucggcgagguguucaacgccacccgguucgccagcguguacgccuggaaccggaagcggaucagcaacugcguggccgacuacagcgugcuguacaacagcgccagcuucagcaccuucaagugcuacggcgugagccccaccaagcugaacgaccugugcuucaccaacguguacgccgacagcuucgugauccguggcgacgaggugcggcagaucgcacccggccagacaggcaagaucgccgacuacaacuacaagcugcccgacgacuucaccggcugcgugaucgccuggaacagcaacaaccucgacagcaaggugggcggcaacuacaacuaccuguaccggcuguuccggaagagcaaccugaagcccuucgagcgggacaucagcaccgagaucuaccaagccggcuccaccccuugcaacggcguggagggcuucaacugcuacuucccucugcagagcuacggcuuccagcccaccaacggcgugggcuaccagcccuaccgggugguggugcugagcuucgagcugcugcacgccccagccaccguguguggccccaagaagagcaccaaccuggugaagaacaagugcgugaacuucaacuucaacggccuuaccggcaccggcgugcugaccgagagcaacaagaaauuccugcccuuucagcaguucggccgggacaucgccgacaccaccgacgcugugcgggauccccagacccuggagauccuggacaucaccccuugcagcuucggcggcgugagcgugaucaccccaggcaccaacaccagcaaccagguggccgugcuguaccagggcgugaacugcaccgaggugcccguggccauccacgccgaccagcugacacccaccuggcgggucuacagcaccggcagcaacguguuccagacccgggccgguugccugaucggcgccgagcacgugaacaacagcuacgagugcgacauccccaucggcgccggcaucugugccagcuaccagacccagaccaauucaccccggagggcaaggagcguggccagccagagcgugaucgccuacaccaugagccugggcgccgagaacagcguggccuacagcaacaacagcaucgccauccccaccaacuucaccaucagcgugaccaccgagauucugcccgugagcaugaccaagaccagcguggacugcaccauguacaucugcggcgacagcaccgagugcagcaaccugcugcugcaguacggcagcuucugcacccagcugaaccgggcccugaccggcaucgccguggagcaggacaagaacacccaggagguguucgcccaggugaagcagaucuacaagaccccucccaucaaggacuucggcggcuucaacuucagccagauccugcccgaccccagcaagcccagcaagcggagcuucaucgaggaccugcuguucaacaaggugacccuagccgacgccggcuucaucaagcaguacggcgacugccucggcgacauagccgcccgggaccugaucugcgcccagaaguucaacggccugaccgugcugccuccccugcugaccgacgagaugaucgcccaguacaccagcgcccuguuagccggaaccaucaccagcggcuggacuuucggcgcuggagccgcucugcagauccccuucgccaugcagauggccuaccgguucaacggcaucggcgugacccagaacgugcuguacgagaaccagaagcugaucgccaaccaguucaacagcgccaucggcaagauccaggacagccugagcagcaccgcuagcgcccugggcaagcugcaggacguggugaaccagaacgcccaggcccugaacacccuggugaagcagcugagcagcaacuucggcgccaucagcagcgugcugaacgacauccugagccggcuggacccucccgaggccgaggugcagaucgaccggcugaucacuggccggcugcagagccugcagaccuacgugacccagcagcugauccgggccgccgagauucgggccagcgccaaccuggccgccaccaagaugagcgagugcgugcugggccagagcaagcggguggacuucugcggcaagggcuaccaccugaugagcuuuccccagagcgcaccccacggagugguguuccugcacgugaccuacgugcccgcccaggagaagaacuucaccaccgccccagccaucugccacgacggcaaggcccacuuuccccgggagggcguguucgugagcaacggcacccacugguucgugacccagcggaacuucuacgagccccagaucaucaccaccgacaacaccuucgugagcggcaacugcgacguggugaucggcaucgugaacaacaccguguacgauccccugcagcccgagcuggacagcuucaaggaggagcuggacaaguacuucaagaaucacaccagccccgacguggaccugggcgacaucagcggcaucaacgccagcguggugaacauccagaaggagaucgaucggcugaacgagguggccaagaaccugaacgagagccugaucgaccugcaggagcugggcaaguacgagcaguacaucaaguggcccugguacaucuggcugggcuucaucgccggccugaucgccaucgugauggugaccaucaugcugugcugcaugaccagcugcugcagcugccugaagggcuguugcagcugcggcagcugcugcaaguucgacgaggacgacagcgagcccgugcugaagggcgugaagcugcacuacaccugaggacuaguuauaagacugacuagcccgaugggccucccaacgggcccuccuccccuccuugcaccgagagaucucaaaggcucuuuucagagccaccaaaaaaaaaaaaaaaaaaaaaaaaaaaaaaaaaaaaaaaaaaaaaaaaaaaaaaaaaaaaaaaaaaaaaaaaaaaaaaaaaaaaaaaaaaaaaaaaaaaaa

SEQ ID NO: 24662 - RNA, 4035 nt, Artificial Sequence
  SARS-CoV-2/Wuhan/WIV05/2019__EPI_ISL_402128 spike protein mRNA gc (1-1273)(K986P_V987P_D614G_M1229I)
aggagaaagcuuaccauguucguguuccuggugcugcugccccuggugagcagccagugcgugaaccugaccacccggacccagcugccaccagccuacaccaacagcuucacccggggcgucuacuaccccgacaagguguuccggagcagcguccugcacagcacccaggaccuguuccugcccuucuucagcaacgugaccugguuccacgccauccacgugagcggcaccaacggcaccaagcgguucgacaaccccgugcugcccuucaacgacggcguguacuucgccagcaccgagaagagcaacaucauccggggcuggaucuucggcaccacccuggacagcaagacccagagccugcugaucgugaauaacgccaccaacguggugaucaaggugugcgaguuccaguucugcaacgaccccuuccugggcguguacuaccacaagaacaacaagagcuggauggagagcgaguuccggguguacagcagcgccaacaacugcaccuucgaguacgugagccagcccuuccugauggaccuggagggcaagcagggcaacuucaagaaccugcgggaguucguguucaagaacaucgacggcuacuucaagaucuacagcaagcacaccccaaucaaccuggugcgggaucugccccagggcuucucagcccuggagccccugguggaccugcccaucggcaucaacaucacccgguuccagacccugcuggcccugcaccggagcuaccugaccccaggcgacagcagcagcggguggacagcaggcgcggcugcuuacuacgugggcuaccugcagccccggaccuuccugcugaaguacaacgagaacggcaccaucaccgacgccguggacugcgcccuggacccucugagcgagaccaagugcacccugaagagcuucaccguggagaagggcaucuaccagaccagcaacuuccgggugcagcccaccgagagcaucgugcgguuccccaacaucaccaaccugugccccuucggcgagguguucaacgccacccgguucgccagcguguacgccuggaaccggaagcggaucagcaacugcguggccgacuacagcgugcuguacaacagcgccagcuucagcaccuucaagugcuacggcgugagccccaccaagcugaacgaccugugcuucaccaacguguacgccgacagcuucgugauccguggcgacgaggugcggcagaucgcacccggccagacaggcaagaucgccgacuacaacuacaagcugcccgacgacuucaccggcugcgugaucgccuggaacagcaacaaccucgacagcaaggugggcggcaacuacaacuaccuguaccggcuguuccggaagagcaaccugaagcccuucgagcgggacaucagcaccgagaucuaccaagccggcuccaccccuugcaacggcguggagggcuucaacugcuacuucccucugcagagcuacggcuuccagcccaccaacggcgugggcuaccagcccuaccgggugguggugcugagcuucgagcugcugcacgccccagccaccguguguggccccaagaagagcaccaaccuggugaagaacaagugcgugaacuucaacuucaacggccuuaccggcaccggcgugcugaccgagagcaacaagaaauuccugcccuuucagcaguucggccgggacaucgccgacaccaccgacgcugugcgggauccccagacccuggagauccuggacaucaccccuugcagcuucggcggcgugagcgugaucaccccaggcaccaacaccagcaaccagguggccgugcuguaccagggcgugaacugcaccgaggugcccguggccauccacgccgaccagcugacacccaccuggcgggucuacagcaccggcagcaacguguuccagacccgggccgguugccugaucggcgccgagcacgugaacaacagcuacgagugcgacauccccaucggcgccggcaucugugccagcuaccagacccagaccaauucaccccggagggcaaggagcguggccagccagagcaucaucgccuacaccaugagccugggcgccgagaacagcguggccuacagcaacaacagcaucgccauccccaccaacuucaccaucagcgugaccaccgagauucugcccgugagcaugaccaagaccagcguggacugcaccauguacaucugcggcgacagcaccgagugcagcaaccugcugcugcaguacggcagcuucugcacccagcugaaccgggcccugaccggcaucgccguggagcaggacaagaacacccaggagguguucgcccaggugaagcagaucuacaagaccccucccaucaaggacuucggcggcuucaacuucagccagauccugcccgaccccagcaagcccagcaagcggagcuucaucgaggaccugcuguucaacaaggugacccuagccgacgccggcuucaucaagcaguacggcgacugccucggcgacauagccgcccgggaccugaucugcgcccagaaguucaacggccugaccgugcugccuccccugcugaccgacgagaugaucgcccaguacaccagcgcccuguuagccggaaccaucaccagcggcuggacuuucggcgcuggagccgcucugcagauccccuucgccaugcagauggccuaccgguucaacggcaucggcgugacccagaacgugcuguacgagaaccagaagcugaucgccaaccaguucaacagcgccaucggcaagauccaggacagccugagcagcaccgcuagcgcccugggcaagcugcaggacguggugaaccagaacgcccaggcccugaacacccuggugaagcagcugagcagcaacuucggcgccaucagcagcgugcugaacgacauccugagccggcuggacccucccgaggccgaggugcagaucgaccggcugaucacuggccggcugcagagccugcagaccuacgugacccagcagcugauccgggccgccgagauucgggccagcgccaaccuggccgccaccaagaugagcgagugcgugcugggccagagcaagcggguggacuucugcggcaagggcuaccaccugaugagcuuuccccagagcgcaccccacggagugguguuccugcacgugaccuacgugcccgcccaggagaagaacuucaccaccgccccagccaucugccacgacggcaaggcccacuuuccccgggagggcguguucgugagcaacggcacccacugguucgugacccagcggaacuucuacgagccccagaucaucaccaccgacaacaccuucgugagcggcaacugcgacguggugaucggcaucgugaacaacaccguguacgauccccugcagcccgagcuggacagcuucaaggaggagcuggacaaguacuucaagaaucacaccagccccgacguggaccugggcgacaucagcggcaucaacgccagcguggugaacauccagaaggagaucgaucggcugaacgagguggccaagaaccugaacgagagccugaucgaccugcaggagcugggcaaguacgagcaguacaucaaguggcccugguacaucuggcugggcuucaucgccggccugaucgccaucgugaucgugaccaucaugcugugcugcaugaccagcugcugcagcugccugaagggcuguugcagcugcggcagcugcugcaaguucgacgaggacgacagcgagcccgugcugaagggcgugaagcugcacuacaccugaggacuaguuauaagacugacuagcccgaugggccucccaacgggcccuccuccccuccuugcaccgagagaucucaaaggcucuuuucagagccaccaaaaaaaaaaaaaaaaaaaaaaaaaaaaaaaaaaaaaaaaaaaaaaaaaaaaaaaaaaaaaaaaaaaaaaaaaaaaaaaaaaaaaaaaaaaaaaaaaaaaa

SEQ ID NO: 24663 - RNA, 4029 nt, Artificial Sequence
  SARS-CoV-2/Wuhan/WIV05/2019__EPI_ISL_402128 spike protein mRNA gc (1-1273)(K986P_V987P_H69del_V70del_A222V_Y453F_S477N_D614G_I692V)
aggagaaagcuuaccauguucguguuccuggugcugcugccccuggugagcagccagugcgugaaccugaccacccggacccagcugccaccagccuacaccaacagcuucacccggggcgucuacuaccccgacaagguguuccggagcagcguccugcacagcacccaggaccuguuccugcccuucuucagcaacgugaccugguuccacgccaucagcggcaccaacggcaccaagcgguucgacaaccccgugcugcccuucaacgacggcguguacuucgccagcaccgagaagagcaacaucauccggggcuggaucuucggcaccacccuggacagcaagacccagagccugcugaucgugaauaacgccaccaacguggugaucaaggugugcgaguuccaguucugcaacgaccccuuccugggcguguacuaccacaagaacaacaagagcuggauggagagcgaguuccggguguacagcagcgccaacaacugcaccuucgaguacgugagccagcccuuccugauggaccuggagggcaagcagggcaacuucaagaaccugcgggaguucguguucaagaacaucgacggcuacuucaagaucuacagcaagcacaccccaaucaaccuggugcgggaucugccccagggcuucucagugcuggagccccugguggaccugcccaucggcaucaacaucacccgguuccagacccugcuggcccugcaccggagcuaccugaccccaggcgacagcagcagcggguggacagcaggcgcggcugcuuacuacgugggcuaccugcagccccggaccuuccugcugaaguacaacgagaacggcaccaucaccgacgccguggacugcgcccuggacccucugagcgagaccaagugcacccugaagagcuucaccguggagaagggcaucuaccagaccagcaacuuccgggugcagcccaccgagagcaucgugcgguuccccaacaucaccaaccugugccccuucggcgagguguucaacgccacccgguucgccagcguguacgccuggaaccggaagcggaucagcaacugcguggccgacuacagcgugcuguacaacagcgccagcuucagcaccuucaagugcuacggcgugagccccaccaagcugaacgaccugugcuucaccaacguguacgccgacagcuucgugauccguggcgacgaggugcggcagaucgcacccggccagacaggcaagaucgccgacuacaacuacaagcugcccgacgacuucaccggcugcgugaucgccuggaacagcaacaaccucgacagcaaggugggcggcaacuacaacuaccuguuccggcuguuccggaagagcaaccugaagcccuucgagcgggacaucagcaccgagaucuaccaagccggcaacaccccuugcaacggcguggagggcuucaacugcuacuucccucugcagagcuacggcuuccagcccaccaacggcgugggcuaccagcccuaccgggugguggugcugagcuucgagcugcugcacgccccagccaccguguguggccccaagaagagcaccaaccuggugaagaacaagugcgugaacuucaacuucaacggccuuaccggcaccggcgugcugaccgagagcaacaagaaauuccugcccuuucagcaguucggccgggacaucgccgacaccaccgacgcugugcgggauccccagacccuggagauccuggacaucaccccuugcagcuucggcggcgugagcgugaucaccccaggcaccaacaccagcaaccagguggccgugcuguaccagggcgugaacugcaccgaggugcccguggccauccacgccgaccagcugacacccaccuggcgggucuacagcaccggcagcaacguguuccagacccgggccgguugccugaucggcgccgagcacgugaacaacagcuacgagugcgacauccccaucggcgccggcaucugugccagcuaccagacccagaccaauucaccccggagggcaaggagcguggccagccagagcgugaucgccuacaccaugagccugggcgccgagaacagcguggccuacagcaacaacagcaucgccauccccaccaacuucaccaucagcgugaccaccgagauucugcccgugagcaugaccaagaccagcguggacugcaccauguacaucugcggcgacagcaccgagugcagcaaccugcugcugcaguacggcagcuucugcacccagcugaaccgggcccugaccggcaucgccguggagcaggacaagaacacccaggagguguucgcccaggugaagcagaucuacaagaccccucccaucaaggacuucggcggcuucaacuucagccagauccugcccgaccccagcaagcccagcaagcggagcuucaucgaggaccugcuguucaacaaggugacccuagccgacgccggcuucaucaagcaguacggcgacugccucggcgacauagccgcccgggaccugaucugcgcccagaaguucaacggccugaccgugcugccuccccugcugaccgacgagaugaucgcccaguacaccagcgcccuguuagccggaaccaucaccagcggcuggacuuucggcgcuggagccgcucugcagauccccuucgccaugcagauggccuaccgguucaacggcaucggcgugacccagaacgugcuguacgagaaccagaagcugaucgccaaccaguucaacagcgccaucggcaagauccaggacagccugagcagcaccgcuagcgcccugggcaagcugcaggacguggugaaccagaacgcccaggcccugaacacccuggugaagcagcugagcagcaacuucggcgccaucagcagcgugcugaacgacauccugagccggcuggacccucccgaggccgaggugcagaucgaccggcugaucacuggccggcugcagagccugcagaccuacgugacccagcagcugauccgggccgccgagauucgggccagcgccaaccuggccgccaccaagaugagcgagugcgugcugggccagagcaagcggguggacuucugcggcaagggcuaccaccugaugagcuuuccccagagcgcaccccacggagugguguuccugcacgugaccuacgugcccgcccaggagaagaacuucaccaccgccccagccaucugccacgacggcaaggcccacuuuccccgggagggcguguucgugagcaacggcacccacugguucgugacccagcggaacuucuacgagccccagaucaucaccaccgacaacaccuucgugagcggcaacugcgacguggugaucggcaucgugaacaacaccguguacgauccccugcagcccgagcuggacagcuucaaggaggagcuggacaaguacuucaagaaucacaccagccccgacguggaccugggcgacaucagcggcaucaacgccagcguggugaacauccagaaggagaucgaucggcugaacgagguggccaagaaccugaacgagagccugaucgaccugcaggagcugggcaaguacgagcaguacaucaaguggcccugguacaucuggcugggcuucaucgccggccugaucgccaucgugauggugaccaucaugcugugcugcaugaccagcugcugcagcugccugaagggcuguugcagcugcggcagcugcugcaaguucgacgaggacgacagcgagcccgugcugaagggcgugaagcugcacuacaccugaggacuaguuauaagacugacuagcccgaugggccucccaacgggcccuccuccccuccuugcaccgagagaucucaaaggcucuuuucagagccaccaaaaaaaaaaaaaaaaaaaaaaaaaaaaaaaaaaaaaaaaaaaaaaaaaaaaaaaaaaaaaaaaaaaaaaaaaaaaaaaaaaaaaaaaaaaaaaaaaaaaa

SEQ ID NO: 24664 - RNA, 4029 nt, Artificial Sequence
  SARS-CoV-2/Wuhan/WIV05/2019__EPI_ISL_402128 spike protein mRNA gc (1-1273)(K986P_V987P_H69del_V70del_Y453F_D614G_I692V_M1229I)
aggagaaagcuuaccauguucguguuccuggugcugcugccccuggugagcagccagugcgugaaccugaccacccggacccagcugccaccagccuacaccaacagcuucacccggggcgucuacuaccccgacaagguguuccggagcagcguccugcacagcacccaggaccuguuccugcccuucuucagcaacgugaccugguuccacgccaucagcggcaccaacggcaccaagcgguucgacaaccccgugcugcccuucaacgacggcguguacuucgccagcaccgagaagagcaacaucauccggggcuggaucuucggcaccacccuggacagcaagacccagagccugcugaucgugaauaacgccaccaacguggugaucaaggugugcgaguuccaguucugcaacgaccccuuccugggcguguacuaccacaagaacaacaagagcuggauggagagcgaguuccggguguacagcagcgccaacaacugcaccuucgaguacgugagccagcccuuccugauggaccuggagggcaagcagggcaacuucaagaaccugcgggaguucguguucaagaacaucgacggcuacuucaagaucuacagcaagcacaccccaaucaaccuggugcgggaucugccccagggcuucucagcccuggagccccugguggaccugcccaucggcaucaacaucacccgguuccagacccugcuggcccugcaccggagcuaccugaccccaggcgacagcagcagcggguggacagcaggcgcggcugcuuacuacgugggcuaccugcagccccggaccuuccugcugaaguacaacgagaacggcaccaucaccgacgccguggacugcgcccuggacccucugagcgagaccaagugcacccugaagagcuucaccguggagaagggcaucuaccagaccagcaacuuccgggugcagcccaccgagagcaucgugcgguuccccaacaucaccaaccugugccccuucggcgagguguucaacgccacccgguucgccagcguguacgccuggaaccggaagcggaucagcaacugcguggccgacuacagcgugcuguacaacagcgccagcuucagcaccuucaagugcuacggcgugagccccaccaagcugaacgaccugugcuucaccaacguguacgccgacagcuucgugauccguggcgacgaggugcggcagaucgcacccggccagacaggcaagaucgccgacuacaacuacaagcugcccgacgacuucaccggcugcgugaucgccuggaacagcaacaaccucgacagcaaggugggcggcaacuacaacuaccuguuccggcuguuccggaagagcaaccugaagcccuucgagcgggacaucagcaccgagaucuaccaagccggcuccaccccuugcaacggcguggagggcuucaacugcuacuucccucugcagagcuacggcuuccagcccaccaacggcgugggcuaccagcccuaccgggugguggugcugagcuucgagcugcugcacgccccagccaccguguguggccccaagaagagcaccaaccuggugaagaacaagugcgugaacuucaacuucaacggccuuaccggcaccggcgugcugaccgagagcaacaagaaauuccugcccuuucagcaguucggccgggacaucgccgacaccaccgacgcugugcgggauccccagacccuggagauccuggacaucaccccuugcagcuucggcggcgugagcgugaucaccccaggcaccaacaccagcaaccagguggccgugcuguaccagggcgugaacugcaccgaggugcccguggccauccacgccgaccagcugacacccaccuggcgggucuacagcaccggcagcaacguguuccagacccgggccgguugccugaucggcgccgagcacgugaacaacagcuacgagugcgacauccccaucggcgccggcaucugugccagcuaccagacccagaccaauucaccccggagggcaaggagcguggccagccagagcgugaucgccuacaccaugagccugggcgccgagaacagcguggccuacagcaacaacagcaucgccauccccaccaacuucaccaucagcgugaccaccgagauucugcccgugagcaugaccaagaccagcguggacugcaccauguacaucugcggcgacagcaccgagugcagcaaccugcugcugcaguacggcagcuucugcacccagcugaaccgggcccugaccggcaucgccguggagcaggacaagaacacccaggagguguucgcccaggugaagcagaucuacaagaccccucccaucaaggacuucggcggcuucaacuucagccagauccugcccgaccccagcaagcccagcaagcggagcuucaucgaggaccugcuguucaacaaggugacccuagccgacgccggcuucaucaagcaguacggcgacugccucggcgacauagccgcccgggaccugaucugcgcccagaaguucaacggccugaccgugcugccuccccugcugaccgacgagaugaucgcccaguacaccagcgcccuguuagccggaaccaucaccagcggcuggacuuucggcgcuggagccgcucugcagauccccuucgccaugcagauggccuaccgguucaacggcaucggcgugacccagaacgugcuguacgagaaccagaagcugaucgccaaccaguucaacagcgccaucggcaagauccaggacagccugagcagcaccgcuagcgcccugggcaagcugcaggacguggugaaccagaacgcccaggcccugaacacccuggugaagcagcugagcagcaacuucggcgccaucagcagcgugcugaacgacauccugagccggcuggacccucccgaggccgaggugcagaucgaccggcugaucacuggccggcugcagagccugcagaccuacgugacccagcagcugauccgggccgccgagauucgggccagcgccaaccuggccgccaccaagaugagcgagugcgugcugggccagagcaagcggguggacuucugcggcaagggcuaccaccugaugagcuuuccccagagcgcaccccacggagugguguuccugcacgugaccuacgugcccgcccaggagaagaacuucaccaccgccccagccaucugccacgacggcaaggcccacuuuccccgggagggcguguucgugagcaacggcacccacugguucgugacccagcggaacuucuacgagccccagaucaucaccaccgacaacaccuucgugagcggcaacugcgacguggugaucggcaucgugaacaacaccguguacgauccccugcagcccgagcuggacagcuucaaggaggagcuggacaaguacuucaagaaucacaccagccccgacguggaccugggcgacaucagcggcaucaacgccagcguggugaacauccagaaggagaucgaucggcugaacgagguggccaagaaccugaacgagagccugaucgaccugcaggagcugggcaaguacgagcaguacaucaaguggcccugguacaucuggcugggcuucaucgccggccugaucgccaucgugaucgugaccaucaugcugugcugcaugaccagcugcugcagcugccugaagggcuguugcagcugcggcagcugcugcaaguucgacgaggacgacagcgagcccgugcugaagggcgugaagcugcacuacaccugaggacuaguuauaagacugacuagcccgaugggccucccaacgggcccuccuccccuccuugcaccgagagaucucaaaggcucuuuucagagccaccaaaaaaaaaaaaaaaaaaaaaaaaaaaaaaaaaaaaaaaaaaaaaaaaaaaaaaaaaaaaaaaaaaaaaaaaaaaaaaaaaaaaaaaaaaaaaaaaaaaaa

SEQ ID NO: 24665 - RNA, 4026 nt, Artificial Sequence
  SARS-CoV-2/Wuhan/WIV05/2019__EPI_ISL_402128 spike protein mRNA gc (1-1273)(K986P_V987P_K986P_V987P_H69del_V70del_Y144del_N501Y_A570 D_D614G_P681H_T716I_S982A_D1118H)
aggagaaagcuuaccauguucguguuccuggugcugcugccccuggugagcagccagugcgugaaccugaccacccggacccagcugccaccagccuacaccaacagcuucacccggggcgucuacuaccccgacaagguguuccggagcagcguccugcacagcacccaggaccuguuccugcccuucuucagcaacgugaccugguuccacgccaucagcggcaccaacggcaccaagcgguucgacaaccccgugcugcccuucaacgacggcguguacuucgccagcaccgagaagagcaacaucauccggggcuggaucuucggcaccacccuggacagcaagacccagagccugcugaucgugaauaacgccaccaacguggugaucaaggugugcgaguuccaguucugcaacgaccccuuccugggcguguaccacaagaacaacaagagcuggauggagagcgaguuccggguguacagcagcgccaacaacugcaccuucgaguacgugagccagcccuuccugauggaccuggagggcaagcagggcaacuucaagaaccugcgggaguucguguucaagaacaucgacggcuacuucaagaucuacagcaagcacaccccaaucaaccuggugcgggaucugccccagggcuucucagcccuggagccccugguggaccugcccaucggcaucaacaucacccgguuccagacccugcuggcccugcaccggagcuaccugaccccaggcgacagcagcagcggguggacagcaggcgcggcugcuuacuacgugggcuaccugcagccccggaccuuccugcugaaguacaacgagaacggcaccaucaccgacgccguggacugcgcccuggacccucugagcgagaccaagugcacccugaagagcuucaccguggagaagggcaucuaccagaccagcaacuuccgggugcagcccaccgagagcaucgugcgguuccccaacaucaccaaccugugccccuucggcgagguguucaacgccacccgguucgccagcguguacgccuggaaccggaagcggaucagcaacugcguggccgacuacagcgugcuguacaacagcgccagcuucagcaccuucaagugcuacggcgugagccccaccaagcugaacgaccugugcuucaccaacguguacgccgacagcuucgugauccguggcgacgaggugcggcagaucgcacccggccagacaggcaagaucgccgacuacaacuacaagcugcccgacgacuucaccggcugcgugaucgccuggaacagcaacaaccucgacagcaaggugggcggcaacuacaacuaccuguaccggcuguuccggaagagcaaccugaagcccuucgagcgggacaucagcaccgagaucuaccaagccggcuccaccccuugcaacggcguggagggcuucaacugcuacuucccucugcagagcuacggcuuccagcccaccuacggcgugggcuaccagcccuaccgggugguggugcugagcuucgagcugcugcacgccccagccaccguguguggccccaagaagagcaccaaccuggugaagaacaagugcgugaacuucaacuucaacggccuuaccggcaccggcgugcugaccgagagcaacaagaaauuccugcccuuucagcaguucggccgggacaucgacgacaccaccgacgcugugcgggauccccagacccuggagauccuggacaucaccccuugcagcuucggcggcgugagcgugaucaccccaggcaccaacaccagcaaccagguggccgugcuguaccagggcgugaacugcaccgaggugcccguggccauccacgccgaccagcugacacccaccuggcgggucuacagcaccggcagcaacguguuccagacccgggccgguugccugaucggcgccgagcacgugaacaacagcuacgagugcgacauccccaucggcgccggcaucugugccagcuaccagacccagaccaauucacaccggagggcaaggagcguggccagccagagcaucaucgccuacaccaugagccugggcgccgagaacagcguggccuacagcaacaacagcaucgccauccccaucaacuucaccaucagcgugaccaccgagauucugcccgugagcaugaccaagaccagcguggacugcaccauguacaucugcggcgacagcaccgagugcagcaaccugcugcugcaguacggcagcuucugcacccagcugaaccgggcccugaccggcaucgccguggagcaggacaagaacacccaggagguguucgcccaggugaagcagaucuacaagaccccucccaucaaggacuucggcggcuucaacuucagccagauccugcccgaccccagcaagcccagcaagcggagcuucaucgaggaccugcuguucaacaaggugacccuagccgacgccggcuucaucaagcaguacggcgacugccucggcgacauagccgcccgggaccugaucugcgcccagaaguucaacggccugaccgugcugccuccccugcugaccgacgagaugaucgcccaguacaccagcgcccuguuagccggaaccaucaccagcggcuggacuuucggcgcuggagccgcucugcagauccccuucgccaugcagauggccuaccgguucaacggcaucggcgugacccagaacgugcuguacgagaaccagaagcugaucgccaaccaguucaacagcgccaucggcaagauccaggacagccugagcagcaccgcuagcgcccugggcaagcugcaggacguggugaaccagaacgcccaggcccugaacacccuggugaagcagcugagcagcaacuucggcgccaucagcagcgugcugaacgacauccuggcccggcuggacccucccgaggccgaggugcagaucgaccggcugaucacuggccggcugcagagccugcagaccuacgugacccagcagcugauccgggccgccgagauucgggccagcgccaaccuggccgccaccaagaugagcgagugcgugcugggccagagcaagcggguggacuucugcggcaagggcuaccaccugaugagcuuuccccagagcgcaccccacggagugguguuccugcacgugaccuacgugcccgcccaggagaagaacuucaccaccgccccagccaucugccacgacggcaaggcccacuuuccccgggagggcguguucgugagcaacggcacccacugguucgugacccagcggaacuucuacgagccccagaucaucaccacccacaacaccuucgugagcggcaacugcgacguggugaucggcaucgugaacaacaccguguacgauccccugcagcccgagcuggacagcuucaaggaggagcuggacaaguacuucaagaaucacaccagccccgacguggaccugggcgacaucagcggcaucaacgccagcguggugaacauccagaaggagaucgaucggcugaacgagguggccaagaaccugaacgagagccugaucgaccugcaggagcugggcaaguacgagcaguacaucaaguggcccugguacaucuggcugggcuucaucgccggccugaucgccaucgugauggugaccaucaugcugugcugcaugaccagcugcugcagcugccugaagggcuguugcagcugcggcagcugcugcaaguucgacgaggacgacagcgagcccgugcugaagggcgugaagcugcacuacaccugaggacuaguuauaagacugacuagcccgaugggccucccaacgggcccuccuccccuccuugcaccgagagaucucaaaggcucuuuucagagccaccaaaaaaaaaaaaaaaaaaaaaaaaaaaaaaaaaaaaaaaaaaaaaaaaaaaaaaaaaaaaaaaaaaaaaaaaaaaaaaaaaaaaaaaaaaaaaaaaaaaaa

SEQ ID NO: 24666 - RNA, 4035 nt, Artificial Sequence
  SARS-CoV-2/Wuhan/WIV05/2019__EPI_ISL_402128 spike protein mRNA gc (1-1273)(K986P_V987P_K986P_V987P_K417N_E484K_N501Y_D614G)
aggagaaagcuuaccauguucguguuccuggugcugcugccccuggugagcagccagugcgugaaccugaccacccggacccagcugccaccagccuacaccaacagcuucacccggggcgucuacuaccccgacaagguguuccggagcagcguccugcacagcacccaggaccuguuccugcccuucuucagcaacgugaccugguuccacgccauccacgugagcggcaccaacggcaccaagcgguucgacaaccccgugcugcccuucaacgacggcguguacuucgccagcaccgagaagagcaacaucauccggggcuggaucuucggcaccacccuggacagcaagacccagagccugcugaucgugaauaacgccaccaacguggugaucaaggugugcgaguuccaguucugcaacgaccccuuccugggcguguacuaccacaagaacaacaagagcuggauggagagcgaguuccggguguacagcagcgccaacaacugcaccuucgaguacgugagccagcccuuccugauggaccuggagggcaagcagggcaacuucaagaaccugcgggaguucguguucaagaacaucgacggcuacuucaagaucuacagcaagcacaccccaaucaaccuggugcgggaucugccccagggcuucucagcccuggagccccugguggaccugcccaucggcaucaacaucacccgguuccagacccugcuggcccugcaccggagcuaccugaccccaggcgacagcagcagcggguggacagcaggcgcggcugcuuacuacgugggcuaccugcagccccggaccuuccugcugaaguacaacgagaacggcaccaucaccgacgccguggacugcgcccuggacccucugagcgagaccaagugcacccugaagagcuucaccguggagaagggcaucuaccagaccagcaacuuccgggugcagcccaccgagagcaucgugcgguuccccaacaucaccaaccugugccccuucggcgagguguucaacgccacccgguucgccagcguguacgccuggaaccggaagcggaucagcaacugcguggccgacuacagcgugcuguacaacagcgccagcuucagcaccuucaagugcuacggcgugagccccaccaagcugaacgaccugugcuucaccaacguguacgccgacagcuucgugauccguggcgacgaggugcggcagaucgcacccggccagacaggcaacaucgccgacuacaacuacaagcugcccgacgacuucaccggcugcgugaucgccuggaacagcaacaaccucgacagcaaggugggcggcaacuacaacuaccuguaccggcuguuccggaagagcaaccugaagcccuucgagcgggacaucagcaccgagaucuaccaagccggcuccaccccuugcaacggcgugaagggcuucaacugcuacuucccucugcagagcuacggcuuccagcccaccuacggcgugggcuaccagcccuaccgggugguggugcugagcuucgagcugcugcacgccccagccaccguguguggccccaagaagagcaccaaccuggugaagaacaagugcgugaacuucaacuucaacggccuuaccggcaccggcgugcugaccgagagcaacaagaaauuccugcccuuucagcaguucggccgggacaucgccgacaccaccgacgcugugcgggauccccagacccuggagauccuggacaucaccccuugcagcuucggcggcgugagcgugaucaccccaggcaccaacaccagcaaccagguggccgugcuguaccagggcgugaacugcaccgaggugcccguggccauccacgccgaccagcugacacccaccuggcgggucuacagcaccggcagcaacguguuccagacccgggccgguugccugaucggcgccgagcacgugaacaacagcuacgagugcgacauccccaucggcgccggcaucugugccagcuaccagacccagaccaauucaccccggagggcaaggagcguggccagccagagcaucaucgccuacaccaugagccugggcgccgagaacagcguggccuacagcaacaacagcaucgccauccccaccaacuucaccaucagcgugaccaccgagauucugcccgugagcaugaccaagaccagcguggacugcaccauguacaucugcggcgacagcaccgagugcagcaaccugcugcugcaguacggcagcuucugcacccagcugaaccgggcccugaccggcaucgccguggagcaggacaagaacacccaggagguguucgcccaggugaagcagaucuacaagaccccucccaucaaggacuucggcggcuucaacuucagccagauccugcccgaccccagcaagcccagcaagcggagcuucaucgaggaccugcuguucaacaaggugacccuagccgacgccggcuucaucaagcaguacggcgacugccucggcgacauagccgcccgggaccugaucugcgcccagaaguucaacggccugaccgugcugccuccccugcugaccgacgagaugaucgcccaguacaccagcgcccuguuagccggaaccaucaccagcggcuggacuuucggcgcuggagccgcucugcagauccccuucgccaugcagauggccuaccgguucaacggcaucggcgugacccagaacgugcuguacgagaaccagaagcugaucgccaaccaguucaacagcgccaucggcaagauccaggacagccugagcagcaccgcuagcgcccugggcaagcugcaggacguggugaaccagaacgcccaggcccugaacacccuggugaagcagcugagcagcaacuucggcgccaucagcagcgugcugaacgacauccugagccggcuggacccucccgaggccgaggugcagaucgaccggcugaucacuggccggcugcagagccugcagaccuacgugacccagcagcugauccgggccgccgagauucgggccagcgccaaccuggccgccaccaagaugagcgagugcgugcugggccagagcaagcggguggacuucugcggcaagggcuaccaccugaugagcuuuccccagagcgcaccccacggagugguguuccugcacgugaccuacgugcccgcccaggagaagaacuucaccaccgccccagccaucugccacgacggcaaggcccacuuuccccgggagggcguguucgugagcaacggcacccacugguucgugacccagcggaacuucuacgagccccagaucaucaccaccgacaacaccuucgugagcggcaacugcgacguggugaucggcaucgugaacaacaccguguacgauccccugcagcccgagcuggacagcuucaaggaggagcuggacaaguacuucaagaaucacaccagccccgacguggaccugggcgacaucagcggcaucaacgccagcguggugaacauccagaaggagaucgaucggcugaacgagguggccaagaaccugaacgagagccugaucgaccugcaggagcugggcaaguacgagcaguacaucaaguggcccugguacaucuggcugggcuucaucgccggccugaucgccaucgugauggugaccaucaugcugugcugcaugaccagcugcugcagcugccugaagggcuguugcagcugcggcagcugcugcaaguucgacgaggacgacagcgagcccgugcugaagggcgugaagcugcacuacaccugaggacuaguuauaagacugacuagcccgaugggccucccaacgggcccuccuccccuccuugcaccgagagaucucaaaggcucuuuucagagccaccaaaaaaaaaaaaaaaaaaaaaaaaaaaaaaaaaaaaaaaaaaaaaaaaaaaaaaaaaaaaaaaaaaaaaaaaaaaaaaaaaaaaaaaaaaaaaaaaaaaaa

SEQ ID NO: 24667 - RNA, 4026 nt, Artificial Sequence
  SARS-CoV-2/Wuhan/WIV05/2019__EPI_ISL_402128 spike protein mRNA gc (1-1273)(K986P_V987P_K986P_V987P_L18F_D80A_D215G_L242del_A243del_ L244del_R246I_K417N_E484K_N501Y_D614G_A701V)
aggagaaagcuuaccauguucguguuccuggugcugcugccccuggugagcagccagugcgugaacuucaccacccggacccagcugccaccagccuacaccaacagcuucacccggggcgucuacuaccccgacaagguguuccggagcagcguccugcacagcacccaggaccuguuccugcccuucuucagcaacgugaccugguuccacgccauccacgugagcggcaccaacggcaccaagcgguucgccaaccccgugcugcccuucaacgacggcguguacuucgccagcaccgagaagagcaacaucauccggggcuggaucuucggcaccacccuggacagcaagacccagagccugcugaucgugaauaacgccaccaacguggugaucaaggugugcgaguuccaguucugcaacgaccccuuccugggcguguacuaccacaagaacaacaagagcuggauggagagcgaguuccggguguacagcagcgccaacaacugcaccuucgaguacgugagccagcccuuccugauggaccuggagggcaagcagggcaacuucaagaaccugcgggaguucguguucaagaacaucgacggcuacuucaagaucuacagcaagcacaccccaaucaaccuggugcggggccugccccagggcuucucagcccuggagccccugguggaccugcccaucggcaucaacaucacccgguuccagacccugcacaucagcuaccugaccccaggcgacagcagcagcggguggacagcaggcgcggcugcuuacuacgugggcuaccugcagccccggaccuuccugcugaaguacaacgagaacggcaccaucaccgacgccguggacugcgcccuggacccucugagcgagaccaagugcacccugaagagcuucaccguggagaagggcaucuaccagaccagcaacuuccgggugcagcccaccgagagcaucgugcgguuccccaacaucaccaaccugugccccuucggcgagguguucaacgccacccgguucgccagcguguacgccuggaaccggaagcggaucagcaacugcguggccgacuacagcgugcuguacaacagcgccagcuucagcaccuucaagugcuacggcgugagccccaccaagcugaacgaccugugcuucaccaacguguacgccgacagcuucgugauccguggcgacgaggugcggcagaucgcacccggccagacaggcaacaucgccgacuacaacuacaagcugcccgacgacuucaccggcugcgugaucgccuggaacagcaacaaccucgacagcaaggugggcggcaacuacaacuaccuguaccggcuguuccggaagagcaaccugaagcccuucgagcgggacaucagcaccgagaucuaccaagccggcuccaccccuugcaacggcgugaagggcuucaacugcuacuucccucugcagagcuacggcuuccagcccaccuacggcgugggcuaccagcccuaccgggugguggugcugagcuucgagcugcugcacgccccagccaccguguguggccccaagaagagcaccaaccuggugaagaacaagugcgugaacuucaacuucaacggccuuaccggcaccggcgugcugaccgagagcaacaagaaauuccugcccuuucagcaguucggccgggacaucgccgacaccaccgacgcugugcgggauccccagacccuggagauccuggacaucaccccuugcagcuucggcggcgugagcgugaucaccccaggcaccaacaccagcaaccagguggccgugcuguaccagggcgugaacugcaccgaggugcccguggccauccacgccgaccagcugacacccaccuggcgggucuacagcaccggcagcaacguguuccagacccgggccgguugccugaucggcgccgagcacgugaacaacagcuacgagugcgacauccccaucggcgccggcaucugugccagcuaccagacccagaccaauucaccccggagggcaaggagcguggccagccagagcaucaucgccuacaccaugagccugggcguggagaacagcguggccuacagcaacaacagcaucgccauccccaccaacuucaccaucagcgugaccaccgagauucugcccgugagcaugaccaagaccagcguggacugcaccauguacaucugcggcgacagcaccgagugcagcaaccugcugcugcaguacggcagcuucugcacccagcugaaccgggcccugaccggcaucgccguggagcaggacaagaacacccaggagguguucgcccaggugaagcagaucuacaagaccccucccaucaaggacuucggcggcuucaacuucagccagauccugcccgaccccagcaagcccagcaagcggagcuucaucgaggaccugcuguucaacaaggugacccuagccgacgccggcuucaucaagcaguacggcgacugccucggcgacauagccgcccgggaccugaucugcgcccagaaguucaacggccugaccgugcugccuccccugcugaccgacgagaugaucgcccaguacaccagcgcccuguuagccggaaccaucaccagcggcuggacuuucggcgcuggagccgcucugcagauccccuucgccaugcagauggccuaccgguucaacggcaucggcgugacccagaacgugcuguacgagaaccagaagcugaucgccaaccaguucaacagcgccaucggcaagauccaggacagccugagcagcaccgcuagcgcccugggcaagcugcaggacguggugaaccagaacgcccaggcccugaacacccuggugaagcagcugagcagcaacuucggcgccaucagcagcgugcugaacgacauccugagccggcuggacccucccgaggccgaggugcagaucgaccggcugaucacuggccggcugcagagccugcagaccuacgugacccagcagcugauccgggccgccgagauucgggccagcgccaaccuggccgccaccaagaugagcgagugcgugcugggccagagcaagcggguggacuucugcggcaagggcuaccaccugaugagcuuuccccagagcgcaccccacggagugguguuccugcacgugaccuacgugcccgcccaggagaagaacuucaccaccgccccagccaucugccacgacggcaaggcccacuuuccccgggagggcguguucgugagcaacggcacccacugguucgugacccagcggaacuucuacgagccccagaucaucaccaccgacaacaccuucgugagcggcaacugcgacguggugaucggcaucgugaacaacaccguguacgauccccugcagcccgagcuggacagcuucaaggaggagcuggacaaguacuucaagaaucacaccagccccgacguggaccugggcgacaucagcggcaucaacgccagcguggugaacauccagaaggagaucgaucggcugaacgagguggccaagaaccugaacgagagccugaucgaccugcaggagcugggcaaguacgagcaguacaucaaguggcccugguacaucuggcugggcuucaucgccggccugaucgccaucgugauggugaccaucaugcugugcugcaugaccagcugcugcagcugccugaagggcuguugcagcugcggcagcugcugcaaguucgacgaggacgacagcgagcccgugcugaagggcgugaagcugcacuacaccugaggacuaguuauaagacugacuagcccgaugggccucccaacgggcccuccuccccuccuugcaccgagagaucucaaaggcucuuuucagagccaccaaaaaaaaaaaaaaaaaaaaaaaaaaaaaaaaaaaaaaaaaaaaaaaaaaaaaaaaaaaaaaaaaaaaaaaaaaaaaaaaaaaaaaaaaaaaaaaaaaaaa

SEQ ID NO: 24668 - RNA, 4035 nt, Artificial Sequence
  SARS-CoV-2/Wuhan/WIV05/2019__EPI_ISL_402128 spike protein mRNA gc (1-1273)(K986P_V987P_K986P_V987P_E484K_D614G)
aggagaaagcuuaccauguucguguuccuggugcugcugccccuggugagcagccagugcgugaaccugaccacccggacccagcugccaccagccuacaccaacagcuucacccggggcgucuacuaccccgacaagguguuccggagcagcguccugcacagcacccaggaccuguuccugcccuucuucagcaacgugaccugguuccacgccauccacgugagcggcaccaacggcaccaagcgguucgacaaccccgugcugcccuucaacgacggcguguacuucgccagcaccgagaagagcaacaucauccggggcuggaucuucggcaccacccuggacagcaagacccagagccugcugaucgugaauaacgccaccaacguggugaucaaggugugcgaguuccaguucugcaacgaccccuuccugggcguguacuaccacaagaacaacaagagcuggauggagagcgaguuccggguguacagcagcgccaacaacugcaccuucgaguacgugagccagcccuuccugauggaccuggagggcaagcagggcaacuucaagaaccugcgggaguucguguucaagaacaucgacggcuacuucaagaucuacagcaagcacaccccaaucaaccuggugcgggaucugccccagggcuucucagcccuggagccccugguggaccugcccaucggcaucaacaucacccgguuccagacccugcuggcccugcaccggagcuaccugaccccaggcgacagcagcagcggguggacagcaggcgcggcugcuuacuacgugggcuaccugcagccccggaccuuccugcugaaguacaacgagaacggcaccaucaccgacgccguggacugcgcccuggacccucugagcgagaccaagugcacccugaagagcuucaccguggagaagggcaucuaccagaccagcaacuuccgggugcagcccaccgagagcaucgugcgguuccccaacaucaccaaccugugccccuucggcgagguguucaacgccacccgguucgccagcguguacgccuggaaccggaagcggaucagcaacugcguggccgacuacagcgugcuguacaacagcgccagcuucagcaccuucaagugcuacggcgugagccccaccaagcugaacgaccugugcuucaccaacguguacgccgacagcuucgugauccguggcgacgaggugcggcagaucgcacccggccagacaggcaagaucgccgacuacaacuacaagcugcccgacgacuucaccggcugcgugaucgccuggaacagcaacaaccucgacagcaaggugggcggcaacuacaacuaccuguaccggcuguuccggaagagcaaccugaagcccuucgagcgggacaucagcaccgagaucuaccaagccggcuccaccccuugcaacggcgugaagggcuucaacugcuacuucccucugcagagcuacggcuuccagcccaccaacggcgugggcuaccagcccuaccgggugguggugcugagcuucgagcugcugcacgccccagccaccguguguggccccaagaagagcaccaaccuggugaagaacaagugcgugaacuucaacuucaacggccuuaccggcaccggcgugcugaccgagagcaacaagaaauuccugcccuuucagcaguucggccgggacaucgccgacaccaccgacgcugugcgggauccccagacccuggagauccuggacaucaccccuugcagcuucggcggcgugagcgugaucaccccaggcaccaacaccagcaaccagguggccgugcuguaccagggcgugaacugcaccgaggugcccguggccauccacgccgaccagcugacacccaccuggcgggucuacagcaccggcagcaacguguuccagacccgggccgguugccugaucggcgccgagcacgugaacaacagcuacgagugcgacauccccaucggcgccggcaucugugccagcuaccagacccagaccaauucaccccggagggcaaggagcguggccagccagagcaucaucgccuacaccaugagccugggcgccgagaacagcguggccuacagcaacaacagcaucgccauccccaccaacuucaccaucagcgugaccaccgagauucugcccgugagcaugaccaagaccagcguggacugcaccauguacaucugcggcgacagcaccgagugcagcaaccugcugcugcaguacggcagcuucugcacccagcugaaccgggcccugaccggcaucgccguggagcaggacaagaacacccaggagguguucgcccaggugaagcagaucuacaagaccccucccaucaaggacuucggcggcuucaacuucagccagauccugcccgaccccagcaagcccagcaagcggagcuucaucgaggaccugcuguucaacaaggugacccuagccgacgccggcuucaucaagcaguacggcgacugccucggcgacauagccgcccgggaccugaucugcgcccagaaguucaacggccugaccgugcugccuccccugcugaccgacgagaugaucgcccaguacaccagcgcccuguuagccggaaccaucaccagcggcuggacuuucggcgcuggagccgcucugcagauccccuucgccaugcagauggccuaccgguucaacggcaucggcgugacccagaacgugcuguacgagaaccagaagcugaucgccaaccaguucaacagcgccaucggcaagauccaggacagccugagcagcaccgcuagcgcccugggcaagcugcaggacguggugaaccagaacgcccaggcccugaacacccuggugaagcagcugagcagcaacuucggcgccaucagcagcgugcugaacgacauccugagccggcuggacccucccgaggccgaggugcagaucgaccggcugaucacuggccggcugcagagccugcagaccuacgugacccagcagcugauccgggccgccgagauucgggccagcgccaaccuggccgccaccaagaugagcgagugcgugcugggccagagcaagcggguggacuucugcggcaagggcuaccaccugaugagcuuuccccagagcgcaccccacggagugguguuccugcacgugaccuacgugcccgcccaggagaagaacuucaccaccgccccagccaucugccacgacggcaaggcccacuuuccccgggagggcguguucgugagcaacggcacccacugguucgugacccagcggaacuucuacgagccccagaucaucaccaccgacaacaccuucgugagcggcaacugcgacguggugaucggcaucgugaacaacaccguguacgauccccugcagcccgagcuggacagcuucaaggaggagcuggacaaguacuucaagaaucacaccagccccgacguggaccugggcgacaucagcggcaucaacgccagcguggugaacauccagaaggagaucgaucggcugaacgagguggccaagaaccugaacgagagccugaucgaccugcaggagcugggcaaguacgagcaguacaucaaguggcccugguacaucuggcugggcuucaucgccggccugaucgccaucgugauggugaccaucaugcugugcugcaugaccagcugcugcagcugccugaagggcuguugcagcugcggcagcugcugcaaguucgacgaggacgacagcgagcccgugcugaagggcgugaagcugcacuacaccugaggacuaguuauaagacugacuagcccgaugggccucccaacgggcccuccuccccuccuugcaccgagagaucucaaaggcucuuuucagagccaccaaaaaaaaaaaaaaaaaaaaaaaaaaaaaaaaaaaaaaaaaaaaaaaaaaaaaaaaaaaaaaaaaaaaaaaaaaaaaaaaaaaaaaaaaaaaaaaaaaaaa

SEQ ID NO: 24669 - RNA, 4035 nt, Artificial Sequence
  SARS-CoV-2/Wuhan/WIV05/2019__EPI_ISL_402128 spike protein mRNA gc (1-1273)(K986P_V987P_K986P_V987P_L18F_T20N_P26S_D138Y_R190S_K417T _E484K_N501Y_D614G_H655Y_T1027I)
aggagaaagcuuaccauguucguguuccuggugcugcugccccuggugagcagccagugcgugaacuucaccaaccggacccagcugccaagcgccuacaccaacagcuucacccggggcgucuacuaccccgacaagguguuccggagcagcguccugcacagcacccaggaccuguuccugcccuucuucagcaacgugaccugguuccacgccauccacgugagcggcaccaacggcaccaagcgguucgacaaccccgugcugcccuucaacgacggcguguacuucgccagcaccgagaagagcaacaucauccggggcuggaucuucggcaccacccuggacagcaagacccagagccugcugaucgugaauaacgccaccaacguggugaucaaggugugcgaguuccaguucugcaacuaccccuuccugggcguguacuaccacaagaacaacaagagcuggauggagagcgaguuccggguguacagcagcgccaacaacugcaccuucgaguacgugagccagcccuuccugauggaccuggagggcaagcagggcaacuucaagaaccugagcgaguucguguucaagaacaucgacggcuacuucaagaucuacagcaagcacaccccaaucaaccuggugcgggaucugccccagggcuucucagcccuggagccccugguggaccugcccaucggcaucaacaucacccgguuccagacccugcuggcccugcaccggagcuaccugaccccaggcgacagcagcagcggguggacagcaggcgcggcugcuuacuacgugggcuaccugcagccccggaccuuccugcugaaguacaacgagaacggcaccaucaccgacgccguggacugcgcccuggacccucugagcgagaccaagugcacccugaagagcuucaccguggagaagggcaucuaccagaccagcaacuuccgggugcagcccaccgagagcaucgugcgguuccccaacaucaccaaccugugccccuucggcgagguguucaacgccacccgguucgccagcguguacgccuggaaccggaagcggaucagcaacugcguggccgacuacagcgugcuguacaacagcgccagcuucagcaccuucaagugcuacggcgugagccccaccaagcugaacgaccugugcuucaccaacguguacgccgacagcuucgugauccguggcgacgaggugcggcagaucgcacccggccagacaggcaccaucgccgacuacaacuacaagcugcccgacgacuucaccggcugcgugaucgccuggaacagcaacaaccucgacagcaaggugggcggcaacuacaacuaccuguaccggcuguuccggaagagcaaccugaagcccuucgagcgggacaucagcaccgagaucuaccaagccggcuccaccccuugcaacggcgugaagggcuucaacugcuacuucccucugcagagcuacggcuuccagcccaccuacggcgugggcuaccagcccuaccgggugguggugcugagcuucgagcugcugcacgccccagccaccguguguggccccaagaagagcaccaaccuggugaagaacaagugcgugaacuucaacuucaacggccuuaccggcaccggcgugcugaccgagagcaacaagaaauuccugcccuuucagcaguucggccgggacaucgccgacaccaccgacgcugugcgggauccccagacccuggagauccuggacaucaccccuugcagcuucggcggcgugagcgugaucaccccaggcaccaacaccagcaaccagguggccgugcuguaccagggcgugaacugcaccgaggugcccguggccauccacgccgaccagcugacacccaccuggcgggucuacagcaccggcagcaacguguuccagacccgggccgguugccugaucggcgccgaguacgugaacaacagcuacgagugcgacauccccaucggcgccggcaucugugccagcuaccagacccagaccaauucaccccggagggcaaggagcguggccagccagagcaucaucgccuacaccaugagccugggcgccgagaacagcguggccuacagcaacaacagcaucgccauccccaccaacuucaccaucagcgugaccaccgagauucugcccgugagcaugaccaagaccagcguggacugcaccauguacaucugcggcgacagcaccgagugcagcaaccugcugcugcaguacggcagcuucugcacccagcugaaccgggcccugaccggcaucgccguggagcaggacaagaacacccaggagguguucgcccaggugaagcagaucuacaagaccccucccaucaaggacuucggcggcuucaacuucagccagauccugcccgaccccagcaagcccagcaagcggagcuucaucgaggaccugcuguucaacaaggugacccuagccgacgccggcuucaucaagcaguacggcgacugccucggcgacauagccgcccgggaccugaucugcgcccagaaguucaacggccugaccgugcugccuccccugcugaccgacgagaugaucgcccaguacaccagcgcccuguuagccggaaccaucaccagcggcuggacuuucggcgcuggagccgcucugcagauccccuucgccaugcagauggccuaccgguucaacggcaucggcgugacccagaacgugcuguacgagaaccagaagcugaucgccaaccaguucaacagcgccaucggcaagauccaggacagccugagcagcaccgcuagcgcccugggcaagcugcaggacguggugaaccagaacgcccaggcccugaacacccuggugaagcagcugagcagcaacuucggcgccaucagcagcgugcugaacgacauccugagccggcuggacccucccgaggccgaggugcagaucgaccggcugaucacuggccggcugcagagccugcagaccuacgugacccagcagcugauccgggccgccgagauucgggccagcgccaaccuggccgccaucaagaugagcgagugcgugcugggccagagcaagcggguggacuucugcggcaagggcuaccaccugaugagcuuuccccagagcgcaccccacggagugguguuccugcacgugaccuacgugcccgcccaggagaagaacuucaccaccgccccagccaucugccacgacggcaaggcccacuuuccccgggagggcguguucgugagcaacggcacccacugguucgugacccagcggaacuucuacgagccccagaucaucaccaccgacaacaccuucgugagcggcaacugcgacguggugaucggcaucgugaacaacaccguguacgauccccugcagcccgagcuggacagcuucaaggaggagcuggacaaguacuucaagaaucacaccagccccgacguggaccugggcgacaucagcggcaucaacgccagcguggugaacauccagaaggagaucgaucggcugaacgagguggccaagaaccugaacgagagccugaucgaccugcaggagcugggcaaguacgagcaguacaucaaguggcccugguacaucuggcugggcuucaucgccggccugaucgccaucgugauggugaccaucaugcugugcugcaugaccagcugcugcagcugccugaagggcuguugcagcugcggcagcugcugcaaguucgacgaggacgacagcgagcccgugcugaagggcgugaagcugcacuacaccugaggacuaguuauaagacugacuagcccgaugggccucccaacgggcccuccuccccuccuugcaccgagagaucucaaaggcucuuuucagagccaccaaaaaaaaaaaaaaaaaaaaaaaaaaaaaaaaaaaaaaaaaaaaaaaaaaaaaaaaaaaaaaaaaaaaaaaaaaaaaaaaaaaaaaaaaaaaaaaaaaaaa

SEQ ID NO: 24670 - RNA, 4035 nt, Artificial Sequence
  SARS-CoV-2/Wuhan/WIV05/2019__EPI_ISL_402128 spike protein mRNA gc (1-1273)(K986P_V987P_K986P_V987P_S13I_W152C_L452R_D614G)
aggagaaagcuuaccauguucguguuccuggugcugcugccccuggugagcauccagugcgugaaccugaccacccggacccagcugccaccagccuacaccaacagcuucacccggggcgucuacuaccccgacaagguguuccggagcagcguccugcacagcacccaggaccuguuccugcccuucuucagcaacgugaccugguuccacgccauccacgugagcggcaccaacggcaccaagcgguucgacaaccccgugcugcccuucaacgacggcguguacuucgccagcaccgagaagagcaacaucauccggggcuggaucuucggcaccacccuggacagcaagacccagagccugcugaucgugaauaacgccaccaacguggugaucaaggugugcgaguuccaguucugcaacgaccccuuccugggcguguacuaccacaagaacaacaagagcugcauggagagcgaguuccggguguacagcagcgccaacaacugcaccuucgaguacgugagccagcccuuccugauggaccuggagggcaagcagggcaacuucaagaaccugcgggaguucguguucaagaacaucgacggcuacuucaagaucuacagcaagcacaccccaaucaaccuggugcgggaucugccccagggcuucucagcccuggagccccugguggaccugcccaucggcaucaacaucacccgguuccagacccugcuggcccugcaccggagcuaccugaccccaggcgacagcagcagcggguggacagcaggcgcggcugcuuacuacgugggcuaccugcagccccggaccuuccugcugaaguacaacgagaacggcaccaucaccgacgccguggacugcgcccuggacccucugagcgagaccaagugcacccugaagagcuucaccguggagaagggcaucuaccagaccagcaacuuccgggugcagcccaccgagagcaucgugcgguuccccaacaucaccaaccugugccccuucggcgagguguucaacgccacccgguucgccagcguguacgccuggaaccggaagcggaucagcaacugcguggccgacuacagcgugcuguacaacagcgccagcuucagcaccuucaagugcuacggcgugagccccaccaagcugaacgaccugugcuucaccaacguguacgccgacagcuucgugauccguggcgacgaggugcggcagaucgcacccggccagacaggcaagaucgccgacuacaacuacaagcugcccgacgacuucaccggcugcgugaucgccuggaacagcaacaaccucgacagcaaggugggcggcaacuacaacuaccgcuaccggcuguuccggaagagcaaccugaagcccuucgagcgggacaucagcaccgagaucuaccaagccggcuccaccccuugcaacggcguggagggcuucaacugcuacuucccucugcagagcuacggcuuccagcccaccaacggcgugggcuaccagcccuaccgggugguggugcugagcuucgagcugcugcacgccccagccaccguguguggccccaagaagagcaccaaccuggugaagaacaagugcgugaacuucaacuucaacggccuuaccggcaccggcgugcugaccgagagcaacaagaaauuccugcccuuucagcaguucggccgggacaucgccgacaccaccgacgcugugcgggauccccagacccuggagauccuggacaucaccccuugcagcuucggcggcgugagcgugaucaccccaggcaccaacaccagcaaccagguggccgugcuguaccagggcgugaacugcaccgaggugcccguggccauccacgccgaccagcugacacccaccuggcgggucuacagcaccggcagcaacguguuccagacccgggccgguugccugaucggcgccgagcacgugaacaacagcuacgagugcgacauccccaucggcgccggcaucugugccagcuaccagacccagaccaauucaccccggagggcaaggagcguggccagccagagcaucaucgccuacaccaugagccugggcgccgagaacagcguggccuacagcaacaacagcaucgccauccccaccaacuucaccaucagcgugaccaccgagauucugcccgugagcaugaccaagaccagcguggacugcaccauguacaucugcggcgacagcaccgagugcagcaaccugcugcugcaguacggcagcuucugcacccagcugaaccgggcccugaccggcaucgccguggagcaggacaagaacacccaggagguguucgcccaggugaagcagaucuacaagaccccucccaucaaggacuucggcggcuucaacuucagccagauccugcccgaccccagcaagcccagcaagcggagcuucaucgaggaccugcuguucaacaaggugacccuagccgacgccggcuucaucaagcaguacggcgacugccucggcgacauagccgcccgggaccugaucugcgcccagaaguucaacggccugaccgugcugccuccccugcugaccgacgagaugaucgcccaguacaccagcgcccuguuagccggaaccaucaccagcggcuggacuuucggcgcuggagccgcucugcagauccccuucgccaugcagauggccuaccgguucaacggcaucggcgugacccagaacgugcuguacgagaaccagaagcugaucgccaaccaguucaacagcgccaucggcaagauccaggacagccugagcagcaccgcuagcgcccugggcaagcugcaggacguggugaaccagaacgcccaggcccugaacacccuggugaagcagcugagcagcaacuucggcgccaucagcagcgugcugaacgacauccugagccggcuggacccucccgaggccgaggugcagaucgaccggcugaucacuggccggcugcagagccugcagaccuacgugacccagcagcugauccgggccgccgagauucgggccagcgccaaccuggccgccaccaagaugagcgagugcgugcugggccagagcaagcggguggacuucugcggcaagggcuaccaccugaugagcuuuccccagagcgcaccccacggagugguguuccugcacgugaccuacgugcccgcccaggagaagaacuucaccaccgccccagccaucugccacgacggcaaggcccacuuuccccgggagggcguguucgugagcaacggcacccacugguucgugacccagcggaacuucuacgagccccagaucaucaccaccgacaacaccuucgugagcggcaacugcgacguggugaucggcaucgugaacaacaccguguacgauccccugcagcccgagcuggacagcuucaaggaggagcuggacaaguacuucaagaaucacaccagccccgacguggaccugggcgacaucagcggcaucaacgccagcguggugaacauccagaaggagaucgaucggcugaacgagguggccaagaaccugaacgagagccugaucgaccugcaggagcugggcaaguacgagcaguacaucaaguggcccugguacaucuggcugggcuucaucgccggccugaucgccaucgugauggugaccaucaugcugugcugcaugaccagcugcugcagcugccugaagggcuguugcagcugcggcagcugcugcaaguucgacgaggacgacagcgagcccgugcugaagggcgugaagcugcacuacaccugaggacuaguuauaagacugacuagcccgaugggccucccaacgggcccuccuccccuccuugcaccgagagaucucaaaggcucuuuucagagccaccaaaaaaaaaaaaaaaaaaaaaaaaaaaaaaaaaaaaaaaaaaaaaaaaaaaaaaaaaaaaaaaaaaaaaaaaaaaaaaaaaaaaaaaaaaaaaaaaaaaaa

SEQ ID NO: 24671 - RNA, 4035 nt, Artificial Sequence
  SARS-CoV-2/Wuhan/WIV05/2019__EPI_ISL_402128 spike protein mRNA gc (1-1273)(K986P_V987P)
aggagaaagcuuaccauguucguguuccuggugcugcugccccuggugagcagccagugcgugaaccugaccacccggacccagcugcccccugccuacaccaacagcuucacccggggcguguacuaccccgacaagguguuccggagcagcgugcugcacagcacccaggaccuguuccugcccuucuucagcaacgugaccugguuccacgccauccacgugagcggcaccaacggcaccaagcgguucgacaacccagugcugcccuucaacgacggcguguacuucgccagcaccgagaagucaaacaucauccggggcuggaucuucggcaccacccuggacagcaagacacagagccugcugaucgugaacaacgccaccaacguggugaucaaggugugcgaguuucaguucugcaacgaccccuuccugggcguguacuaccacaagaacaacaagagcuggauggagagcgaguuccgggucuacagcagcgcuaacaauugcaccuucgaguacgugagccagcccuuccugauggaccucgagggcaagcagggcaacuucaagaaccugcgggaguucguguucaagaacaucgauggcuacuucaagaucuacagcaagcacacccccaucaaccuggugcgggaccugccccagggauucagcgcccuggagccucugguggaccugcccaucggcaucaacaucaccagguuccagacccugcuggcccugcaccggagcuaccugacccccggcgacagcagcagcggcuggaccgccggcgccgccgcauacuacgugggcuaccugcagccacggaccuuccugcugaaguacaacgagaacggcaccaucaccgacgccguggacugcgcccuggacccccugagcgagaccaagugcacccuaaagagcuucaccguggagaagggcaucuaccagaccagcaacuuccgggugcagcccacugagagcaucgugcgguuccccaacauuaccaaccugugucccuucggcgagguguucaacgccacccgguucgccagcguguacgccuggaaccggaagcggaucagcaacugcguggccgacuacagcgugcuguacaacagcgccagcuucagcaccuucaagugcuacggcgugagcccuaccaagcugaacgaccugugcuucaccaacguguacgcugacagcuucgugauccggggcgacgaggugcggcagaucgcccccggccagaccggcaagaucgccgacuacaacuacaagcugcccgacgacuucaccggcugcgugaucgccuggaacagcaacaaccuggacagcaaggugggcggcaacuacaacuaccuguaccggcuguuccguaagagcaaccugaagccauucgagcgggacaucagcaccgagaucuaccaggccggcagcacccccugcaacgguguggagggcuuuaacugcuacuucccccugcagagcuacggcuuccagcccaccaacggcgugggcuaccagcccuaccgggugguggugcugagcuucgagcugcugcacgcccccgccaccgugugcggcccuaaaaagagcaccaaccuggugaagaacaagugcgugaacuucaauuucaacggccugaccggcaccggcgugcugaccgagagcaacaagaaguuccugcccuuccagcaguucggccgggauaucgccgacaccaccgacgcagugcgggacccccagacccuggagauccuggacaucaccccaugcagcuucggcggcgugagcgucaucacccccggcacaaacaccagcaaccagguggccgugcuguaccaggacgugaacugcaccgaggugcccguggccauccacgccgaccagcugacccccaccuggcggguguacagcaccggaagcaacguguuccagacccgggccggcugccugaucggcgccgagcacgugaacaacuccuacgagugcgacauccccaucggcgcuggcaucugcgccagcuaccagacccagaccaacagcccccggcgggcccggagcguggccagccagagcaucaucgccuacaccaugagcuuaggcgccgagaacagcguggccuacagcaacaacagcaucgcgaucccuaccaacuucaccaucagcgugaccaccgagauacugcccgugagcaugaccaagaccagcguggacuguaccauguacaucugcggcgacagcaccgagugcagcaaccugcugcugcaguacggcagcuucugcacccagcugaaccgggcccugaccggcaucgccguggagcaggacaagaacacccaagagguguucgcccaggugaagcagaucuacaagacucccccaaucaaggacuucggcggcuucaacuucagccagauccugcccgaccccagcaagcccagcaagcggagcuucaucgaggaccugcuguucaacaaggugacccuggccgacgccggcuucaucaagcaguacggcgauugccugggcgacaucgccgcucgggaccugaucugcgcccagaaguucaacgggcugaccgugcugcccccucugcugaccgacgagaugaucgcccaguacaccagcgcccugcuugccggcaccaucaccagcggcuggaccuucggcgccggcgcagcccugcagauccccuucgccaugcagauggccuaccgguucaacggcaucggcgugacccagaacgugcuguacgagaaccagaagcugaucgccaaccaguucaacagcgccaucggcaagauccaggacagccugagcagcaccgccagcgcccugggcaagcugcaggacguggugaaccagaacgcucaggcccugaacacccuggugaagcagcugagcagcaacuucggcgccaucagcucagugcugaaugacauccugagcaggcuggaucccccagaggccgaggugcagaucgaccggcugaucaccggccggcugcagagccugcagaccuacgugacccagcagcugauccgggccgccgagauccgggccagcgccaaccuggcagccaccaagaugagcgagugcgugcugggccagagcaagcggguggacuuuugcggcaagggcuaccaccugaugagcuucccccagagcgcuccccacggcgugguguuccuccacgugacauacguccccgcccaggagaagaacuucaccaccgcccccgccauuugccacgacggcaaggcccacuucccccgggagggcguguucgugagcaacggaacccacugguucgugacccagcggaacuucuacgagccucagaucaucaccaccgacaacaccuucgugagcggcaacugcgacguggugaucggcaucgugaacaacaccguguacgacccccugcagcccgagcuggacagcuucaaggaggagcuggacaaguacuucaagaaccacaccagcccagacguggaccugggcgacaucagcggcaucaacgccagcguggugaacauccagaaggagaucgaccggcugaacgagguggccaagaaccugaacgagagccugaucgaccugcaggagcugggcaaguacgagcaguacaucaaguggcccugguacaucuggcugggcuucaucgccggccugaucgccaucgugauggugaccaucaugcugugcugcaugaccagcugcuguagcugccugaagggcugcugcagcugcggcagcugcugcaaguucgacgaggacgacagcgagcccgugcugaagggcgugaagcugcacuacaccugaggacuaguuauaagacugacuagcccgaugggccucccaacgggcccuccuccccuccuugcaccgagagaucucaaaggcucuuuucagagccaccaaaaaaaaaaaaaaaaaaaaaaaaaaaaaaaaaaaaaaaaaaaaaaaaaaaaaaaaaaaaaaaaaaaaaaaaaaaaaaaaaaaaaaaaaaaaaaaaaaaaa

SEQ ID NO: 24672 - RNA, 4035 nt, Artificial Sequence
  SARS-CoV-2/Wuhan/WIV05/2019__EPI_ISL_402128 spike protein mRNA gc (1-1273)(K986P_V987P_ D614G)
aggagaaagcuuaccauguucguguuccuggugcugcugccccuggugagcagccagugcgugaaccugaccacccggacccagcugcccccugccuacaccaacagcuucacccggggcguguacuaccccgacaagguguuccggagcagcgugcugcacagcacccaggaccuguuccugcccuucuucagcaacgugaccugguuccacgccauccacgugagcggcaccaacggcaccaagcgguucgacaacccagugcugcccuucaacgacggcguguacuucgccagcaccgagaagucaaacaucauccggggcuggaucuucggcaccacccuggacagcaagacacagagccugcugaucgugaacaacgccaccaacguggugaucaaggugugcgaguuucaguucugcaacgaccccuuccugggcguguacuaccacaagaacaacaagagcuggauggagagcgaguuccgggucuacagcagcgcuaacaauugcaccuucgaguacgugagccagcccuuccugauggaccucgagggcaagcagggcaacuucaagaaccugcgggaguucguguucaagaacaucgauggcuacuucaagaucuacagcaagcacacccccaucaaccuggugcgggaccugccccagggauucagcgcccuggagccucugguggaccugcccaucggcaucaacaucaccagguuccagacccugcuggcccugcaccggagcuaccugacccccggcgacagcagcagcggcuggaccgccggcgccgccgcauacuacgugggcuaccugcagccacggaccuuccugcugaaguacaacgagaacggcaccaucaccgacgccguggacugcgcccuggacccccugagcgagaccaagugcacccuaaagagcuucaccguggagaagggcaucuaccagaccagcaacuuccgggugcagcccacugagagcaucgugcgguuccccaacauuaccaaccugugucccuucggcgagguguucaacgccacccgguucgccagcguguacgccuggaaccggaagcggaucagcaacugcguggccgacuacagcgugcuguacaacagcgccagcuucagcaccuucaagugcuacggcgugagcccuaccaagcugaacgaccugugcuucaccaacguguacgcugacagcuucgugauccggggcgacgaggugcggcagaucgcccccggccagaccggcaagaucgccgacuacaacuacaagcugcccgacgacuucaccggcugcgugaucgccuggaacagcaacaaccuggacagcaaggugggcggcaacuacaacuaccuguaccggcuguuccguaagagcaaccugaagccauucgagcgggacaucagcaccgagaucuaccaggccggcagcacccccugcaacgguguggagggcuuuaacugcuacuucccccugcagagcuacggcuuccagcccaccaacggcgugggcuaccagcccuaccgggugguggugcugagcuucgagcugcugcacgcccccgccaccgugugcggcccuaaaaagagcaccaaccuggugaagaacaagugcgugaacuucaauuucaacggccugaccggcaccggcgugcugaccgagagcaacaagaaguuccugcccuuccagcaguucggccgggauaucgccgacaccaccgacgcagugcgggacccccagacccuggagauccuggacaucaccccaugcagcuucggcggcgugagcgucaucacccccggcacaaacaccagcaaccagguggccgugcuguaccagggagugaacugcaccgaggugcccguggccauccacgccgaccagcugacccccaccuggcggguguacagcaccggcagcaacguguuccagacccgggccggcugccugaucggcgccgagcacgugaacaacuccuacgagugcgacauccccaucggcgcuggcaucugcgccagcuaccagacccagaccaacagcccccggcgggcccggagcguggccagccagagcaucaucgccuacaccaugagcuuaggcgccgagaacagcguggccuacagcaacaacagcaucgcgaucccuaccaacuucaccaucagcgugaccaccgagauacugcccgugagcaugaccaagaccagcguggacuguaccauguacaucugcggcgacagcaccgagugcagcaaccugcugcugcaguacggcagcuucugcacccagcugaaccgggcccugaccggcaucgccguggagcaggacaagaacacccaagagguguucgcccaggugaagcagaucuacaagacucccccaaucaaggacuucggcggcuucaacuucagccagauccugcccgaccccagcaagcccagcaagcggagcuucaucgaggaccugcuguucaacaaggugacccuggccgacgccggcuucaucaagcaguacggcgacugccugggggauaucgccgcucgggaccugaucugcgcccagaaguucaacggccugaccgugcugcccccucugcugaccgacgagaugaucgcccaguacaccagcgcccugcuugccggcaccaucaccagcggcuggaccuucggcgccggcgcagcccugcagauccccuucgccaugcagauggccuaccgguucaacggcaucggcgugacccagaacgugcuguacgagaaccagaagcugaucgccaaccaguucaacagcgccaucggcaagauccaggacagccugagcagcaccgccagcgcccugggcaagcugcaggacguggugaaccagaacgcucaggcccugaacacccuggugaagcagcugagcagcaacuucggcgccaucagcucagugcugaaugacauccugagcaggcuggaucccccagaggccgaggugcagaucgaccggcugaucaccggccggcugcagagccugcagaccuacgugacccagcagcugauccgggccgccgagauccgggccagcgccaaccuggcagccaccaagaugagcgagugcgugcugggccagagcaagcggguggacuuuugcggcaagggcuaccaccugaugagcuucccccagagcgcuccccacggcgugguguuccuccacgugacauacguccccgcccaggagaagaacuucaccaccgcccccgccauuugccacgacggcaaggcccacuucccccgggagggaguguucgugagcaacggcacccacugguucgugacccagcggaacuucuacgagccucagaucaucaccaccgacaacaccuucgugagcggcaacugcgacguggugaucggcaucgugaacaacaccguguacgacccccugcagcccgagcuggacagcuucaaggaggagcuggacaaguacuucaagaaccacaccagcccagacguggaccugggcgacaucagcggcaucaacgccagcguggugaacauccagaaggagaucgaccggcugaacgagguggccaagaaccugaacgagagccugaucgaccugcaggagcugggcaaguacgagcaguacaucaaguggcccugguacaucuggcugggcuucaucgccggccugaucgccaucgugauggugaccaucaugcugugcugcaugaccagcugcuguagcugccugaagggcugcugcagcugcggcagcugcugcaaguucgacgaggacgacagcgagcccgugcugaagggcgugaagcugcacuacaccugaggacuaguuauaagacugacuagcccgaugggccucccaacgggcccuccuccccuccuugcaccgagagaucucaaaggcucuuuucagagccaccaaaaaaaaaaaaaaaaaaaaaaaaaaaaaaaaaaaaaaaaaaaaaaaaaaaaaaaaaaaaaaaaaaaaaaaaaaaaaaaaaaaaaaaaaaaaaaaaaaaaa

SEQ ID NO: 24673 - RNA, 4035 nt, Artificial Sequence
  SARS-CoV-2/Wuhan/WIV05/2019__EPI_ISL_402128 spike protein mRNA gc (1-1273)(K986P_V987P_A222V_D614G)
aggagaaagcuuaccauguucguguuccuggugcugcugccccuggugagcagccagugcgugaaccugaccacccggacccagcugcccccugccuacaccaacagcuucacccggggcguguacuaccccgacaagguguuccggagcagcgugcugcacagcacccaggaccuguuccugcccuucuucagcaacgugaccugguuccacgccauccacgugagcggcaccaacggcaccaagcgguucgacaacccagugcugcccuucaacgacggcguguacuucgccagcaccgagaagucaaacaucauccggggcuggaucuucggcaccacccuggacagcaagacacagagccugcugaucgugaacaacgccaccaacguggugaucaaggugugcgaguuucaguucugcaacgaccccuuccugggcguguacuaccacaagaacaacaagagcuggauggagagcgaguuccgggucuacagcagcgcuaacaauugcaccuucgaguacgugagccagcccuuccugauggaccucgagggcaagcagggcaacuucaagaaccugcgggaguucguguucaagaacaucgauggcuacuucaagaucuacagcaagcacacccccaucaaccuggugcgggaccugccccagggauucagcgugcuggagccucugguggaccugcccaucggcaucaacaucaccagguuccagacccugcuggcccugcaccggagcuaccugacccccggcgacagcagcagcggcuggaccgccggcgccgccgccuacuacgugggcuaccugcagccacggaccuuccugcugaaguacaacgagaacggcaccaucaccgacgcaguggacugcgcccuggacccccugagcgagaccaagugcacccuaaagagcuucaccguggagaagggcaucuaccagaccagcaacuuccgggugcagcccacugagagcaucgugcgguuccccaacauuaccaaccugugucccuucggcgagguguucaacgccacccgguucgccagcguguacgccuggaaccggaagcggaucagcaacugcguggccgacuacagcgugcuguacaacagcgccagcuucagcaccuucaagugcuacggcgugagcccuaccaagcugaacgaccugugcuucaccaacguguacgccgacagcuucgugauccggggcgacgaggugcggcagaucgcucccggccagaccggcaagaucgccgacuacaacuacaagcugcccgacgacuucaccggcugcgugaucgccuggaacagcaacaaccuggacagcaaggugggcggcaacuacaacuaccuguaccggcuguuccguaagagcaaccugaagccauucgagcgggacaucagcaccgagaucuaccaggccggcagcacccccugcaacgguguggagggcuuuaacugcuacuucccccugcagagcuacggcuuccagcccaccaacggcgugggcuaccagcccuaccgggugguggugcugagcuucgagcugcugcacgcccccgccaccgugugcggcccuaaaaagagcaccaaccuggugaagaacaagugcgugaacuucaauuucaacggccugaccggcaccggcgugcugaccgagagcaacaagaaguuccugcccuuccagcaguucggccgggauaucgccgacaccaccgacgccgugcgggacccccagacccuggagauccuggacaucaccccaugcagcuucggcggcgucagcgugaucacccccggcacaaacaccagcaaccagguggcagugcuguaccagggagugaacugcaccgaggugcccguggccauccacgccgaccagcugacccccaccuggcggguguacagcaccggcagcaacguguuccagacccgggccggcugccugaucggcgccgagcacgugaacaacuccuacgagugcgacauccccaucggcgccggcaucugcgcuagcuaccagacccagaccaacagcccccggcgggcccggagcguggccagccagagcaucaucgccuacaccaugagcuuaggcgccgagaacagcguggccuacagcaacaacagcaucgccaucccuaccaacuucaccaucagcgugaccaccgagauacugcccgugagcaugaccaagaccagcguggacuguaccauguacaucugcggcgacagcaccgagugcagcaaccugcugcugcaguacggcagcuucugcacccagcugaaccgggcgcugaccggcaucgccguggagcaggacaagaacacccaagagguguucgcccaggugaagcagaucuacaagacucccccaaucaaggacuucggcggcuucaacuucagccagauccugcccgaccccagcaagcccagcaagcggagcuucaucgaggaccugcuguucaacaaggugacccuggccgacgccggcuucaucaagcaguacggcgacugccugggggauaucgccgcccgggaccugaucugcgcucagaaguucaacggccugaccgugcugcccccucugcugaccgacgagaugaucgcccaguacaccagcgcccugcuugccggcaccaucaccagcggcuggaccuucggcgccggcgccgcacugcagauccccuucgccaugcagauggccuaccgguucaacggcaucggcgugacccagaacgugcuguacgagaaccagaagcugaucgccaaccaguucaacagcgccaucggcaagauccaggacagccugagcagcaccgccagcgcccugggcaagcugcaggacguggugaaccagaacgcccaggcucugaacacccuggugaagcagcugagcagcaacuucggcgccaucagcucagugcugaaugacauccugagcaggcuggaucccccagaggccgaggugcagaucgaccggcugaucaccggccggcugcagagccugcagaccuacgugacccagcagcugauccgggccgccgagauccgggccagcgccaaccuggccgcaaccaagaugagcgagugcgugcugggccagagcaagcggguggacuuuugcggcaagggcuaccaccugaugagcuucccccagagcgcuccccacggcgugguguuccuccacgucacauacgugcccgcccaggagaagaacuucaccaccgcccccgccauuugccacgacggcaaggcccacuucccccgggagggaguguucgugagcaacggcacccacugguucgugacccagcggaacuucuacgagccucagaucaucaccaccgacaacaccuucgugagcggcaacugcgacguggugaucggcaucgugaacaacaccguguacgacccccugcagcccgagcuggacagcuucaaggaggagcuggacaaguacuucaagaaccacaccagcccagacguggaccugggcgacaucagcggcaucaacgccagcguggugaacauccagaaggagaucgaccggcugaacgagguggccaagaaccugaacgagagccugaucgaccugcaggagcugggcaaguacgagcaguacaucaaguggcccugguacaucuggcugggcuucaucgccggccugaucgccaucgugauggugaccaucaugcugugcugcaugaccagcugcuguagcugccugaagggcugcugcagcugcggcagcugcugcaaguucgacgaggacgacagcgagcccgugcugaagggcgugaagcugcacuacaccugaggacuaguuauaagacugacuagcccgaugggccucccaacgggcccuccuccccuccuugcaccgagagaucucaaaggcucuuuucagagccaccaaaaaaaaaaaaaaaaaaaaaaaaaaaaaaaaaaaaaaaaaaaaaaaaaaaaaaaaaaaaaaaaaaaaaaaaaaaaaaaaaaaaaaaaaaaaaaaaaaaaa

SEQ ID NO: 24674 - RNA, 4035 nt, Artificial Sequence
  SARS-CoV-2/Wuhan/WIV05/2019__EPI_ISL_402128 spike protein mRNA gc (1-1273)(K986P_V987P_N439K_D614G)
aggagaaagcuuaccauguucguguuccuggugcugcugccccuggugagcagccagugcgugaaccugaccacccggacccagcugcccccugccuacaccaacagcuucacccggggcguguacuaccccgacaagguguuccggagcagcgugcugcacagcacccaggaccuguuccugcccuucuucagcaacgugaccugguuccacgccauccacgugagcggcaccaacggcaccaagcgguucgacaacccagugcugcccuucaacgacggcguguacuucgccagcaccgagaagucaaacaucauccggggcuggaucuucggcaccacccuggacagcaagacacagagccugcugaucgugaacaacgccaccaacguggugaucaaggugugcgaguuucaguucugcaacgaccccuuccugggcguguacuaccacaagaacaacaagagcuggauggagagcgaguuccgggucuacagcagcgcuaacaauugcaccuucgaguacgugagccagcccuuccugauggaccucgagggcaagcagggcaacuucaagaaccugcgggaguucguguucaagaacaucgauggcuacuucaagaucuacagcaagcacacccccaucaaccuggugcgggaccugccccagggauucagcgcccuggagccucugguggaccugcccaucggcaucaacaucaccagguuccagacccugcuggcccugcaccggagcuaccugacccccggcgacagcagcagcggcuggaccgccggcgccgccgcauacuacgugggcuaccugcagccacggaccuuccugcugaaguacaacgagaacggcaccaucaccgacgccguggacugcgcccuggacccccugagcgagaccaagugcacccuaaagagcuucaccguggagaagggcaucuaccagaccagcaacuuccgggugcagcccacugagagcaucgugcgguuccccaacauuaccaaccugugucccuucggcgagguguucaacgccacccgguucgccagcguguacgccuggaaccggaagcggaucagcaacugcguggccgacuacagcgugcuguacaacagcgccagcuucagcaccuucaagugcuacggcgugagcccuaccaagcugaacgaccugugcuucaccaacguguacgcugacagcuucgugauccggggcgacgaggugcggcagaucgcccccggccagaccggcaagaucgccgacuacaacuacaagcugcccgacgacuucaccggcugcgugaucgccuggaacagcaagaaccuggacagcaaggugggcggcaacuacaacuaccuguaccggcuguuccguaagagcaaccugaagccauucgagcgggacaucagcaccgagaucuaccaggccggcagcacccccugcaacgguguggagggcuuuaacugcuacuucccccugcagagcuacggcuuccagcccaccaacggcgugggcuaccagcccuaccgggugguggugcugagcuucgagcugcugcacgcccccgccaccgugugcggcccuaaaaagagcaccaaccuggugaagaacaagugcgugaacuucaacuucaauggccugaccggcaccggcgugcugaccgagagcaacaagaaguuccugcccuuccagcaguucggccgggauaucgccgacaccaccgacgcagugcgggacccccagacccuggagauccuggacaucaccccaugcagcuucggcggcgugagcgucaucacccccggcacaaacaccagcaaccagguggccgugcuguaccagggagugaacugcaccgaggugcccguggccauccacgccgaccagcugacccccaccuggcggguguacagcaccggcagcaacguguuccagacccgggccggcugccugaucggcgccgagcacgugaacaacuccuacgagugcgacauccccaucggcgcuggcaucugcgccagcuaccagacccagaccaacagcccccggcgggcccggagcguggccagccagagcaucaucgccuacaccaugagcuuaggcgccgagaacagcguggccuacagcaacaacagcaucgcgaucccuaccaacuucaccaucagcgugaccaccgagauacugcccgugagcaugaccaagaccagcguggacuguaccauguacaucugcggcgacagcaccgagugcagcaaccugcugcugcaguacggcagcuucugcacccagcugaaccgggcccugaccggcaucgccguggagcaggacaagaacacccaagagguguucgcccaggugaagcagaucuacaagacucccccaaucaaggacuucggcggcuucaacuucagccagauccugcccgaccccagcaagcccagcaagcggagcuucaucgaggaccugcuguucaacaaggugacccuggccgacgccggcuucaucaagcaguacggcgacugccugggggauaucgccgcucgggaccugaucugcgcccagaaguucaacggccugaccgugcugcccccucugcugaccgacgagaugaucgcccaguacaccagcgcccugcuugccggcaccaucaccagcggcuggaccuucggcgccggcgcagcccugcagauccccuucgccaugcagauggccuaccgguucaacggcaucggcgugacccagaacgugcuguacgagaaccagaagcugaucgccaaccaguucaacagcgccaucggcaagauccaggacagccugagcagcaccgccagcgcccugggcaagcugcaggacguggugaaccagaacgcucaggcccugaacacccuggugaagcagcugagcagcaacuucggcgccaucagcucagugcugaacgacauccugagcaggcuggaucccccagaggccgaggugcagaucgaccggcugaucaccggccggcugcagagccugcagaccuacgugacccagcagcugauccgggccgccgagauccgggccagcgccaaucuggcagccaccaagaugagcgagugcgugcugggccagagcaagcggguggacuuuugcggcaagggcuaccaccugaugagcuucccccagagcgcuccccacggcgugguguuccuccacgugacauacguccccgcccaggagaagaacuucaccaccgcccccgccauuugccacgacggcaaggcccacuucccccgggagggaguguucgugagcaacggcacccacugguucgugacccagcggaacuucuacgagccucagaucaucaccaccgacaacaccuucgugagcggcaacugcgacguggugaucggcaucgugaacaacaccguguacgacccccugcagcccgagcuggacagcuucaaggaggagcuggacaaguacuucaagaaccacaccagcccagacguggaccugggcgacaucagcggcaucaacgccagcguggugaacauccagaaggagaucgaccggcugaacgagguggccaagaaccugaacgagagccugaucgaccugcaggagcugggcaaguacgagcaguacaucaaguggcccugguacaucuggcugggcuucaucgccggccugaucgccaucgugauggugaccaucaugcugugcugcaugaccagcugcuguagcugccugaagggcugcugcagcugcggcagcugcugcaaguucgacgaggacgacagcgagcccgugcugaagggcgugaagcugcacuacaccugaggacuaguuauaagacugacuagcccgaugggccucccaacgggcccuccuccccuccuugcaccgagagaucucaaaggcucuuuucagagccaccaaaaaaaaaaaaaaaaaaaaaaaaaaaaaaaaaaaaaaaaaaaaaaaaaaaaaaaaaaaaaaaaaaaaaaaaaaaaaaaaaaaaaaaaaaaaaaaaaaaaa

SEQ ID NO: 24675 - RNA, 4035 nt, Artificial Sequence
  SARS-CoV-2/Wuhan/WIV05/2019__EPI_ISL_402128 spike protein mRNA gc (1-1273)(K986P_V987P_S477N_D614G)
aggagaaagcuuaccauguucguguuccuggugcugcugccccuggugagcagccagugcgugaaccugaccacccggacccagcugcccccugccuacaccaacagcuucacccggggcguguacuaccccgacaagguguuccggagcagcgugcugcacagcacccaggaccuguuccugcccuucuucagcaacgugaccugguuccacgccauccacgugagcggcaccaacggcaccaagcgguucgacaacccagugcugcccuucaacgacggcguguacuucgccagcaccgagaagucaaacaucauccggggcuggaucuucggcaccacccuggacagcaagacacagagccugcugaucgugaacaacgccaccaacguggugaucaaggugugcgaguuucaguucugcaacgaccccuuccugggcguguacuaccacaagaacaacaagagcuggauggagagcgaguuccgggucuacagcagcgcuaacaauugcaccuucgaguacgugagccagcccuuccugauggaccucgagggcaagcagggcaacuucaagaaccugcgggaguucguguucaagaacaucgauggcuacuucaagaucuacagcaagcacacccccaucaaccuggugcgggaccugccccagggauucagcgcccuggagccucugguggaccugcccaucggcaucaacaucaccagguuccagacccugcuggcccugcaccggagcuaccugacccccggcgacagcagcagcggcuggaccgccggcgccgccgcauacuacgugggcuaccugcagccacggaccuuccugcugaaguacaacgagaacggcaccaucaccgacgccguggacugcgcccuggacccccugagcgagaccaagugcacccuaaagagcuucaccguggagaagggcaucuaccagaccagcaacuuccgggugcagcccacugagagcaucgugcgguuccccaacauuaccaaccugugucccuucggcgagguguucaacgccacccgguucgccagcguguacgccuggaaccggaagcggaucagcaacugcguggccgacuacagcgugcuguacaacagcgccagcuucagcaccuucaagugcuacggcgugagcccuaccaagcugaacgaccugugcuucaccaacguguacgcugacagcuucgugauccggggcgacgaggugcggcagaucgcccccggccagaccggcaagaucgccgacuacaacuacaagcugcccgacgacuucaccggcugcgugaucgccuggaacagcaacaaccuggacagcaaggugggcggcaacuacaacuaccuguaccggcuguuccguaagagcaaccugaagccauucgagcgggacaucagcaccgagaucuaccaggccggcaacacccccugcaacgguguggagggcuuuaacugcuacuucccccugcagagcuacggcuuccagcccaccaacggcgugggcuaccagcccuaccgggugguggugcugagcuucgagcugcugcacgcccccgccaccgugugcggcccuaaaaagagcaccaaccuggugaagaacaagugcgugaauuucaacuucaacggccugaccggcaccggcgugcugaccgagagcaacaagaaguuccugcccuuccagcaguucggccgggauaucgccgacaccaccgacgcagugcgggacccccagacccuggagauccuggacaucaccccaugcagcuucggcggcgugagcgucaucacccccggcacaaacaccagcaaccagguggccgugcuguaccagggagugaacugcaccgaggugcccguggccauccacgccgaccagcugacccccaccuggcggguguacagcaccggcagcaacguguuccagacccgggccggcugccugaucggcgccgagcacgugaacaacagcuacgagugcgacauccccaucggcgcuggcaucugcgccuccuaccagacccagaccaacagcccccggcgggcccggagcguggccagccagagcaucaucgccuacaccaugagcuuaggcgccgagaacagcguggccuacagcaacaacagcaucgcgaucccuaccaacuucaccaucagcgugaccaccgagauacugcccgugagcaugaccaagaccagcguggacuguaccauguacaucugcggcgacagcaccgagugcagcaaccugcugcugcaguacggcagcuucugcacccagcugaaccgggcccugaccggcaucgccguggagcaggacaagaacacccaagagguguucgcccaggugaagcagaucuacaagacucccccaaucaaggacuucggcggcuucaacuucagccagauccugcccgaccccagcaagcccagcaagcggagcuucaucgaggaccugcuguucaacaaggugacccuggccgacgccggcuucaucaagcaguacggcgacugccugggggauaucgccgcucgggaccugaucugcgcccagaaguucaacggccugaccgugcugcccccucugcugaccgacgagaugaucgcccaguacaccagcgcccugcuugccggcaccaucaccagcggcuggaccuucggcgccggcgcagcccugcagauccccuucgccaugcagauggccuaccgguucaacggcaucggcgugacccagaacgugcuguacgagaaccagaagcugaucgccaaccaguucaacagcgccaucggcaagauccaggacagccugagcagcaccgccagcgcccugggcaagcugcaggacguggugaaccagaacgcucaggcccugaacacccuggugaagcagcugagcagcaauuucggcgccaucagcagcgugcugaacgacauccugucaaggcuggaucccccagaggccgaggugcagaucgaccggcugaucaccggccggcugcagagccugcagaccuacgugacccagcagcugauccgggccgccgagauccgggccagcgccaaccuggcagccaccaagaugagcgagugcgugcugggccagagcaagcggguggacuuuugcggcaagggcuaccaccugaugagcuucccccagagcgcuccccacggcgugguguuccuccacgugacauacguccccgcccaggagaagaacuucaccaccgcccccgccauuugccacgacggcaaggcccacuucccccgggagggaguguucgugagcaacggcacccacugguucgugacccagcggaacuucuacgagccucagaucaucaccaccgacaacaccuucgugagcggcaacugcgacguggugaucggcaucgugaacaacaccguguacgacccccugcagcccgagcuggacagcuucaaggaggagcuggacaaguacuucaagaaccacaccagcccagacguggaccugggcgacaucagcggcaucaacgccagcguggugaacauccagaaggagaucgaccggcugaacgagguggccaagaaccugaacgagagccugaucgaccugcaggagcugggcaaguacgagcaguacaucaaguggcccugguacaucuggcugggcuucaucgccggccugaucgccaucgugauggugaccaucaugcugugcugcaugaccagcugcuguagcugccugaagggcugcugcagcugcggcagcugcugcaaguucgacgaggacgacagcgagcccgugcugaagggcgugaagcugcacuacaccugaggacuaguuauaagacugacuagcccgaugggccucccaacgggcccuccuccccuccuugcaccgagagaucucaaaggcucuuuucagagccaccaaaaaaaaaaaaaaaaaaaaaaaaaaaaaaaaaaaaaaaaaaaaaaaaaaaaaaaaaaaaaaaaaaaaaaaaaaaaaaaaaaaaaaaaaaaaaaaaaaaaa

SEQ ID NO: 24676 - RNA, 4035 nt, Artificial Sequence
  SARS-CoV-2/Wuhan/WIV05/2019__EPI_ISL_402128 spike protein mRNA gc (1-1273)(K986P_V987P_N501Y_D614G)
aggagaaagcuuaccauguucguguuccuggugcugcugccccuggugagcagccagugcgugaaccugaccacccggacccagcugcccccugccuacaccaacagcuucacccggggcguguacuaccccgacaagguguuccggagcagcgugcugcacagcacccaggaccuguuccugcccuucuucagcaacgugaccugguuccacgccauccacgugagcggcaccaacggcaccaagcgguucgacaacccagugcugcccuucaacgacggcguguacuucgccagcaccgagaagucaaacaucauccggggcuggaucuucggcaccacccuggacagcaagacacagagccugcugaucgugaacaacgccaccaacguggugaucaaggugugcgaguuucaguucugcaacgaccccuuccugggcguguacuaccacaagaacaacaagagcuggauggagagcgaguuccgggucuacagcagcgcuaacaauugcaccuucgaguacgugagccagcccuuccugauggaccucgagggcaagcagggcaacuucaagaaccugcgggaguucguguucaagaacaucgauggcuacuucaagaucuacagcaagcacacccccaucaaccuggugcgggaccugccccagggauucagcgcccuggagccucugguggaccugcccaucggcaucaacaucaccagguuccagacccugcuggcccugcaccggagcuaccugacccccggcgacagcagcagcggcuggaccgccggcgccgccgcauacuacgugggcuaccugcagccacggaccuuccugcugaaguacaacgagaacggcaccaucaccgacgccguggacugcgcccuggacccccugagcgagaccaagugcacccuaaagagcuucaccguggagaagggcaucuaccagaccagcaacuuccgggugcagcccacugagagcaucgugcgguuccccaacauuaccaaccugugucccuucggcgagguguucaacgccacccgguucgccagcguguacgccuggaaccggaagcggaucagcaacugcguggccgacuacagcgugcuguacaacagcgccagcuucagcaccuucaagugcuacggcgugagcccuaccaagcugaacgaccugugcuucaccaacguguacgcugacagcuucgugauccggggcgacgaggugcggcagaucgcccccggccagaccggcaagaucgccgacuacaacuacaagcugcccgacgacuucaccggcugcgugaucgccuggaacagcaacaaccuggacagcaaggugggcggcaacuacaacuaccuguaccggcuguuccguaagagcaaccugaagccauucgagcgggacaucagcaccgagaucuaccaggccggcagcacccccugcaacgguguggagggcuuuaacugcuacuucccccugcagagcuacggcuuccagcccaccuacggcgugggcuaccagcccuaccgggugguggugcugagcuucgagcugcugcacgcccccgccaccgugugcggcccuaaaaagagcaccaaccuggugaagaacaagugcgugaacuucaacuucaauggccugaccggcaccggcgugcugaccgagagcaacaagaaguuccugcccuuccagcaguucggccgggauaucgccgacaccaccgacgcagugcgggacccccagacccuggagauccuggacaucaccccaugcagcuucggcggcgugagcgucaucacccccggcacaaacaccagcaaccagguggccgugcuguaccagggagugaacugcaccgaggugcccguggccauccacgccgaccagcugacccccaccuggcggguguacagcaccggcagcaacguguuccagacccgggccggcugccugaucggcgccgagcacgugaacaacuccuacgagugcgacauccccaucggcgcuggcaucugcgccagcuaccagacccagaccaacagcccccggcgggcccggagcguggccagccagagcaucaucgccuacaccaugagcuuaggcgccgagaacagcguggccuacagcaacaacagcaucgcgaucccuaccaacuucaccaucagcgugaccaccgagauacugcccgugagcaugaccaagaccagcguggacuguaccauguacaucugcggcgacagcaccgagugcagcaaccugcugcugcaguacggcagcuucugcacccagcugaaccgggcccugaccggcaucgccguggagcaggacaagaacacccaagagguguucgcccaggugaagcagaucuacaagacucccccaaucaaggacuucggcggcuucaacuucagccagauccugcccgaccccagcaagcccagcaagcggagcuucaucgaggaccugcuguucaacaaggugacccuggccgacgccggcuucaucaagcaguacggcgacugccugggggauaucgccgcucgggaccugaucugcgcccagaaguucaacggccugaccgugcugcccccucugcugaccgacgagaugaucgcccaguacaccagcgcccugcuugccggcaccaucaccagcggcuggaccuucggcgccggcgcagcccugcagauccccuucgccaugcagauggccuaccgguucaacggcaucggcgugacccagaacgugcuguacgagaaccagaagcugaucgccaaccaguucaacagcgccaucggcaagauccaggacagccugagcagcaccgccagcgcccugggcaagcugcaggacguggugaaccagaacgcucaggcccugaacacccuggugaagcagcugagcagcaacuucggcgccaucagcucagugcugaacgacauccugagcaggcuggaucccccagaggccgaggugcagaucgaccggcugaucaccggccggcugcagagccugcagaccuacgugacccagcagcugauccgggccgccgagauccgggccagcgccaaucuggcagccaccaagaugagcgagugcgugcugggccagagcaagcggguggacuuuugcggcaagggcuaccaccugaugagcuucccccagagcgcuccccacggcgugguguuccuccacgugacauacguccccgcccaggagaagaacuucaccaccgcccccgccauuugccacgacggcaaggcccacuucccccgggagggaguguucgugagcaacggcacccacugguucgugacccagcggaacuucuacgagccucagaucaucaccaccgacaacaccuucgugagcggcaacugcgacguggugaucggcaucgugaacaacaccguguacgacccccugcagcccgagcuggacagcuucaaggaggagcuggacaaguacuucaagaaccacaccagcccagacguggaccugggcgacaucagcggcaucaacgccagcguggugaacauccagaaggagaucgaccggcugaacgagguggccaagaaccugaacgagagccugaucgaccugcaggagcugggcaaguacgagcaguacaucaaguggcccugguacaucuggcugggcuucaucgccggccugaucgccaucgugauggugaccaucaugcugugcugcaugaccagcugcuguagcugccugaagggcugcugcagcugcggcagcugcugcaaguucgacgaggacgacagcgagcccgugcugaagggcgugaagcugcacuacaccugaggacuaguuauaagacugacuagcccgaugggccucccaacgggcccuccuccccuccuugcaccgagagaucucaaaggcucuuuucagagccaccaaaaaaaaaaaaaaaaaaaaaaaaaaaaaaaaaaaaaaaaaaaaaaaaaaaaaaaaaaaaaaaaaaaaaaaaaaaaaaaaaaaaaaaaaaaaaaaaaaaaa

SEQ ID NO: 24677 - RNA, 4029 nt, Artificial Sequence
  SARS-CoV-2/Wuhan/WIV05/2019__EPI_ISL_402128 spike protein mRNA gc (1-1273)(K986P_V987P_H69del_V70del_D614G)
aggagaaagcuuaccauguucguguuccuggugcugcugccccuggugagcagccagugcgugaaccugaccacccggacccagcugcccccugccuacaccaacagcuucacccggggcguguacuaccccgacaagguguuccggagcagcgugcugcacagcacccaggaccuguuccugcccuucuucagcaacgugaccugguuccacgccaucagcggcaccaacggcaccaagcgguucgacaacccagugcugcccuucaacgacggcguguacuucgccagcaccgagaagucaaacaucauccggggcuggaucuucggcaccacccuggacagcaagacacagagccugcugaucgugaacaacgccaccaacguggugaucaaggugugcgaguuucaguucugcaacgaccccuuccugggcguguacuaccacaagaacaacaagagcuggauggagagcgaguuccggguguacagcagcgcuaacaauugcaccuucgaguacgucagccagcccuuccugauggaccucgagggcaagcagggcaacuucaagaaccugcgggaguucguguucaagaacaucgauggcuacuucaagaucuacagcaagcacacccccaucaaccuggugcgggaccugccccagggauucagcgcccuggagccucugguggaccugcccaucggcaucaacaucaccagguuccagacccugcuggcccugcaccggagcuaccugacccccggcgacagcagcagcggcuggaccgccggcgccgccgcauacuacgugggcuaccugcagccacggaccuuccugcugaaguacaacgagaacggcaccaucaccgacgccguggacugcgcccuggacccccugagcgagaccaagugcacccuaaagagcuucaccguggagaagggcaucuaccagaccagcaacuuccgggugcagcccacugagagcaucgugcgguuccccaacauuaccaaccugugucccuucggcgagguguucaacgccacccgguucgccagcguguacgccuggaaccggaagcggaucagcaacugcguggccgacuacagcgugcuguacaacagcgccagcuucagcaccuucaagugcuacggcgugagcccuaccaagcugaacgaccugugcuucaccaacguguacgcugacagcuucgugauccggggcgacgaggugcggcagaucgcccccggccagaccggcaagaucgccgacuacaacuacaagcugcccgacgacuucaccggcugcgugaucgccuggaacagcaacaaccuggacagcaaggugggcggcaacuacaacuaccuguaccggcuguuccguaagagcaaccugaagccauucgagcgggacaucagcaccgagaucuaccaggccggcagcacccccugcaacgguguggagggcuuuaacugcuacuucccccugcagagcuacggcuuccagcccaccaacggcgugggcuaccagcccuaccgggugguggugcugagcuucgagcugcugcacgcccccgccaccgugugcggcccuaaaaagagcaccaaccuggugaagaacaagugcgugaacuucaauuucaacggccugaccggcaccggcgugcugaccgagagcaacaagaaguuccugcccuuccagcaguucggccgggauaucgccgacaccaccgacgcagugcgggacccccagacccuggagauccuggacaucaccccaugcagcuucggcggcgugagcgugaucacccccggcacaaacaccagcaaccaggucgccgugcuguaccagggagugaacugcaccgaggugcccguggccauccacgccgaccagcugacccccaccuggcggguguacagcaccggcagcaacguguuccagacccgggccggcugccugaucggcgccgagcacgugaacaacuccuacgagugcgacauccccaucggcgcuggcaucugcgccagcuaccagacccagaccaacagcccccggcgggcccggagcguggccagccagagcaucaucgccuacaccaugagcuuaggcgccgagaacagcguggccuacagcaacaacagcaucgcgaucccuaccaacuucaccaucagcgugaccaccgagauacugcccgugagcaugaccaagaccagcguggacuguaccauguacaucugcggcgacagcaccgagugcagcaaccugcugcugcaguacggcagcuucugcacccagcugaaccgggcccugaccggcaucgccguggagcaggacaagaacacccaagagguguucgcccaggugaagcagaucuacaagacucccccaaucaaggacuucggcggcuucaacuucagccagauccugcccgaccccagcaagcccagcaagcggagcuucaucgaggaccugcuguucaacaaggugacccuggccgacgccggcuucaucaagcaguacggcgacugccugggggauaucgccgcucgggaccugaucugcgcccagaaguucaacggccugaccgugcugcccccucugcugaccgacgagaugaucgcccaguacaccagcgcccugcuugccggcaccaucaccagcggcuggaccuucggcgccggcgcagcccugcagauccccuucgccaugcagauggccuaccgguucaacggcaucggcgugacccagaacgugcuguacgagaaccagaagcugaucgccaaccaguucaacagcgccaucggcaagauccaggacagccugagcagcaccgccagcgcccugggcaagcugcaggacguggugaaccagaacgcucaggcccugaacacccuggugaagcagcugagcagcaacuucggcgccaucagcucagugcugaaugacauccugagcaggcuggaucccccagaggccgaggugcagaucgaccggcugaucaccggccggcugcagagccugcagaccuacgugacccagcagcugauccgggccgccgagauccgggccagcgccaaccuggcagccaccaagaugagcgagugcgugcugggccagagcaagcggguggacuuuugcggcaagggcuaccaccugaugagcuucccccagagcgcuccccacggcgugguguuccuccacgugacauacgugcccgcccaggagaagaacuucaccaccgcccccgccauuugccacgacggcaaggcccacuucccccgggagggagucuucgugagcaacggcacccacugguucgugacccagcggaacuucuacgagccucagaucaucaccaccgacaacaccuucgugagcggcaacugcgacguggugaucggcaucgugaacaacaccguguacgacccccugcagcccgagcuggacagcuucaaggaggagcuggacaaguacuucaagaaccacaccagcccagacguggaccugggcgacaucagcggcaucaacgccagcguggugaacauccagaaggagaucgaccggcugaacgagguggccaagaaccugaacgagagccugaucgaccugcaggagcugggcaaguacgagcaguacaucaaguggcccugguacaucuggcugggcuucaucgccggccugaucgccaucgugauggugaccaucaugcugugcugcaugaccagcugcuguagcugccugaagggcugcugcagcugcggcagcugcugcaaguucgacgaggacgacagcgagcccgugcugaagggcgugaagcugcacuacaccugaggacuaguuauaagacugacuagcccgaugggccucccaacgggcccuccuccccuccuugcaccgagagaucucaaaggcucuuuucagagccaccaaaaaaaaaaaaaaaaaaaaaaaaaaaaaaaaaaaaaaaaaaaaaaaaaaaaaaaaaaaaaaaaaaaaaaaaaaaaaaaaaaaaaaaaaaaaaaaaaaaaa

SEQ ID NO: 24678 - RNA, 4035 nt, Artificial Sequence
  SARS-CoV-2/Wuhan/WIV05/2019__EPI_ISL_402128 spike protein mRNA gc (1-1273)(K986P_V987P_Y453F_D614G)
aggagaaagcuuaccauguucguguuccuggugcugcugccccuggugagcagccagugcgugaaccugaccacccggacccagcugcccccugccuacaccaacagcuucacccggggcguguacuaccccgacaagguguuccggagcagcgugcugcacagcacccaggaccuguuccugcccuucuucagcaacgugaccugguuccacgccauccacgugagcggcaccaacggcaccaagcgguucgacaacccagugcugcccuucaacgacggcguguacuucgccagcaccgagaagucaaacaucauccggggcuggaucuucggcaccacccuggacagcaagacacagagccugcugaucgugaacaacgccaccaacguggugaucaaggugugcgaguuucaguucugcaacgaccccuuccugggcguguacuaccacaagaacaacaagagcuggauggagagcgaguuccgggucuacagcagcgcuaacaauugcaccuucgaguacgugagccagcccuuccugauggaccucgagggcaagcagggcaacuucaagaaccugcgggaguucguguucaagaacaucgauggcuacuucaagaucuacagcaagcacacccccaucaaccuggugcgggaccugccccagggauucagcgcccuggagccucugguggaccugcccaucggcaucaacaucaccagguuccagacccugcuggcccugcaccggagcuaccugacccccggcgacagcagcagcggcuggaccgccggcgccgccgcauacuacgugggcuaccugcagccacggaccuuccugcugaaguacaacgagaacggcaccaucaccgacgccguggacugcgcccuggacccccugagcgagaccaagugcacccuaaagagcuucaccguggagaagggcaucuaccagaccagcaacuuccgggugcagcccacugagagcaucgugcgguuccccaacauuaccaaccugugucccuucggcgagguguucaacgccacccgguucgccagcguguacgccuggaaccggaagcggaucagcaacugcguggccgacuacagcgugcuguacaacagcgccagcuucagcaccuucaagugcuacggcgugagcccuaccaagcugaacgaccugugcuucaccaacguguacgcugacagcuucgugauccggggcgacgaggugcggcagaucgcccccggccagaccggcaagaucgccgacuacaacuacaagcugcccgacgacuucaccggcugcgugaucgccuggaacagcaacaaccuggacagcaaggugggcggcaacuacaacuaccuguuccggcuguuccguaagagcaaccugaagccauuugagcgggacaucagcaccgagaucuaccaggccggcagcacccccugcaacgguguggagggcuucaacugcuacuucccccugcagagcuacggcuuccagcccaccaacggcgugggcuaccagcccuaccgggugguggugcugagcuucgagcugcugcacgcccccgccaccgugugcggcccuaaaaagagcaccaaccuggugaagaacaagugcgugaacuucaauuucaacggccugaccggcaccggcgugcugaccgagagcaacaagaaguuccugcccuuccagcaguucggccgggauaucgccgacaccaccgacgcagugcgggacccccagacccuggagauccuggacaucaccccaugcagcuucggcggcgugagcgucaucacccccggcacaaacaccagcaaccagguggccgugcuguaccagggagugaacugcaccgaggugcccguggccauccacgccgaccagcugacccccaccuggcggguguacagcaccggcagcaacguguuccagacccgggccggcugccugaucggcgccgagcacgugaacaacuccuacgagugcgacauccccaucggcgcuggcaucugcgccagcuaccagacccagaccaacagcccccggcgggcccggagcguggccagccagagcaucaucgccuacaccaugagcuuaggcgccgagaacagcguggccuacagcaacaacagcaucgcgaucccuaccaacuucaccaucagcgugaccaccgagauacugcccgugagcaugaccaagaccagcguggacuguaccauguacaucugcggcgacagcaccgagugcagcaaccugcugcugcaguacggcagcuucugcacccagcugaaccgggcccugaccggcaucgccguggagcaggacaagaacacccaagagguguucgcccaggugaagcagaucuacaagacucccccaaucaaggacuucggcggcuucaacuucagccagauccugcccgaccccagcaagcccagcaagcggagcuucaucgaggaccugcuguucaacaaggugacccuggccgacgccggcuucaucaagcaguacggcgacugccugggggauaucgccgcucgggaccugaucugcgcccagaaguucaacggccugaccgugcugcccccucugcugaccgacgagaugaucgcccaguacaccagcgcccugcuugccggcaccaucaccagcggcuggaccuucggcgccggcgcagcccugcagauccccuucgccaugcagauggccuaccgguucaacggcaucggcgugacccagaacgugcuguacgagaaccagaagcugaucgccaaccaguucaacagcgccaucggcaagauccaggacagccugagcagcaccgccagcgcccugggcaagcugcaggacguggugaaccagaacgcucaggcccugaacacccuggugaagcagcugagcagcaacuuuggcgccaucagcucagugcugaaugacauccugagcaggcuggaucccccagaggccgaggugcagaucgaccggcugaucaccggccggcugcagagccugcagaccuacgugacccagcagcugauccgggccgccgagauccgggccagcgccaaccuggcagccaccaagaugagcgagugcgugcugggccagagcaagcggguggacuucugcggcaagggcuaccaccugaugagcuucccccagagcgcuccccacggcgugguguuccuccacgugacauacguccccgcccaggagaagaacuucaccaccgcccccgccauuugccacgacggcaaggcccacuucccccgggagggaguguucgugagcaacggcacccacugguucgugacccagcggaacuucuacgagccucagaucaucaccaccgacaacaccuucgugagcggcaacugcgacguggugaucggcaucgugaacaacaccguguacgacccccugcagcccgagcuggacagcuucaaggaggagcuggacaaguacuucaagaaccacaccagcccagacguggaccugggcgacaucagcggcaucaacgccagcguggugaacauccagaaggagaucgaccggcugaacgagguggccaagaaccugaacgagagccugaucgaccugcaggagcugggcaaguacgagcaguacaucaaguggcccugguacaucuggcugggcuucaucgccggccugaucgccaucgugauggugaccaucaugcugugcugcaugaccagcugcuguagcugccugaagggcugcugcagcugcggcagcugcugcaaguucgacgaggacgacagcgagcccgugcugaagggcgugaagcugcacuacaccugaggacuaguuauaagacugacuagcccgaugggccucccaacgggcccuccuccccuccuugcaccgagagaucucaaaggcucuuuucagagccaccaaaaaaaaaaaaaaaaaaaaaaaaaaaaaaaaaaaaaaaaaaaaaaaaaaaaaaaaaaaaaaaaaaaaaaaaaaaaaaaaaaaaaaaaaaaaaaaaaaaaa

SEQ ID NO: 24679 - RNA, 4035 nt, Artificial Sequence
  SARS-CoV-2/Wuhan/WIV05/2019__EPI_ISL_402128 spike protein mRNA gc (1-1273)(K986P_V987P_D614G_I692V)
aggagaaagcuuaccauguucguguuccuggugcugcugccccuggugagcagccagugcgugaaccugaccacccggacccagcugcccccugccuacaccaacagcuucacccggggcguguacuaccccgacaagguguuccggagcagcgugcugcacagcacccaggaccuguuccugcccuucuucagcaacgugaccugguuccacgccauccacgugagcggcaccaacggcaccaagcgguucgacaacccagugcugcccuucaacgacggcguguacuucgccagcaccgagaagucaaacaucauccggggcuggaucuucggcaccacccuggacagcaagacacagagccugcugaucgugaacaacgccaccaacguggugaucaaggugugcgaguuucaguucugcaacgaccccuuccugggcguguacuaccacaagaacaacaagagcuggauggagagcgaguuccgggucuacagcagcgcuaacaauugcaccuucgaguacgugagccagcccuuccugauggaccucgagggcaagcagggcaacuucaagaaccugcgggaguucguguucaagaacaucgauggcuacuucaagaucuacagcaagcacacccccaucaaccuggugcgggaccugccccagggauucagcgcccuggagccucugguggaccugcccaucggcaucaacaucaccagguuccagacccugcuggcccugcaccggagcuaccugacccccggcgacagcagcagcggcuggaccgccggcgccgccgcauacuacgugggcuaccugcagccacggaccuuccugcugaaguacaacgagaacggcaccaucaccgacgccguggacugcgcccuggacccccugagcgagaccaagugcacccuaaagagcuucaccguggagaagggcaucuaccagaccagcaacuuccgggugcagcccacugagagcaucgugcgguuccccaacauuaccaaccugugucccuucggcgagguguucaacgccacccgguucgccagcguguacgccuggaaccggaagcggaucagcaacugcguggccgacuacagcgugcuguacaacagcgccagcuucagcaccuucaagugcuacggcgugagcccuaccaagcugaacgaccugugcuucaccaacguguacgcugacagcuucgugauccggggcgacgaggugcggcagaucgcccccggccagaccggcaagaucgccgacuacaacuacaagcugcccgacgacuucaccggcugcgugaucgccuggaacagcaacaaccuggacagcaaggugggcggcaacuacaacuaccuguaccggcuguuccguaagagcaaccugaagccauucgagcgggacaucagcaccgagaucuaccaggccggcagcacccccugcaacgguguggagggcuuuaacugcuacuucccccugcagagcuacggcuuccagcccaccaacggcgugggcuaccagcccuaccgggugguggugcugagcuucgagcugcugcacgcccccgccaccgugugcggcccuaaaaagagcaccaaccuggugaagaacaagugcgugaacuucaauuucaacggccugaccggcaccggcgugcugaccgagagcaacaagaaguuccugcccuuccagcaguucggccgggauaucgccgacaccaccgacgcagugcgggacccccagacccuggagauccuggacaucaccccaugcagcuucggcggcgugagcgucaucacccccggcacaaacaccagcaaccagguggccgugcuguaccagggagugaacugcaccgaggugcccguggccauccacgccgaccagcugacccccaccuggcggguguacagcaccggcagcaacguguuccagacccgggccggcugccugaucggcgccgagcacgugaacaacuccuacgagugcgacauccccaucggcgcuggcaucugcgccagcuaccagacccagaccaacagcccccggcgggcccggagcguggccagccagagcgugaucgccuacaccaugagcuuaggcgccgagaacagcguggccuacagcaacaacagcaucgcgaucccuaccaacuucaccaucagcgugaccaccgagauccugcccgugagcaugaccaagaccagcguggacuguaccauguacauaugcggcgacagcaccgagugcagcaaccugcugcugcaguacggcagcuucugcacccagcugaaccgggcccugaccggcaucgccguggagcaggacaagaacacccaagagguguucgcccaggugaagcagaucuacaagacucccccaaucaaggacuucggcggcuucaacuucagccagauccugcccgaccccagcaagcccagcaagcggagcuucaucgaggaccugcuguucaacaaggugacccuggccgacgccggcuucaucaagcaguacggcgacugccugggggauaucgccgcucgggaccugaucugcgcccagaaguucaacggccugaccgugcugcccccucugcugaccgacgagaugaucgcccaguacaccagcgcccugcuugccggcaccaucaccagcggcuggaccuucggcgccggcgcagcccugcagauccccuucgccaugcagauggccuaccgguucaacggcaucggcgugacccagaacgugcuguacgagaaccagaagcugaucgccaaccaguucaacagcgccaucggcaagauccaggacagccugagcagcaccgccagcgcccugggcaagcugcaggacguggugaaccagaacgcucaggcccugaacacccuggugaagcagcugagcagcaacuucggcgccaucagcucagugcugaaugacauccugagcaggcuggaucccccagaggccgaggugcagaucgaccggcugaucaccggccggcugcagagccugcagaccuacgugacccagcagcugauccgggccgccgagauccgggccagcgccaaccuggcagccaccaagaugagcgagugcgugcugggccagagcaagcggguggacuuuugcggcaagggcuaccaccugaugagcuucccccagagcgcuccccacggcgugguguuccuccacgucacauacgugcccgcccaggagaagaacuucaccaccgcccccgccaucugccacgacggcaaggcccacuucccccgggagggaguguucgugagcaacggcacccacugguucgugacccagcggaacuucuacgagccucagauuaucaccaccgacaacaccuucgugagcggcaacugcgacguggugaucggcaucgugaacaacaccguguacgacccccugcagcccgagcuggacagcuucaaggaggagcuggacaaguacuucaagaaccacaccagcccagacguggaccugggcgacaucagcggcaucaacgccagcguggugaacauccagaaggagaucgaccggcugaacgagguggccaagaaccugaacgagagccugaucgaccugcaggagcugggcaaguacgagcaguacaucaaguggcccugguacaucuggcugggcuucaucgccggccugaucgccaucgugauggugaccaucaugcugugcugcaugaccagcugcuguagcugccugaagggcugcugcagcugcggcagcugcugcaaguucgacgaggacgacagcgagcccgugcugaagggcgugaagcugcacuacaccugaggacuaguuauaagacugacuagcccgaugggccucccaacgggcccuccuccccuccuugcaccgagagaucucaaaggcucuuuucagagccaccaaaaaaaaaaaaaaaaaaaaaaaaaaaaaaaaaaaaaaaaaaaaaaaaaaaaaaaaaaaaaaaaaaaaaaaaaaaaaaaaaaaaaaaaaaaaaaaaaaaaa

SEQ ID NO: 24680 - RNA, 4035 nt, Artificial Sequence
  SARS-CoV-2/Wuhan/WIV05/2019__EPI_ISL_402128 spike protein mRNA gc (1-1273)(K986P_V987P_D614G_M1229I)
aggagaaagcuuaccauguucguguuccuggugcugcugccccuggugagcagccagugcgugaaccugaccacccggacccagcugcccccugccuacaccaacagcuucacccggggcguguacuaccccgacaagguguuccggagcagcgugcugcacagcacccaggaccuguuccugcccuucuucagcaacgugaccugguuccacgccauccacgugagcggcaccaacggcaccaagcgguucgacaacccagugcugcccuucaacgacggcguguacuucgccagcaccgagaagucaaacaucauccggggcuggaucuucggcaccacccuggacagcaagacacagagccugcugaucgugaacaacgccaccaacguggugaucaaggugugcgaguuucaguucugcaacgaccccuuccugggcguguacuaccacaagaacaacaagagcuggauggagagcgaguuccgggucuacagcagcgcuaacaauugcaccuucgaguacgugagccagcccuuccugauggaccucgagggcaagcagggcaacuucaagaaccugcgggaguucguguucaagaacaucgauggcuacuucaagaucuacagcaagcacacccccaucaaccuggugcgggaccugccccagggauucagcgcccuggagccucugguggaccugcccaucggcaucaacaucaccagguuccagacccugcuggcccugcaccggagcuaccugacccccggcgacagcagcagcggcuggaccgccggcgccgccgcauacuacgugggcuaccugcagccacggaccuuccugcugaaguacaacgagaacggcaccaucaccgacgccguggacugcgcccuggacccccugagcgagaccaagugcacccuaaagagcuucaccguggagaagggcaucuaccagaccagcaacuuccgggugcagcccacugagagcaucgugcgguuccccaacauuaccaaccugugucccuucggcgagguguucaacgccacccgguucgccagcguguacgccuggaaccggaagcggaucagcaacugcguggccgacuacagcgugcuguacaacagcgccagcuucagcaccuucaagugcuacggcgugagcccuaccaagcugaacgaccugugcuucaccaacguguacgcugacagcuucgugauccggggcgacgaggugcggcagaucgcccccggccagaccggcaagaucgccgacuacaacuacaagcugcccgacgacuucaccggcugcgugaucgccuggaacagcaacaaccuggacagcaaggugggcggcaacuacaacuaccuguaccggcuguuccguaagagcaaccugaagccauucgagcgggacaucagcaccgagaucuaccaggccggcagcacccccugcaacgguguggagggcuuuaacugcuacuucccccugcagagcuacggcuuccagcccaccaacggcgugggcuaccagcccuaccgggugguggugcugagcuucgagcugcugcacgcccccgccaccgugugcggcccuaaaaagagcaccaaccuggugaagaacaagugcgugaacuucaauuucaacggccugaccggcaccggcgugcugaccgagagcaacaagaaguuccugcccuuccagcaguucggccgggauaucgccgacaccaccgacgcagugcgggacccccagacccuggagauccuggacaucaccccaugcagcuucggcggcgugagcgucaucacccccggcacaaacaccagcaaccagguggccgugcuguaccagggagugaacugcaccgaggugcccguggccauccacgccgaccagcugacccccaccuggcggguguacagcaccggcagcaacguguuccagacccgggccggcugccugaucggcgccgagcacgugaacaacuccuacgagugcgacauccccaucggcgcuggcaucugcgccagcuaccagacccagaccaacagcccccggcgggcccggagcguggccagccagagcaucaucgccuacaccaugagcuuaggcgccgagaacagcguggccuacagcaacaacagcaucgcgaucccuaccaacuucaccaucagcgugaccaccgagauacugcccgugagcaugaccaagaccagcguggacuguaccauguacaucugcggcgacagcaccgagugcagcaaccugcugcugcaguacggcagcuucugcacccagcugaaccgggcccugaccggcaucgccguggagcaggacaagaacacccaagagguguucgcccaggugaagcagaucuacaagacucccccaaucaaggacuucggcggcuucaacuucagccagauccugcccgaccccagcaagcccagcaagcggagcuucaucgaggaccugcuguucaacaaggugacccuggccgacgccggcuucaucaagcaguacggcgacugccugggggauaucgccgcucgggaccugaucugcgcccagaaguucaacggccugaccgugcugcccccucugcugaccgacgagaugaucgcccaguacaccagcgcccugcuugccggcaccaucaccagcggcuggaccuucggcgccggcgcagcccugcagauccccuucgccaugcagauggccuaccgguucaacggcaucggcgugacccagaacgugcuguacgagaaccagaagcugaucgccaaccaguucaacagcgccaucggcaagauccaggacagccugagcagcaccgccagcgcccugggcaagcugcaggacguggugaaccagaacgcucaggcccugaacacccuggugaagcagcugagcagcaacuucggcgccaucagcucagugcugaaugacauccugagcaggcuggaucccccagaggccgaggugcagaucgaccggcugaucaccggccggcugcagagccugcagaccuacgugacccagcagcugauccgggccgccgagauccgggccagcgccaaccuggcagccaccaagaugagcgagugcgugcugggccagagcaagcggguggacuuuugcggcaagggcuaccaccugaugagcuucccccagagcgcuccccacggcgugguguuccuccacgugacauacguccccgcccaggagaagaacuucaccaccgcccccgccauuugccacgacggcaaggcccacuucccccgggagggaguguucgugagcaacggcacccacugguucgugacccagcggaacuucuacgagccucagaucaucaccaccgacaacaccuucgugagcggcaacugcgacguggugaucggcaucgugaacaacaccguguacgacccccugcagcccgagcuggacagcuucaaggaggagcuggacaaguacuucaagaaccacaccagcccagacguggaccugggcgacaucagcggcaucaacgccagcguggugaacauccagaaggagaucgaccggcugaacgagguggccaagaaccugaacgagagccugaucgaccugcaggagcugggcaaguacgagcaguacaucaaguggcccugguacaucuggcugggcuucaucgccggccugaucgccaucgugaucgugaccaucaugcugugcugcaugaccagcugcuguagcugccugaagggcugcugcagcugcggcagcugcugcaaguucgacgaggacgacagcgagcccgugcugaagggcgugaagcugcacuacaccugaggacuaguuauaagacugacuagcccgaugggccucccaacgggcccuccuccccuccuugcaccgagagaucucaaaggcucuuuucagagccaccaaaaaaaaaaaaaaaaaaaaaaaaaaaaaaaaaaaaaaaaaaaaaaaaaaaaaaaaaaaaaaaaaaaaaaaaaaaaaaaaaaaaaaaaaaaaaaaaaaaaa

SEQ ID NO: 24681 - RNA, 4029 nt, Artificial Sequence
  SARS-CoV-2/Wuhan/WIV05/2019__EPI_ISL_402128 spike protein mRNA gc (1-1273)(K986P_V987P_H69del_V70del_A222V_Y453F_S477N_D614G_I692V)
aggagaaagcuuaccauguucguguuccuggugcugcugccccuggugagcagccagugcgugaaccugaccacccggacccagcugcccccugccuacaccaacagcuucacccggggcguguacuaccccgacaagguguuccggagcagcgugcugcacagcacccaggaccuguuccugcccuucuucagcaacgugaccugguuccacgccaucagcggcaccaacggcaccaagcgguucgacaacccagugcugcccuucaacgacggcguguacuucgccagcaccgagaagucaaacaucauccggggcuggaucuucggcaccacccuggacagcaagacacagagccugcugaucgugaacaacgccaccaacguggugaucaaggugugcgaguuucaguucugcaacgaccccuuccugggcguguacuaccacaagaacaacaagagcuggauggagagcgaguuccggguguacagcagcgcuaacaauugcaccuucgaguacgucagccagcccuuccugauggaccucgagggcaagcagggcaacuucaagaaccugcgggaguucguguucaagaacaucgauggcuacuucaagaucuacagcaagcacacccccaucaaccuggugcgggaccugccccagggauucagcgugcuggagccucugguggaccugcccaucggcaucaacaucaccagguuccagacccugcuggcccugcaccggagcuaccugacccccggcgacagcagcagcggcuggaccgccggcgccgccgccuacuacgugggcuaccugcagccacggaccuuccugcugaaguacaacgagaacggcaccaucaccgacgcaguggacugcgcccuggacccccugagcgagaccaagugcacccuaaagagcuucaccguggagaagggcaucuaccagaccagcaacuuccgggugcagcccacugagagcaucgugcgguuccccaacauuaccaaccugugucccuucggcgagguguucaacgccacccgguucgccagcguguacgccuggaaccggaagcggaucagcaacugcguggccgacuacagcgugcuguacaacagcgccagcuucagcaccuucaagugcuacggcgugagcccuaccaagcugaacgaccugugcuucaccaacguguacgccgacagcuucgugauccggggcgacgaggugcggcagaucgcucccggccagaccggcaagaucgccgacuacaacuacaagcugcccgacgacuucaccggcugcgugaucgccuggaacagcaacaaccuggacagcaaggugggcggcaacuacaacuaccuguuccggcuguuccguaagagcaaccugaagccauuugagcgggacaucagcaccgagaucuaccaggccggcaacacccccugcaacgguguggagggcuucaacugcuacuucccccugcagagcuacggcuuccagcccaccaacggcgugggcuaccagcccuaccgggugguggugcugagcuucgagcugcugcacgcccccgccaccgugugcggcccuaaaaagagcaccaaccuggugaagaacaagugcgugaauuucaacuucaacggccugaccggcaccggcgugcugaccgagagcaacaagaaguuccugcccuuccagcaguucggccgggauaucgccgacaccaccgacgccgugcgggacccccagacccuggagauccuggacaucaccccaugcagcuucggcggcgugagcgucaucacccccggcacaaacaccagcaaccagguggcagugcuguaccagggagugaacugcaccgaggugcccguggccauccacgccgaccagcugacccccaccuggcggguguacagcaccggcagcaacguguuccagacccgggccggcugccugaucggcgccgagcacgugaacaacagcuacgagugcgacauccccaucggcgccggcaucugcgcuuccuaccagacccagaccaacagcccccggcgggcccggagcguggccagccagagcgugaucgccuacaccaugagcuuaggcgccgagaacagcguggccuacagcaacaacagcaucgccaucccuaccaacuucaccaucagcgugaccaccgagauccugcccgugagcaugaccaagaccagcguggacuguaccauguacauaugcggcgacagcaccgagugcagcaaccugcugcugcaguacggcagcuucugcacccagcugaaccgggcgcugaccggcaucgccguggagcaggacaagaacacccaagagguguucgcccaggugaagcagaucuacaagacucccccaaucaaggacuucggcggcuucaacuucagccagauccugcccgaccccagcaagcccagcaagcggagcuucaucgaggaccugcuguucaacaaggugacccuggccgacgccggcuucaucaagcaguacggcgacugccugggggauaucgccgcccgggaccugaucugcgcucagaaguucaacggccugaccgugcugcccccucugcugaccgacgagaugaucgcccaguacaccagcgcccugcuugccggcaccaucaccagcggcuggaccuucggcgccggcgccgcacugcagauccccuucgccaugcagauggccuaccgguucaacggcaucggcgugacccagaacgugcuguacgagaaccagaagcugaucgccaaccaguucaacagcgccaucggcaagauccaggacagccugagcagcaccgccagcgcccugggcaagcugcaggacguggugaaccagaacgcccaggcucugaacacccuggugaagcagcugagcagcaauuuuggcgccaucagcagcgugcugaacgacauccugucaaggcuggaucccccagaggccgaggugcagaucgaccggcugaucaccggccggcugcagagccugcagaccuacgugacccagcagcugauccgggccgccgagauccgggccagcgccaaccuggccgcaaccaagaugagcgagugcgugcugggccagagcaagcggguggacuucugcggcaagggcuaccaccugaugagcuucccccagagcgcuccccacggcgugguguuccuccacgucacauacgugcccgcccaggagaagaacuucaccaccgcccccgccaucugccacgacggcaaggcccacuucccccgggagggaguguucgugagcaacggcacccacugguucgugacccagcggaacuucuacgagccucagauuaucaccaccgacaacaccuucgugagcggcaacugcgacguggugaucggcaucgugaacaacaccguguacgacccccugcagcccgagcuggacagcuucaaggaggagcuggacaaguacuucaagaaccacaccagcccagacguggaccugggcgacaucagcggcaucaacgccagcguggugaacauccagaaggagaucgaccggcugaacgagguggccaagaaccugaacgagagccugaucgaccugcaggagcugggcaaguacgagcaguacaucaaguggcccugguacaucuggcugggcuucaucgccggccugaucgccaucgugauggugaccaucaugcugugcugcaugaccagcugcuguagcugccugaagggcugcugcagcugcggcagcugcugcaaguucgacgaggacgacagcgagcccgugcugaagggcgugaagcugcacuacaccugaggacuaguuauaagacugacuagcccgaugggccucccaacgggcccuccuccccuccuugcaccgagagaucucaaaggcucuuuucagagccaccaaaaaaaaaaaaaaaaaaaaaaaaaaaaaaaaaaaaaaaaaaaaaaaaaaaaaaaaaaaaaaaaaaaaaaaaaaaaaaaaaaaaaaaaaaaaaaaaaaaaa

SEQ ID NO: 24682 - RNA, 4029 nt, Artificial Sequence
  SARS-CoV-2/Wuhan/WIV05/2019__EPI_ISL_402128 spike protein mRNA gc (1-1273)(K986P_V987P_H69del_V70del_Y453F_D614G_I692V_M1229I)
aggagaaagcuuaccauguucguguuccuggugcugcugccccuggugagcagccagugcgugaaccugaccacccggacccagcugcccccugccuacaccaacagcuucacccggggcguguacuaccccgacaagguguuccggagcagcgugcugcacagcacccaggaccuguuccugcccuucuucagcaacgugaccugguuccacgccaucagcggcaccaacggcaccaagcgguucgacaacccagugcugcccuucaacgacggcguguacuucgccagcaccgagaagucaaacaucauccggggcuggaucuucggcaccacccuggacagcaagacacagagccugcugaucgugaacaacgccaccaacguggugaucaaggugugcgaguuucaguucugcaacgaccccuuccugggcguguacuaccacaagaacaacaagagcuggauggagagcgaguuccggguguacagcagcgcuaacaauugcaccuucgaguacgucagccagcccuuccugauggaccucgagggcaagcagggcaacuucaagaaccugcgggaguucguguucaagaacaucgauggcuacuucaagaucuacagcaagcacacccccaucaaccuggugcgggaccugccccagggauucagcgcccuggagccucugguggaccugcccaucggcaucaacaucaccagguuccagacccugcuggcccugcaccggagcuaccugacccccggcgacagcagcagcggcuggaccgccggcgccgccgcauacuacgugggcuaccugcagccacggaccuuccugcugaaguacaacgagaacggcaccaucaccgacgccguggacugcgcccuggacccccugagcgagaccaagugcacccuaaagagcuucaccguggagaagggcaucuaccagaccagcaacuuccgggugcagcccacugagagcaucgugcgguuccccaacauuaccaaccugugucccuucggcgagguguucaacgccacccgguucgccagcguguacgccuggaaccggaagcggaucagcaacugcguggccgacuacagcgugcuguacaacagcgccagcuucagcaccuucaagugcuacggcgugagcccuaccaagcugaacgaccugugcuucaccaacguguacgcugacagcuucgugauccggggcgacgaggugcggcagaucgcccccggccagaccggcaagaucgccgacuacaacuacaagcugcccgacgacuucaccggcugcgugaucgccuggaacagcaacaaccuggacagcaaggugggcggcaacuacaacuaccuguuccggcuguuccguaagagcaaccugaagccauuugagcgggacaucagcaccgagaucuaccaggccggcagcacccccugcaacgguguggagggcuucaacugcuacuucccccugcagagcuacggcuuccagcccaccaacggcgugggcuaccagcccuaccgggugguggugcugagcuucgagcugcugcacgcccccgccaccgugugcggcccuaaaaagagcaccaaccuggugaagaacaagugcgugaacuucaauuucaacggccugaccggcaccggcgugcugaccgagagcaacaagaaguuccugcccuuccagcaguucggccgggauaucgccgacaccaccgacgcagugcgggacccccagacccuggagauccuggacaucaccccaugcagcuucggcggcgugagcgugaucacccccggcacaaacaccagcaaccaggucgccgugcuguaccagggagugaacugcaccgaggugcccguggccauccacgccgaccagcugacccccaccuggcggguguacagcaccggcagcaacguguuccagacccgggccggcugccugaucggcgccgagcacgugaacaacuccuacgagugcgacauccccaucggcgcuggcaucugcgccagcuaccagacccagaccaacagcccccggcgggcccggagcguggccagccagagcgugaucgccuacaccaugagcuuaggcgccgagaacagcguggccuacagcaacaacagcaucgcgaucccuaccaacuucaccaucagcgugaccaccgagauccugcccgugagcaugaccaagaccagcguggacuguaccauguacauaugcggcgacagcaccgagugcagcaaccugcugcugcaguacggcagcuucugcacccagcugaaccgggcccugaccggcaucgccguggagcaggacaagaacacccaagagguguucgcccaggugaagcagaucuacaagacucccccaaucaaggacuucggcggcuucaacuucagccagauccugcccgaccccagcaagcccagcaagcggagcuucaucgaggaccugcuguucaacaaggugacccuggccgacgccggcuucaucaagcaguacggcgacugccugggggauaucgccgcucgggaccugaucugcgcccagaaguucaacggccugaccgugcugcccccucugcugaccgacgagaugaucgcccaguacaccagcgcccugcuugccggcaccaucaccagcggcuggaccuucggcgccggcgcagcccugcagauccccuucgccaugcagauggccuaccgguucaacggcaucggcgugacccagaacgugcuguacgagaaccagaagcugaucgccaaccaguucaacagcgccaucggcaagauccaggacagccugagcagcaccgccagcgcccugggcaagcugcaggacguggugaaccagaacgcucaggcccugaacacccuggugaagcagcugagcagcaacuuuggcgccaucagcucagugcugaaugacauccugagcaggcuggaucccccagaggccgaggugcagaucgaccggcugaucaccggccggcugcagagccugcagaccuacgugacccagcagcugauccgggccgccgagauccgggccagcgccaaccuggcagccaccaagaugagcgagugcgugcugggccagagcaagcggguggacuucugcggcaagggcuaccaccugaugagcuucccccagagcgcuccccacggcgugguguuccuccacgugacauacguccccgcccaggagaagaacuucaccaccgcccccgccaucugccacgacggcaaggcccacuucccccgggagggaguguucgugagcaacggcacccacugguucgugacccagcggaacuucuacgagccucagauuaucaccaccgacaacaccuucgugagcggcaacugcgacguggugaucggcaucgugaacaacaccguguacgacccccugcagcccgagcuggacagcuucaaggaggagcuggacaaguacuucaagaaccacaccagcccagacguggaccugggcgacaucagcggcaucaacgccagcguggugaacauccagaaggagaucgaccggcugaacgagguggccaagaaccugaacgagagccugaucgaccugcaggagcugggcaaguacgagcaguacaucaaguggcccugguacaucuggcugggcuucaucgccggccugaucgccaucgugaucgugaccaucaugcugugcugcaugaccagcugcuguagcugccugaagggcugcugcagcugcggcagcugcugcaaguucgacgaggacgacagcgagcccgugcugaagggcgugaagcugcacuacaccugaggacuaguuauaagacugacuagcccgaugggccucccaacgggcccuccuccccuccuugcaccgagagaucucaaaggcucuuuucagagccaccaaaaaaaaaaaaaaaaaaaaaaaaaaaaaaaaaaaaaaaaaaaaaaaaaaaaaaaaaaaaaaaaaaaaaaaaaaaaaaaaaaaaaaaaaaaaaaaaaaaaa

SEQ ID NO: 24683 - RNA, 4026 nt, Artificial Sequence
  SARS-CoV-2/Wuhan/WIV05/2019__EPI_ISL_402128 spike protein mRNA gc (1-1273)(K986P_V987P_K986P_V987P_H69del_V70del_Y144del_N501Y_A570 D_D614G_P681H_T716I_S982A_D1118H)
aggagaaagcuuaccauguucguguuccuggugcugcugccccuggugagcagccagugcgugaaccugaccacccggacccagcugcccccugccuacaccaacagcuucacccggggcguguacuaccccgacaagguguuccggagcagcgugcugcacagcacccaggaccuguuccugcccuucuucagcaacgugaccugguuccacgccaucagcggcaccaacggcaccaagcgguucgacaacccagugcugcccuucaacgacggcguguacuucgccagcaccgagaagucaaacaucauccggggcuggaucuucggcaccacccuggacagcaagacacagagccugcugaucgugaacaacgccaccaacguggugaucaaggugugcgaguuucaguucugcaacgaccccuuccugggcguguaccacaagaacaacaagagcuggauggagagcgaguuccggguguacagcagcgcuaacaauugcaccuucgaguacgucagccagcccuuccugauggaccucgagggcaagcagggcaacuucaagaaccugcgggaguucguguucaagaacaucgauggcuacuucaagaucuacagcaagcacacccccaucaaccuggugcgggaccugccccagggauucagcgcccuggagccucugguggaccugcccaucggcaucaacaucaccagguuccagacccugcuggcccugcaccggagcuaccugacccccggcgacagcagcagcggcuggaccgccggcgccgccgcauacuacgugggcuaccugcagccacggaccuuccugcugaaguacaacgagaacggcaccaucaccgacgccguggacugcgcccuggacccccugagcgagaccaagugcacccuaaagagcuucaccguggagaagggcaucuaccagaccagcaacuuccgggugcagcccacugagagcaucgugcgguuccccaacauuaccaaccugugucccuucggcgagguguucaacgccacccgguucgccagcguguacgccuggaaccggaagcggaucagcaacugcguggccgacuacagcgugcuguacaacagcgccagcuucagcaccuucaagugcuacggcgugagcccuaccaagcugaacgaccugugcuucaccaacguguacgcugacagcuucgugauccggggcgacgaggugcggcagaucgcccccggccagaccggcaagaucgccgacuacaacuacaagcugcccgacgacuucaccggcugcgugaucgccuggaacagcaacaaccuggacagcaaggugggcggcaacuacaacuaccuguaccggcuguuccguaagagcaaccugaagccauucgagcgggacaucagcaccgagaucuaccaggccggcagcacccccugcaacgguguggagggcuuuaacugcuacuucccccugcagagcuacggcuuccagcccaccuacggcgugggcuaccagcccuaccgggugguggugcugagcuucgagcugcugcacgcccccgccaccgugugcggcccuaaaaagagcaccaaccuggugaagaacaagugcgugaacuucaacuucaauggccugaccggcaccggcgugcugaccgagagcaacaagaaguuccugcccuuccagcaguucggccgggauaucgacgacaccaccgacgccgugcgggacccccagacccuggagauccuggacaucaccccaugcagcuucggcggcgugagcgugaucacccccggcacaaacaccagcaaccaggucgcagugcuguaccagggagugaacugcaccgaggugcccguggccauccacgccgaccagcugacccccaccuggcggguguacagcaccggcagcaacguguuccagacccgggccggcugccugaucggcgccgagcacgugaacaacuccuacgagugcgacauccccaucggcgccggcaucugcgcuagcuaccagacccagaccaacagccaccggcgggcccggagcguggccagccagagcaucaucgccuacaccaugagcuuaggcgccgagaacagcguggccuacagcaacaacagcaucgccauccccaucaacuucaccauaagcgugaccaccgagauccugccugugagcaugaccaagaccagcguggacuguaccauguacaucugcggcgacagcaccgagugcagcaaccugcugcugcaguacggcagcuucugcacccagcugaaccgggcgcugaccggcaucgccguggagcaggacaagaacacccaagagguguucgcccaggugaagcagaucuacaagaccccacccaucaaggacuucggcggcuucaacuucagccagauccugcccgaccccagcaagcccagcaagcggagcuucaucgaggaccugcuguucaacaaggugacucuggccgacgccggcuucaucaagcaguacggcgauugccugggggacaucgccgcccgggaccugaucugcgcucagaaguucaacggccugaccgugcugccuccccugcugaccgacgagaugaucgcccaguacaccagcgcccugcuugccggcaccaucaccagcggcuggaccuucggcgccggcgccgcacugcagauccccuucgccaugcagauggccuaccgguucaacggcaucggcgugacccagaacgugcuguacgagaaccagaagcugaucgccaaccaguucaacagcgccaucggcaagauccaggacagccugagcagcaccgccagcgcccugggcaagcugcaggacguggugaaccagaacgcccaggcucugaacacccuggugaagcagcugagcagcaacuucggcgccaucagcucagugcugaacgacauccuggccaggcuggacccacccgaggccgaggugcagaucgaccggcugaucaccggccggcugcagagccugcagaccuacgugacccagcagcugauccgggccgccgagauucgggccagcgccaaucuggcagccaccaagaugagcgagugcgugcugggccagagcaagcggguggacuuuugcggcaagggcuaccaccugaugagcuucccccagagcgcuccccacggcgugguguuccuccacgugaccuacgugcccgcccaggagaagaacuucacaaccgcccccgccaucugccacgacggcaaggcccacuucccccgggagggagucuucgugagcaacggcacccacugguucgugacccagcggaacuucuacgagccccagaucaucaccacccacaacaccuucgugagcggcaacugcgacguggugaucggcaucgugaacaacaccguguacgacccucugcagcccgagcuggacagcuucaaggaggagcuggacaaguacuucaagaaccacaccagccccgacguggaucugggcgacaucagcggcaucaacgccagcguggugaacauccagaaggagaucgaccggcugaacgagguggccaagaaccugaacgagagccugaucgaccugcaggagcugggcaaguacgagcaguacaucaaguggccaugguacaucuggcugggcuucaucgccggccugaucgccaucgugauggugaccaucaugcugugcugcaugaccagcugcuguagcugccugaagggcugcugcagcugcggcagcugcugcaaguucgacgaggacgacagcgagcccgugcugaagggcgugaagcugcacuacaccugaggacuaguuauaagacugacuagcccgaugggccucccaacgggcccuccuccccuccuugcaccgagagaucucaaaggcucuuuucagagccaccaaaaaaaaaaaaaaaaaaaaaaaaaaaaaaaaaaaaaaaaaaaaaaaaaaaaaaaaaaaaaaaaaaaaaaaaaaaaaaaaaaaaaaaaaaaaaaaaaaaaa

SEQ ID NO: 24684 - RNA, 4035 nt, Artificial Sequence
  SARS-CoV-2/Wuhan/WIV05/2019__EPI_ISL_402128 spike protein mRNA gc (1-1273)(K986P_V987P_K986P_V987P_K417N_E484K_N501Y_D614G)
aggagaaagcuuaccauguucguguuccuggugcugcugccccuggugagcagccagugcgugaaccugaccacccggacccagcugcccccugccuacaccaacagcuucacccggggcguguacuaccccgacaagguguuccggagcagcgugcugcacagcacccaggaccuguuccugcccuucuucagcaacgugaccugguuccacgccauccacgugagcggcaccaacggcaccaagcgguucgacaacccagugcugcccuucaacgacggcguguacuucgccagcaccgagaagucaaacaucauccggggcuggaucuucggcaccacccuggacagcaagacacagagccugcugaucgugaacaacgccaccaacguggugaucaaggugugcgaguuucaguucugcaacgaccccuuccugggcguguacuaccacaagaacaacaagagcuggauggagagcgaguuccgggucuacagcagcgcuaacaauugcaccuucgaguacgugagccagcccuuccugauggaccucgagggcaagcagggcaacuucaagaaccugcgggaguucguguucaagaacaucgauggcuacuucaagaucuacagcaagcacacccccaucaaccuggugcgggaccugccccagggauucagcgcccuggagccucugguggaccugcccaucggcaucaacaucaccagguuccagacccugcuggcccugcaccggagcuaccugacccccggcgacagcagcagcggcuggaccgccggcgccgccgcauacuacgugggcuaccugcagccacggaccuuccugcugaaguacaacgagaacggcaccaucaccgacgccguggacugcgcccuggacccccugagcgagaccaagugcacccuaaagagcuucaccguggagaagggcaucuaccagaccagcaacuuccgggugcagcccacugagagcaucgugcgguuccccaacauuaccaaccugugucccuucggcgagguguucaacgccacccgguucgccagcguguacgccuggaaccggaagcggaucagcaacugcguggccgacuacagcgugcuguacaacagcgccagcuucagcaccuucaagugcuacggcgugagcccuaccaagcugaacgaccugugcuucaccaacguguacgcugacagcuucgugauccggggcgacgaggugcggcagaucgcccccggccagaccggcaacaucgccgacuacaacuacaagcugcccgacgacuucaccggcugcgugaucgccuggaacagcaacaaccuggacagcaaggugggcggcaacuacaacuaccuguaccggcuguuccguaagagcaaccugaagccauucgagcgggacaucagcaccgagaucuaccaggccggcagcacccccugcaacggugugaagggcuuuaacugcuacuucccccugcagagcuacggcuuccagcccaccuacggcgugggcuaccagcccuaccgggugguggugcugagcuucgagcugcugcacgcccccgccaccgugugcggcccuaaaaagagcaccaaccuggugaagaacaagugcgugaacuucaauuucaacggccugaccggcaccggcgugcugaccgagagcaacaagaaguuccugcccuuccagcaguucggccgggauaucgccgacaccaccgacgcagugcgggacccccagacccuggagauccuggacaucaccccaugcagcuucggcggcgugagcgucaucacccccggcacaaacaccagcaaccagguggccgugcuguaccagggagugaacugcaccgaggugcccguggccauccacgccgaccagcugacccccaccuggcggguguacagcaccggcagcaacguguuccagacccgggccggcugccugaucggcgccgagcacgugaacaacuccuacgagugcgacauccccaucggcgcuggcaucugcgccagcuaccagacccagaccaacagcccccggcgggcccggagcguggccagccagagcaucaucgccuacaccaugagcuuaggcgccgagaacagcguggccuacagcaacaacagcaucgcgaucccuaccaacuucaccaucagcgugaccaccgagauacugcccgugagcaugaccaagaccagcguggacuguaccauguacaucugcggcgacagcaccgagugcagcaaccugcugcugcaguacggcagcuucugcacccagcugaaccgggcccugaccggcaucgccguggagcaggacaagaacacccaagagguguucgcccaggugaagcagaucuacaagacucccccaaucaaggacuucggcggcuucaacuucagccagauccugcccgaccccagcaagcccagcaagcggagcuucaucgaggaccugcuguucaacaaggugacccuggccgacgccggcuucaucaagcaguacggcgacugccugggggauaucgccgcucgggaccugaucugcgcccagaaguucaacggccugaccgugcugcccccucugcugaccgacgagaugaucgcccaguacaccagcgcccugcuugccggcaccaucaccagcggcuggaccuucggcgccggcgcagcccugcagauccccuucgccaugcagauggccuaccgguucaacggcaucggcgugacccagaacgugcuguacgagaaccagaagcugaucgccaaccaguucaacagcgccaucggcaagauccaggacagccugagcagcaccgccagcgcccugggcaagcugcaggacguggugaaccagaacgcucaggcccugaacacccuggugaagcagcugagcagcaacuucggcgccaucagcucagugcugaaugacauccugagcaggcuggaucccccagaggccgaggugcagaucgaccggcugaucaccggccggcugcagagccugcagaccuacgugacccagcagcugauccgggccgccgagauccgggccagcgccaaccuggcagccaccaagaugagcgagugcgugcugggccagagcaagcggguggacuuuugcggcaagggcuaccaccugaugagcuucccccagagcgcuccccacggcgugguguuccuccacgugacauacguccccgcccaggagaagaacuucaccaccgcccccgccauuugccacgacggcaaggcccacuucccccgggagggaguguucgugagcaacggcacccacugguucgugacccagcggaacuucuacgagccucagaucaucaccaccgacaacaccuucgugagcggcaacugcgacguggugaucggcaucgugaacaacaccguguacgacccccugcagcccgagcuggacagcuucaaggaggagcuggacaaguacuucaagaaccacaccagcccagacguggaccugggcgacaucagcggcaucaacgccagcguggugaacauccagaaggagaucgaccggcugaacgagguggccaagaaccugaacgagagccugaucgaccugcaggagcugggcaaguacgagcaguacaucaaguggcccugguacaucuggcugggcuucaucgccggccugaucgccaucgugauggugaccaucaugcugugcugcaugaccagcugcuguagcugccugaagggcugcugcagcugcggcagcugcugcaaguucgacgaggacgacagcgagcccgugcugaagggcgugaagcugcacuacaccugaggacuaguuauaagacugacuagcccgaugggccucccaacgggcccuccuccccuccuugcaccgagagaucucaaaggcucuuuucagagccaccaaaaaaaaaaaaaaaaaaaaaaaaaaaaaaaaaaaaaaaaaaaaaaaaaaaaaaaaaaaaaaaaaaaaaaaaaaaaaaaaaaaaaaaaaaaaaaaaaaaaa

SEQ ID NO: 24685 - RNA, 4026 nt, Artificial Sequence
  SARS-CoV-2/Wuhan/WIV05/2019__EPI_ISL_402128 spike protein mRNA gc (1-1273)(K986P_V987P_K986P_V987P_L18F_D80A_D215G_L242del_A243del_ L244del_R246I_K417N_E484K_N501Y_D614G_A701V)
aggagaaagcuuaccauguucguguuccuggugcugcugccccuggugagcagccagugcgugaacuucaccacccggacccagcugcccccugccuacaccaacagcuucacccggggcguguacuaccccgacaagguguuccggagcagcgugcugcacagcacccaggaccuguuccugcccuucuucagcaacgugaccugguuccacgccauccacgugagcggcaccaacggcaccaagcgguucgccaacccagugcugcccuucaacgacggcguguacuucgccagcaccgagaagucaaacaucauccggggcuggaucuuuggcaccacccuggacagcaagacacagagccugcugaucgugaacaacgcuaccaacguggugaucaaggugugcgaguuccaguucugcaacgaccccuuccugggcguguacuaccacaagaacaacaagagcuggauggagagcgaguuccgggucuacagcagcgccaacaauugcaccuucgaguacgugagccagcccuuccugauggaccuggagggcaagcagggcaacuucaagaaccuccgggaguucguguucaagaacaucgacggcuacuucaagaucuacagcaagcacacccccaucaaccuggugcggggacugccccagggcuucagcgcccuggagccucugguggaucugcccaucggcaucaacaucaccagguuccagacccugcacaucagcuaccugacccccggcgacagcagcagcggcuggaccgccggcgccgccgcauacuacgugggcuaccugcagccacggaccuuccugcugaaguacaacgagaacggcaccaucaccgacgccguggacugcgcccuggacccccugagcgagaccaagugcacccuuaagagcuucaccguggagaagggcaucuaccagaccagcaacuuccgggugcagcccacugagagcauugugcgguuccccaacaucaccaaccugugucccuucggcgagguguucaacgccacccgguucgccagcguguacgccuggaaccggaagcggaucagcaacugcguggccgacuacagcgugcuguacaacagcgccagcuucagcaccuucaagugcuacggcgugagcccuaccaagcugaacgaccugugcuucaccaacguguacgcugacagcuucgugauccggggcgacgaggugcggcagaucgcccccggccagaccggcaacaucgccgacuacaacuacaagcugcccgacgacuucaccggcugcgugaucgccuggaacagcaacaaccuggacagcaaggugggcggcaacuacaacuaccuguaccggcuauuccguaagagcaaccugaagccauuugagcgggacaucagcaccgagaucuaccaggccgguagcacccccugcaacggcgugaagggcuucaacugcuacuucccccugcagagcuacggcuuccagcccaccuacggcgugggcuaccagcccuaccgggugguggugcugagcuucgagcugcugcacgcccccgccaccgugugcggcccuaaaaagagcaccaaccuggugaagaacaagugcgugaacuucaauuucaacggccugaccggcaccggcgugcugaccgagagcaacaagaaguuccugcccuuccagcaguucggccgggacaucgccgacaccaccgaugcagugcgggacccccagacccuggagauccuggacaucaccccaugcagcuucggcggcgugagcgucaucacccccggaacaaacaccagcaaccagguggccgugcuguaccagggcgugaacugcaccgaggugcccguggccauccacgccgaccagcugacccccaccuggcggguguacagcaccggcagcaacguguuccagacccgggccggcugccugaucggcgccgagcacgugaacaacuccuacgagugcgacauccccaucggcgcuggcaucugcgccagcuaccagacccagaccaacagcccccggcgggcccggagcguggccagccagagcaucaucgccuacaccaugagccugggcguggagaacagcguggccuacagcaacaacagcaucgccaucccuaccaacuucaccauaagcgugaccaccgagauccugcccgugagcaugaccaagaccagcguggacuguaccauguacaucugcggcgacagcaccgagugcagcaaccuguuacugcaguacggcagcuucugcacccagcugaaccgggcgcugaccggcaucgccguggagcaggacaagaacacccaagagguguucgcccaggugaagcagaucuacaagacucccccaaucaaggacuucggcggcuucaacuucagccagauccugcccgaccccagcaagcccagcaagcggagcuucaucgaggaccugcuguucaacaaggugacccuggccgacgccggcuucaucaagcaguacggggacugccugggcgacaucgccgcccgggaccugaucugcgcucagaaguucaacggccugaccgugcugcccccucugcugaccgaugagaugaucgcccaguacaccagcgcccugcuggccggcaccaucaccagcggcuggaccuucggcgccggcgccgcacugcagauccccuucgccaugcagauggccuaccgguucaacggcaucggcgugacccagaacgugcuguacgagaaccagaagcugaucgccaaccaguucaacagcgccaucggcaagauccaggacagccugagcagcaccgccagcgcccugggcaagcugcaggacguggugaaccagaacgcccaggcucugaacacccuggugaagcagcugagcagcaacuuuggcgccaucagcucagugcugaaugacauccugagccggcuggaucccccagaggccgaggugcagaucgacaggcugaucaccggccggcugcagagccugcagaccuacgugacccagcagcugauccgggccgccgagauucgggccagcgccaaccuggccgcaaccaagaugagcgagugcgugcugggccagagcaagcggguggacuucugcggcaagggcuaccaccugaugagcuucccccagagcgcuccccacggcgugguguuccugcacgucacauacgugcccgcccaggagaagaacuucaccaccgcccccgccaucugccacgacggaaaggcccacuucccccgggagggcguguucgugagcaacggcacccacugguucgugacccagcggaacuucuacgagccucagaucaucaccaccgacaacaccuucgugagcggcaacugcgacguggugaucggcaucgugaacaacaccguguacgacccccugcagcccgagcuggacagcuucaaggaggagcucgacaaguacuucaagaaccacaccagcccagacguggaccugggcgacaucagcggcaucaacgccagcguggugaacauccagaaggagaucgaccggcugaacgagguggccaagaaccugaacgagagccugaucgaccugcaggagcugggcaaguacgagcaguacaucaaguggcccugguacaucuggcugggcuucaucgccggccugaucgccaucgugauggugaccaucaugcugugcugcaugaccagcugcuguagcugccugaagggcugcugcagcugcggcagcugcugcaaguucgacgaggacgacagcgagcccgugcugaagggcgugaagcugcacuacaccugaggacuaguuauaagacugacuagcccgaugggccucccaacgggcccuccuccccuccuugcaccgagagaucucaaaggcucuuuucagagccaccaaaaaaaaaaaaaaaaaaaaaaaaaaaaaaaaaaaaaaaaaaaaaaaaaaaaaaaaaaaaaaaaaaaaaaaaaaaaaaaaaaaaaaaaaaaaaaaaaaaaa

SEQ ID NO: 24686 - RNA, 4035 nt, Artificial Sequence
  SARS-CoV-2/Wuhan/WIV05/2019__EPI_ISL_402128 spike protein mRNA gc (1-1273)(K986P_V987P_K986P_V987P_E484K_D614G)
aggagaaagcuuaccauguucguguuccuggugcugcugccccuggugagcagccagugcgugaaccugaccacccggacccagcugcccccugccuacaccaacagcuucacccggggcguguacuaccccgacaagguguuccggagcagcgugcugcacagcacccaggaccuguuccugcccuucuucagcaacgugaccugguuccacgccauccacgugagcggcaccaacggcaccaagcgguucgacaacccagugcugcccuucaacgacggcguguacuucgccagcaccgagaagucaaacaucauccggggcuggaucuucggcaccacccuggacagcaagacacagagccugcugaucgugaacaacgccaccaacguggugaucaaggugugcgaguuucaguucugcaacgaccccuuccugggcguguacuaccacaagaacaacaagagcuggauggagagcgaguuccgggucuacagcagcgcuaacaauugcaccuucgaguacgugagccagcccuuccugauggaccucgagggcaagcagggcaacuucaagaaccugcgggaguucguguucaagaacaucgauggcuacuucaagaucuacagcaagcacacccccaucaaccuggugcgggaccugccccagggauucagcgcccuggagccucugguggaccugcccaucggcaucaacaucaccagguuccagacccugcuggcccugcaccggagcuaccugacccccggcgacagcagcagcggcuggaccgccggcgccgccgcauacuacgugggcuaccugcagccacggaccuuccugcugaaguacaacgagaacggcaccaucaccgacgccguggacugcgcccuggacccccugagcgagaccaagugcacccuaaagagcuucaccguggagaagggcaucuaccagaccagcaacuuccgggugcagcccacugagagcaucgugcgguuccccaacauuaccaaccugugucccuucggcgagguguucaacgccacccgguucgccagcguguacgccuggaaccggaagcggaucagcaacugcguggccgacuacagcgugcuguacaacagcgccagcuucagcaccuucaagugcuacggcgugagcccuaccaagcugaacgaccugugcuucaccaacguguacgcugacagcuucgugauccggggcgacgaggugcggcagaucgcccccggccagaccggcaagaucgccgacuacaacuacaagcugcccgacgacuucaccggcugcgugaucgccuggaacagcaacaaccuggacagcaaggugggcggcaacuacaacuaccuguaccggcuguuccguaagagcaaccugaagccauucgagcgggacaucagcaccgagaucuaccaggccggcagcacccccugcaacggugugaagggcuuuaacugcuacuucccccugcagagcuacggcuuccagcccaccaacggcgugggcuaccagcccuaccgggugguggugcugagcuucgagcugcugcacgcccccgccaccgugugcggcccuaaaaagagcaccaaccuggugaagaacaagugcgugaacuucaauuucaacggccugaccggcaccggcgugcugaccgagagcaacaagaaguuccugcccuuccagcaguucggccgggauaucgccgacaccaccgacgcagugcgggacccccagacccuggagauccuggacaucaccccaugcagcuucggcggcgugagcgucaucacccccggcacaaacaccagcaaccagguggccgugcuguaccagggagugaacugcaccgaggugcccguggccauccacgccgaccagcugacccccaccuggcggguguacagcaccggcagcaacguguuccagacccgggccggcugccugaucggcgccgagcacgugaacaacuccuacgagugcgacauccccaucggcgcuggcaucugcgccagcuaccagacccagaccaacagcccccggcgggcccggagcguggccagccagagcaucaucgccuacaccaugagcuuaggcgccgagaacagcguggccuacagcaacaacagcaucgcgaucccuaccaacuucaccaucagcgugaccaccgagauacugcccgugagcaugaccaagaccagcguggacuguaccauguacaucugcggcgacagcaccgagugcagcaaccugcugcugcaguacggcagcuucugcacccagcugaaccgggcccugaccggcaucgccguggagcaggacaagaacacccaagagguguucgcccaggugaagcagaucuacaagacucccccaaucaaggacuucggcggcuucaacuucagccagauccugcccgaccccagcaagcccagcaagcggagcuucaucgaggaccugcuguucaacaaggugacccuggccgacgccggcuucaucaagcaguacggcgacugccugggggauaucgccgcucgggaccugaucugcgcccagaaguucaacggccugaccgugcugcccccucugcugaccgacgagaugaucgcccaguacaccagcgcccugcuugccggcaccaucaccagcggcuggaccuucggcgccggcgcagcccugcagauccccuucgccaugcagauggccuaccgguucaacggcaucggcgugacccagaacgugcuguacgagaaccagaagcugaucgccaaccaguucaacagcgccaucggcaagauccaggacagccugagcagcaccgccagcgcccugggcaagcugcaggacguggugaaccagaacgcucaggcccugaacacccuggugaagcagcugagcagcaacuucggcgccaucagcucagugcugaaugacauccugagcaggcuggaucccccagaggccgaggugcagaucgaccggcugaucaccggccggcugcagagccugcagaccuacgugacccagcagcugauccgggccgccgagauccgggccagcgccaaccuggcagccaccaagaugagcgagugcgugcugggccagagcaagcggguggacuuuugcggcaagggcuaccaccugaugagcuucccccagagcgcuccccacggcgugguguuccuccacgugacauacguccccgcccaggagaagaacuucaccaccgcccccgccauuugccacgacggcaaggcccacuucccccgggagggaguguucgugagcaacggcacccacugguucgugacccagcggaacuucuacgagccucagaucaucaccaccgacaacaccuucgugagcggcaacugcgacguggugaucggcaucgugaacaacaccguguacgacccccugcagcccgagcuggacagcuucaaggaggagcuggacaaguacuucaagaaccacaccagcccagacguggaccugggcgacaucagcggcaucaacgccagcguggugaacauccagaaggagaucgaccggcugaacgagguggccaagaaccugaacgagagccugaucgaccugcaggagcugggcaaguacgagcaguacaucaaguggcccugguacaucuggcugggcuucaucgccggccugaucgccaucgugauggugaccaucaugcugugcugcaugaccagcugcuguagcugccugaagggcugcugcagcugcggcagcugcugcaaguucgacgaggacgacagcgagcccgugcugaagggcgugaagcugcacuacaccugaggacuaguuauaagacugacuagcccgaugggccucccaacgggcccuccuccccuccuugcaccgagagaucucaaaggcucuuuucagagccaccaaaaaaaaaaaaaaaaaaaaaaaaaaaaaaaaaaaaaaaaaaaaaaaaaaaaaaaaaaaaaaaaaaaaaaaaaaaaaaaaaaaaaaaaaaaaaaaaaaaaa

SEQ ID NO: 24687 - RNA, 4035 nt, Artificial Sequence
  SARS-CoV-2/Wuhan/WIV05/2019__EPI_ISL_402128 spike protein mRNA gc (1-1273)(K986P_V987P_K986P_V987P_L18F_T20N_P26S_D138Y_R190S_K417T _E484K_N501Y_D614G_H655Y_T1027I)
aggagaaagcuuaccauguucguguuccuggugcugcugccccuggugagcagccagugcgugaacuucaccaaccggacccagcugcccagcgccuacaccaacagcuucacccggggcguguacuacccugacaagguguuccggagcagcgugcugcacagcacccaggaccuguuccugcccuucuucagcaacgugaccugguuccacgccauccacgugagcggcaccaacggcaccaagcgguucgacaaccccgugcugccauucaacgacggcguguacuucgccagcaccgagaagucaaacaucauccggggcuggaucuuuggcaccacccuggacagcaagacccagagccugcugaucgugaacaacgccacaaacguggugaucaaggugugcgaguuccaguucugcaacuaccccuuccugggcguguacuaccacaagaacaacaagagcuggauggagagcgaguuccgggucuacagcagcgcuaauaacugcaccuucgaguacgugagccagcccuuccugauggaccuggagggcaagcagggcaacuucaagaaccucagcgaguucguguucaagaacaucgacggcuacuucaagaucuacagcaagcacacccccaucaaccuggugcgggaucugccccagggauucagcgcccuggagccccugguggaccugccuaucggcaucaacaucacccgguuccagacccugcuggcccugcacaggagcuaccugacccccggcgacagcagcagcggcuggaccgccggcgccgccgcauacuacgugggcuaccugcagccccggaccuuccugcugaaguacaacgagaacggcaccaucaccgacgccguggacugcgcccuggacccacugagcgagaccaagugcacccuaaagagcuucaccguggagaagggcaucuaccagaccagcaacuuccgggugcagcccaccgagagcaucgugcgguuccccaacauuacuaaccugugucccuucggcgagguguucaacgccacccgguucgccagcguguacgccuggaaccggaagcggaucagcaacugcguggccgacuacagcgugcuguacaacagcgccagcuucagcaccuucaagugcuacggcgugagccccaccaagcugaacgaccugugcuucaccaacguguacgcugacagcuucgugauccggggcgacgaggugcggcagaucgccccuggccagaccggcaccaucgccgacuacaacuacaagcugcccgacgacuucaccggcugcgugaucgccuggaacagcaacaaccuggacagcaaggugggcggcaacuacaacuaccuguaccggcuguuccguaagagcaaccugaagcccuuugagcgggacaucagcaccgagaucuaccaggccggcagcaccccaugcaacggugugaagggcuucaacugcuacuucccccugcagagcuacggcuuccagcccaccuacggcgugggcuaccagcccuaccgggugguggugcugagcuucgagcugcugcacgcccccgccaccgugugcggccccaaaaagagcaccaaccuggugaagaacaagugcgugaacuucaauuucaacggccugaccggcaccggcgugcugaccgagagcaacaagaaguuccugccuuuccagcaguucggccgggacaucgccgauaccaccgacgcagugcgggacccccagacccuggagauccuggacaucacccccugcagcuucggcggcgugagcgucaucaccccaggcacaaacaccagcaaccagguggccgugcuguaccagggagugaacugcaccgaggugcccguggccauccacgccgaccagcugacccccaccuggcggguguacuccaccggcagcaacguguuccagacccgggccggcugccugaucggcgccgaguacgugaacaacagcuacgagugcgacauccccaucggcgcuggcaucugcgccagcuaccagacccagaccaacagcccccggcgggcccggagcguggccagccagagcaucaucgccuacaccaugagccugggcgccgagaacagcguggccuacagcaacaacagcaucgcgauccccaccaacuucaccaucagcgugaccaccgagauauuaccugugagcaugaccaagaccagcguggacuguaccauguacaucugcggcgacagcaccgagugcagcaaccugcugcugcaguacggcagcuucugcacccagcugaaccgggcccugaccggcaucgccguggagcaggacaagaacacccaagagguguucgcccaggugaagcagaucuacaagacuccacccaucaaggacuucggcggcuucaacuucagccagauccugcccgaccccagcaagcccagcaagcggagcuucaucgaggaccugcuguucaacaaggugacccuggccgacgccggcuucaucaagcaguacggcgacugccugggggacaucgccgcucgggaucugaucugcgcccagaaguucaacggccugaccgugcugccuccccugcugaccgacgagaugaucgcccaguacaccagcgcccugcuggccggcaccaucaccagcggcuggaccuucggcgccggcgcagcccuucagauccccuucgccaugcagauggccuaccgguucaacggcaucggcgugacccagaacgugcuguacgagaaccagaagcugaucgccaaccaguucaacagcgccaucggcaagauccaggacagccugagcagcaccgccagcgcccugggcaagcugcaggacguggugaaccagaacgcucaggcccugaacacccuggugaagcagcugagcucaaacuuuggcgccaucagcagcgugcugaaugacauccugagccggcuggacccacccgaggccgaggugcagaucgacaggcugaucaccggccggcugcagagccugcagaccuacgugacccagcagcugauccgggccgccgagauccgggccagcgccaaccuggcagccauuaagaugagcgagugcgugcugggccagagcaagcggguggacuucugcggcaagggcuaccaccugaugagcuucccccagagcgcuccccacggcgugguguuccugcacgugaccuacguccccgcccaggagaagaacuucacaaccgcccccgccaucugccacgacggcaaggcccacuucccccgggagggaguguucgugagcaacggcacccacugguucgugacccagcggaacuucuacgagccccagaucaucaccaccgacaacaccuucgugagcggcaacugcgacguggugaucggcaucgugaacaacaccguguacgacccucuccagcccgagcuggacagcuucaaggaggagcuggacaaguacuucaagaaccacaccagccccgacguggaccugggcgauaucagcggcaucaacgccagcguggugaacauccagaaggagaucgaccggcugaacgagguggccaagaaccugaacgagagccugaucgaccugcaggagcugggcaaguacgagcaguacaucaaguggccaugguacaucuggcugggcuucaucgccggccugaucgccaucgugauggugaccaucaugcugugcugcaugaccagcugcuguagcugccugaagggcugcugcagcugcggcagcugcugcaaguucgacgaggacgacagcgagcccgugcugaagggcgugaagcugcacuacaccugaggacuaguuauaagacugacuagcccgaugggccucccaacgggcccuccuccccuccuugcaccgagagaucucaaaggcucuuuucagagccaccaaaaaaaaaaaaaaaaaaaaaaaaaaaaaaaaaaaaaaaaaaaaaaaaaaaaaaaaaaaaaaaaaaaaaaaaaaaaaaaaaaaaaaaaaaaaaaaaaaaaa

SEQ ID NO: 24688 - RNA, 4035 nt, Artificial Sequence
  SARS-CoV-2/Wuhan/WIV05/2019__EPI_ISL_402128 spike protein mRNA gc (1-1273)(K986P_V987P_K986P_V987P_S13I_W152C_L452R_D614G)
aggagaaagcuuaccauguucguguuccuggugcugcugccccuggugagcauccagugcgugaaccugaccacccggacccagcugcccccugccuacaccaacagcuucacccggggcguguacuaccccgacaagguguuccggagcagcgugcugcacagcacccaggaccuguuccugcccuucuucagcaacgugaccugguuccacgccauccacgugagcggcaccaacggcaccaagcgguucgacaacccagugcugcccuucaacgacggcguguacuucgccagcaccgagaagucaaacaucauccggggcuggaucuucggcaccacccuggacagcaagacacagagccugcugaucgugaacaacgccaccaacguggugaucaaggugugcgaguuucaguucugcaacgaccccuuccugggcguguacuaccacaagaacaacaagagcugcauggagagcgaguuccgggucuacagcagcgcuaacaauugcaccuucgaguacgugagccagcccuuccugauggaccucgagggcaagcagggcaacuucaagaaccugcgggaguucguguucaagaacaucgauggcuacuucaagaucuacagcaagcacacccccaucaaccuggugcgggaccugccccagggauucagcgcccuggagccucugguggaccugcccaucggcaucaacaucaccagguuccagacccugcuggcccugcaccggagcuaccugacccccggcgacagcagcagcggcuggaccgccggcgccgccgcauacuacgugggcuaccugcagccacggaccuuccugcugaaguacaacgagaacggcaccaucaccgacgccguggacugcgcccuggacccccugagcgagaccaaguguacccuaaagagcuucaccguggagaagggcaucuaccagaccagcaacuuccgggugcagcccacugagagcauugugcgguuccccaacaucaccaaccugugccccuucggcgagguguucaacgccacccgguucgccagcguguacgccuggaaccggaagcggaucagcaacugcguggccgacuacagcgugcuguacaacagcgccagcuucagcaccuucaagugcuacggcgugagcccuaccaagcugaacgaccugugcuucaccaacguguacgcugacagcuucgugauccggggcgacgaggugcggcagaucgcccccggccagaccggcaagaucgccgacuacaacuacaagcugcccgacgacuucaccggcugcgugaucgccuggaacagcaacaaccuggacagcaaggugggcggcaacuacaacuaccgguaccggcuguuccguaagagcaaccugaagccauucgagcgggacaucagcaccgagaucuaccaggccggcagcacccccugcaacgguguggagggcuuuaacugcuacuucccccugcagagcuacggcuuccagcccaccaacggcgugggcuaccagcccuaccgggugguggugcugagcuucgagcugcugcacgcccccgccaccgugugcggcccuaaaaagagcaccaaccuggugaagaacaagugcgugaacuucaauuucaacggccugaccggcaccggcgugcugaccgagagcaacaagaaguuccugcccuuccagcaguucggccgggauaucgccgacaccaccgacgcagugcgggacccccagacccuggagauccuggacaucaccccaugcagcuucggcggcgugagcgucaucacccccggcacaaacaccagcaaccagguggccgugcuguaccagggagugaacugcaccgaggugcccguggccauccacgccgaccagcugacccccaccuggcggguguacagcaccggcagcaacguguuccagacccgggccggcugccugaucggcgccgagcacgugaacaacagcuacgagugcgacauccccaucggcgcuggcaucugugccuccuaccagacccagaccaacagcccccggcgggcccggagcguggccagccagagcaucaucgccuacaccaugagccugggcgccgagaacagcguggccuacagcaacaacagcaucgcgaucccuaccaacuucaccauaagcgugaccaccgagaucuuacccgugagcaugaccaagaccagcguggacugcaccauguacaucugcggcgacagcaccgagugcagcaaccugcugcugcaguacggcagcuucugcacccagcugaaccgggcccugaccggcaucgccguggagcaggacaagaacacccaagagguguucgcccaggugaagcagaucuacaagacucccccaaucaaggacuucggcggcuucaacuucagccagauccugcccgaccccagcaagcccagcaagcggagcuucaucgaggaccugcuguucaacaaggugacccuggccgacgccggcuucaucaagcaguacggcgacugccugggggauaucgccgcucgggaccugaucugcgcccagaaguucaacggccugaccgugcugcccccucugcugaccgacgagaugaucgcccaguacaccagcgcccugcuggccggcaccaucaccagcggcuggaccuucggcgccggcgcagcccuucagauccccuucgccaugcagauggccuacagguucaacggcaucggcgugacccagaacgugcuguacgagaaccagaagcugaucgccaaccaguucaacagcgccaucggcaagauccaggacagccugagcagcaccgccagcgcccugggcaagcugcaggacguggugaaccagaacgcucaggcccugaacacccuggugaagcagcugagcagcaacuucggcgccaucagcagcgugcugaaugacauccugucacggcuggaucccccagaggccgaggugcagaucgaccggcugaucaccggccggcugcagagccugcagaccuacgugacccagcagcugauccgggccgccgagauucgggccagcgccaaccuggcagccaccaagaugagcgagugcgugcugggccagagcaagcggguggacuuuugcggcaagggcuaccaccugaugagcuucccccagagcgcuccccacggcgugguguuccugcacgugacauacguccccgcccaggagaagaacuucaccaccgcccccgccaucugccacgacggcaaggcccacuucccccgggagggaguguucgugagcaacggcacccacugguucgugacccagcggaacuucuacgagccucagaucaucaccaccgacaacaccuucgugagcggcaacugcgacguggugaucggcaucgugaacaacaccguguacgacccccuccagcccgagcuggacagcuucaaggaggagcuggacaaguacuucaagaaccacaccagcccagacguggaccugggcgacaucagcggcaucaacgccagcguggugaacauccagaaggagaucgaccggcugaacgagguggccaagaaccugaacgagagccugaucgaccugcaggagcugggcaaguacgagcaguacaucaaguggcccugguacaucuggcugggcuucaucgccggccugaucgccaucgugauggugaccaucaugcugugcugcaugaccagcuguugcagcugccugaagggcugcugcagcugcggcagcugcugcaaguucgacgaggacgacagcgagcccgugcugaagggcgugaagcugcacuacaccugaggacuaguuauaagacugacuagcccgaugggccucccaacgggcccuccuccccuccuugcaccgagagaucucaaaggcucuuuucagagccaccaaaaaaaaaaaaaaaaaaaaaaaaaaaaaaaaaaaaaaaaaaaaaaaaaaaaaaaaaaaaaaaaaaaaaaaaaaaaaaaaaaaaaaaaaaaaaaaaaaaaa

SEQ ID NO: 24689 - RNA, 4035 nt, Artificial Sequence
  SARS-CoV-2/Wuhan/WIV05/2019__EPI_ISL_402128 spike protein mRNA gc mod (1-1273)(K986P_V987P)
aggagaaagcuuaccauguucguguuucuggugcugcugccccugguguccagccagugugugaaccugaccaccagaacacagcugccuccagccuacaccaacagcuucaccagaggcguguacuaccccgacaagguguucagauccagcgugcugcacucuacccaggaccuguuccugccuuucuucagcaacgugaccugguuccacgccauccacguguccggcaccaauggcaccaagagauucgacaaccccgugcugcccuucaacgacgggguguacuuugccagcaccgagaaguccaacaucaucagaggcuggaucuucggcaccacacuggacagcaagacccagagccugcugaucgugaacaacgccaccaacguggucaucaaagugugcgaguuccaguucugcaacgaccccuuccugggcgucuacuaccacaagaacaacaagagcuggauggaaagcgaguuccggguguacagcagcgccaacaacugcaccuucgaguacgugucccagccuuuccugauggaccuggaaggcaagcagggcaacuucaagaaccugcgcgaguucguguucaagaacaucgacggcuacuucaaaaucuacagcaagcacaccccuaucaaccucgugcgggaucugccucagggcuucucugcucuggaaccccugguggaucugcccaucggcaucaacaucacccgguuucagacacugcuggcccugcacagaagcuaccugacaccuggcgauagcagcagcggauggacagcuggugccgccgcuuacuaugugggcuaccugcagccuagaaccuuccugcugaaguacaacgagaacggcaccaucaccgacgccguggauugugcucuggauccucugagcgagacaaagugcacccugaaguccuucaccguggaaaagggcaucuaccagaccagcaacuuccgggugcagcccaccgaauccaucgugcgguuccccaauaucaccaaucugugccccuucggcgagguguucaaugccaccagauucgccucuguguacgccuggaaccggaagcggaucagcaauugcguggccgacuacuccgugcuguacaacuccgccagcuucagcaccuucaagugcuacggcguguccccuaccaagcugaacgaccugugcuucacaaacguguacgccgacagcuucgugauccggggagaugaagugcggcagauugccccuggacagacaggcaagaucgccgacuacaacuacaagcugcccgacgacuucaccggcugugugauugccuggaacagcaacaaccuggacuccaaagucggcggcaacuacaauuaccuguaccggcuguuccggaaguccaaucugaagcccuucgagcgggacaucagcaccgaaaucuaucaggccggcagcaccccuugcaacggcguggaaggcuucaacugcuacuucccacugcaguccuacggcuuucagcccacaaauggcgugggcuaucagcccuacagagugguggugcugagcuucgaacugcugcaugcuccugccacagugugcggcccuaagaaaagcaccaaucucgugaagaacaaaugcgugaacuucaacuucaacggccugaccggcaccggcgugcugacagagagcaacaagaaguuccugccauuccagcaguuuggccgggauaucgccgauaccacagacgccguuagagauccccagacacuggaaauccuggacaucaccccaugcagcuucggcggagugucugugaucaccccuggcaccaacaccagcaaucagguggcagugcuguaccaggacgugaacuguaccgaagugcccguggccauucacgccgaucagcugacaccuacauggcggguguacuccaccggcagcaauguguuucagaccagagccggcugucugaucggagccgagcacgugaacaauagcuacgagugcgacauccccaucggcgcuggcaucugugccagcuaccagacacagacaaacagccccagacgggcuagaagcguggccagccagagcaucauugccuacacaaugucucugggcgccgagaacagcguggccuacuccaacaacucuaucgcuauccccaccaacuucaccaucagcgugaccaccgagauccugccuguguccaugaccaagaccagcguggacugcaccauguacaucugcggcgauuccaccgagugcuccaaccugcugcugcaguacggcagcuucugcacccagcugaauagagcccugacagggaucgccguggaacaggacaagaacacccaagagguguucgcccaagugaagcaaaucuacaagaccccuccuaucaaggacuucggcggcuucaauuucagccagauucugcccgauccuagcaagcccagcaagcggagcuucaucgaggaccugcuguucaacaaagugacacuggccgacgccggcuucaucaagcaguauggcgauugucugggcgacauugccgccagggaucugauuugcgcccagaaguuuaacggacugacagugcugccuccucugcugaccgaugagaugaucgcccaguacacaucugcccugcuggccggcacaaucacaagcggcuggacauuuggagcuggcgccgcucugcagauccccuuugcuaugcagauggccuaccgguucaacggcaucggagugacccagaaugugcuguacgagaaccagaagcugaucgccaaccaguucaacagcgccaucggcaagauccaggacagccugagcagcacagcaagcgcccugggaaagcugcaggacguggucaaccagaaugcccaggcacugaacacccuggucaagcagcuguccuccaacuucggcgccaucagcucugugcugaacgauauccugagcagacuggacccuccugaggccgaggugcagaucgacagacugaucacaggcagacugcagagccuccagacauacgugacccagcagcugaucagagccgccgagauuagagccucugccaaucuggccgccaccaagaugucugagugugugcugggccagagcaagagaguggacuuuugcggcaagggcuaccaccugaugagcuucccucagucugccccucacggcgugguguuucugcacgugacauaugugcccgcucaagagaagaauuucaccaccgcuccagccaucugccacgacggcaaagcccacuuuccuagagaaggcguguucguguccaacggcacccauugguucgugacacagcggaacuucuacgagccccagaucaucaccaccgacaacaccuucgugucuggcaacugcgacguugugaucggcauugugaacaauaccguguacgacccucugcagcccgagcuggacagcuucaaagaggaacuggacaaguacuuuaagaaccacacaagccccgacguggaccugggcgauaucagcggaaucaaugccagcgucgugaacauccagaaagagaucgaccggcugaacgagguggccaagaaucugaacgagagccugaucgaccugcaagaacuggggaaguacgagcaguacaucaaguggcccugguacaucuggcugggcuuuaucgccggacugauugccaucgugauggucacaaucaugcuguguugcaugaccagcugcuguagcugccugaagggcuguuguagcuguggcagcugcugcaaguucgacgaggacgauucugagcccgugcugaagggcgugaaacugcacuacaccugaggacuaguuauaagacugacuagcccgaugggccucccaacgggcccuccuccccuccuugcaccgagagaucucaaaggcucuuuucagagccaccaaaaaaaaaaaaaaaaaaaaaaaaaaaaaaaaaaaaaaaaaaaaaaaaaaaaaaaaaaaaaaaaaaaaaaaaaaaaaaaaaaaaaaaaaaaaaaaaaaaaa

SEQ ID NO: 24690 - RNA, 4035 nt, Artificial Sequence
  SARS-CoV-2/Wuhan/WIV05/2019__EPI_ISL_402128 spike protein mRNA gc mod (1-1273)(K986P_V987P_ D614G)
aggagaaagcuuaccauguucguguuucuggugcugcugccccugguguccagccagugugugaaccugaccaccagaacacagcugccuccagccuacaccaacagcuucaccagaggcguguacuaccccgacaagguguucagauccagcgugcugcacucuacccaggaccuguuccugccuuucuucagcaacgugaccugguuccacgccauccacguguccggcaccaauggcaccaagagauucgacaaccccgugcugcccuucaacgacgggguguacuuugccagcaccgagaaguccaacaucaucagaggcuggaucuucggcaccacacuggacagcaagacccagagccugcugaucgugaacaacgccaccaacguggucaucaaagugugcgaguuccaguucugcaacgaccccuuccugggcgucuacuaccacaagaacaacaagagcuggauggaaagcgaguuccggguguacagcagcgccaacaacugcaccuucgaguacgugucccagccuuuccugauggaccuggaaggcaagcagggcaacuucaagaaccugcgcgaguucguguucaagaacaucgacggcuacuucaaaaucuacagcaagcacaccccuaucaaccucgugcgggaucugccucagggcuucucugcucuggaaccccugguggaucugcccaucggcaucaacaucacccgguuucagacacugcuggcccugcacagaagcuaccugacaccuggcgauagcagcagcggauggacagcuggugccgccgcuuacuaugugggcuaccugcagccuagaaccuuccugcugaaguacaacgagaacggcaccaucaccgacgccguggauugugcucuggauccucugagcgagacaaagugcacccugaaguccuucaccguggaaaagggcaucuaccagaccagcaacuuccgggugcagcccaccgaauccaucgugcgguuccccaauaucaccaaucugugccccuucggcgagguguucaaugccaccagauucgccucuguguacgccuggaaccggaagcggaucagcaauugcguggccgacuacuccgugcuguacaacuccgccagcuucagcaccuucaagugcuacggcguguccccuaccaagcugaacgaccugugcuucacaaacguguacgccgacagcuucgugauccggggagaugaagugcggcagauugccccuggacagacaggcaagaucgccgacuacaacuacaagcugcccgacgacuucaccggcugugugauugccuggaacagcaacaaccuggacuccaaagucggcggcaacuacaauuaccuguaccggcuguuccggaaguccaaucugaagcccuucgagcgggacaucagcaccgaaaucuaucaggccggcagcaccccuugcaacggcguggaaggcuucaacugcuacuucccacugcaguccuacggcuuucagcccacaaauggcgugggcuaucagcccuacagagugguggugcugagcuucgaacugcugcaugcuccugccacagugugcggcccuaagaaaagcaccaaucucgugaagaacaaaugcgugaacuucaacuucaacggccugaccggcaccggcgugcugacagagagcaacaagaaguuccugccauuccagcaguuuggccgggauaucgccgauaccacagacgccguuagagauccccagacacuggaaauccuggacaucaccccaugcagcuucggcggagugucugugaucaccccuggcaccaacaccagcaaucagguggcagugcuguaccagggcgugaacuguaccgaagugcccguggccauucacgccgaucagcugacaccuacauggcggguguacuccaccggcagcaauguguuucagaccagagccggcugucugaucggagccgagcacgugaacaauagcuacgagugcgacauccccaucggcgcuggcaucugugccagcuaccagacacagacaaacagccccagacgggcuagaagcguggccagccagagcaucauugccuacacaaugucucugggcgccgagaacagcguggccuacuccaacaacucuaucgcuauccccaccaacuucaccaucagcgugaccaccgagauccugccuguguccaugaccaagaccagcguggacugcaccauguacaucugcggcgauuccaccgagugcuccaaccugcugcugcaguacggcagcuucugcacccagcugaauagagcccugacagggaucgccguggaacaggacaagaacacccaagagguguucgcccaagugaagcaaaucuacaagaccccuccuaucaaggacuucggcggcuucaauuucagccagauucugcccgauccuagcaagcccagcaagcggagcuucaucgaggaccugcuguucaacaaagugacacuggccgacgccggcuucaucaagcaguauggcgauugucugggcgacauugccgccagggaucugauuugcgcccagaaguuuaacggacugacagugcugccuccucugcugaccgaugagaugaucgcccaguacacaucugcccugcuggccggcacaaucacaagcggcuggacauuuggagcuggcgccgcucugcagauccccuuugcuaugcagauggccuaccgguucaacggcaucggagugacccagaaugugcuguacgagaaccagaagcugaucgccaaccaguucaacagcgccaucggcaagauccaggacagccugagcagcacagcaagcgcccugggaaagcugcaggacguggucaaccagaaugcccaggcacugaacacccuggucaagcagcuguccuccaacuucggcgccaucagcucugugcugaacgauauccugagcagacuggacccuccugaggccgaggugcagaucgacagacugaucacaggcagacugcagagccuccagacauacgugacccagcagcugaucagagccgccgagauuagagccucugccaaucuggccgccaccaagaugucugagugugugcugggccagagcaagagaguggacuuuugcggcaagggcuaccaccugaugagcuucccucagucugccccucacggcgugguguuucugcacgugacauaugugcccgcucaagagaagaauuucaccaccgcuccagccaucugccacgacggcaaagcccacuuuccuagagaaggcguguucguguccaacggcacccauugguucgugacacagcggaacuucuacgagccccagaucaucaccaccgacaacaccuucgugucuggcaacugcgacguugugaucggcauugugaacaauaccguguacgacccucugcagcccgagcuggacagcuucaaagaggaacuggacaaguacuuuaagaaccacacaagccccgacguggaccugggcgauaucagcggaaucaaugccagcgucgugaacauccagaaagagaucgaccggcugaacgagguggccaagaaucugaacgagagccugaucgaccugcaagaacuggggaaguacgagcaguacaucaaguggcccugguacaucuggcugggcuuuaucgccggacugauugccaucgugauggucacaaucaugcuguguugcaugaccagcugcuguagcugccugaagggcuguuguagcuguggcagcugcugcaaguucgacgaggacgauucugagcccgugcugaagggcgugaaacugcacuacaccugaggacuaguuauaagacugacuagcccgaugggccucccaacgggcccuccuccccuccuugcaccgagagaucucaaaggcucuuuucagagccaccaaaaaaaaaaaaaaaaaaaaaaaaaaaaaaaaaaaaaaaaaaaaaaaaaaaaaaaaaaaaaaaaaaaaaaaaaaaaaaaaaaaaaaaaaaaaaaaaaaaaa

SEQ ID NO: 24691 - RNA, 4035 nt, Artificial Sequence
  SARS-CoV-2/Wuhan/WIV05/2019__EPI_ISL_402128 spike protein mRNA gc mod (1-1273)(K986P_V987P_A222V_D614G)
aggagaaagcuuaccauguucguguuucuggugcugcugccccugguguccagccagugugugaaccugaccaccagaacacagcugccuccagccuacaccaacagcuucaccagaggcguguacuaccccgacaagguguucagauccagcgugcugcacucuacccaggaccuguuccugccuuucuucagcaacgugaccugguuccacgccauccacguguccggcaccaauggcaccaagagauucgacaaccccgugcugcccuucaacgacgggguguacuuugccagcaccgagaaguccaacaucaucagaggcuggaucuucggcaccacacuggacagcaagacccagagccugcugaucgugaacaacgccaccaacguggucaucaaagugugcgaguuccaguucugcaacgaccccuuccugggcgucuacuaccacaagaacaacaagagcuggauggaaagcgaguuccggguguacagcagcgccaacaacugcaccuucgaguacgugucccagccuuuccugauggaccuggaaggcaagcagggcaacuucaagaaccugcgcgaguucguguucaagaacaucgacggcuacuucaaaaucuacagcaagcacaccccuaucaaccucgugcgggaucugccucagggcuucucugugcuggaaccccugguggaucugcccaucggcaucaacaucacccgguuucagacacugcuggcccugcacagaagcuaccugacaccuggcgauagcagcagcggauggacagcuggugccgccgcuuacuaugugggcuaccugcagccuagaaccuuccugcugaaguacaacgagaacggcaccaucaccgacgccguggauugugcucuggauccucugagcgagacaaagugcacccugaaguccuucaccguggaaaagggcaucuaccagaccagcaacuuccgggugcagcccaccgaauccaucgugcgguuccccaauaucaccaaucugugccccuucggcgagguguucaaugccaccagauucgccucuguguacgccuggaaccggaagcggaucagcaauugcguggccgacuacuccgugcuguacaacuccgccagcuucagcaccuucaagugcuacggcguguccccuaccaagcugaacgaccugugcuucacaaacguguacgccgacagcuucgugauccggggagaugaagugcggcagauugccccuggacagacaggcaagaucgccgacuacaacuacaagcugcccgacgacuucaccggcugugugauugccuggaacagcaacaaccuggacuccaaagucggcggcaacuacaauuaccuguaccggcuguuccggaaguccaaucugaagcccuucgagcgggacaucagcaccgaaaucuaucaggccggcagcaccccuugcaacggcguggaaggcuucaacugcuacuucccacugcaguccuacggcuuucagcccacaaauggcgugggcuaucagcccuacagagugguggugcugagcuucgaacugcugcaugcuccugccacagugugcggcccuaagaaaagcaccaaucucgugaagaacaaaugcgugaacuucaacuucaacggccugaccggcaccggcgugcugacagagagcaacaagaaguuccugccauuccagcaguuuggccgggauaucgccgauaccacagacgccguuagagauccccagacacuggaaauccuggacaucaccccaugcagcuucggcggagugucugugaucaccccuggcaccaacaccagcaaucagguggcagugcuguaccagggcgugaacuguaccgaagugcccguggccauucacgccgaucagcugacaccuacauggcggguguacuccaccggcagcaauguguuucagaccagagccggcugucugaucggagccgagcacgugaacaauagcuacgagugcgacauccccaucggcgcuggcaucugugccagcuaccagacacagacaaacagccccagacgggcuagaagcguggccagccagagcaucauugccuacacaaugucucugggcgccgagaacagcguggccuacuccaacaacucuaucgcuauccccaccaacuucaccaucagcgugaccaccgagauccugccuguguccaugaccaagaccagcguggacugcaccauguacaucugcggcgauuccaccgagugcuccaaccugcugcugcaguacggcagcuucugcacccagcugaauagagcccugacagggaucgccguggaacaggacaagaacacccaagagguguucgcccaagugaagcaaaucuacaagaccccuccuaucaaggacuucggcggcuucaauuucagccagauucugcccgauccuagcaagcccagcaagcggagcuucaucgaggaccugcuguucaacaaagugacacuggccgacgccggcuucaucaagcaguauggcgauugucugggcgacauugccgccagggaucugauuugcgcccagaaguuuaacggacugacagugcugccuccucugcugaccgaugagaugaucgcccaguacacaucugcccugcuggccggcacaaucacaagcggcuggacauuuggagcuggcgccgcucugcagauccccuuugcuaugcagauggccuaccgguucaacggcaucggagugacccagaaugugcuguacgagaaccagaagcugaucgccaaccaguucaacagcgccaucggcaagauccaggacagccugagcagcacagcaagcgcccugggaaagcugcaggacguggucaaccagaaugcccaggcacugaacacccuggucaagcagcuguccuccaacuucggcgccaucagcucugugcugaacgauauccugagcagacuggacccuccugaggccgaggugcagaucgacagacugaucacaggcagacugcagagccuccagacauacgugacccagcagcugaucagagccgccgagauuagagccucugccaaucuggccgccaccaagaugucugagugugugcugggccagagcaagagaguggacuuuugcggcaagggcuaccaccugaugagcuucccucagucugccccucacggcgugguguuucugcacgugacauaugugcccgcucaagagaagaauuucaccaccgcuccagccaucugccacgacggcaaagcccacuuuccuagagaaggcguguucguguccaacggcacccauugguucgugacacagcggaacuucuacgagccccagaucaucaccaccgacaacaccuucgugucuggcaacugcgacguugugaucggcauugugaacaauaccguguacgacccucugcagcccgagcuggacagcuucaaagaggaacuggacaaguacuuuaagaaccacacaagccccgacguggaccugggcgauaucagcggaaucaaugccagcgucgugaacauccagaaagagaucgaccggcugaacgagguggccaagaaucugaacgagagccugaucgaccugcaagaacuggggaaguacgagcaguacaucaaguggcccugguacaucuggcugggcuuuaucgccggacugauugccaucgugauggucacaaucaugcuguguugcaugaccagcugcuguagcugccugaagggcuguuguagcuguggcagcugcugcaaguucgacgaggacgauucugagcccgugcugaagggcgugaaacugcacuacaccugaggacuaguuauaagacugacuagcccgaugggccucccaacgggcccuccuccccuccuugcaccgagagaucucaaaggcucuuuucagagccaccaaaaaaaaaaaaaaaaaaaaaaaaaaaaaaaaaaaaaaaaaaaaaaaaaaaaaaaaaaaaaaaaaaaaaaaaaaaaaaaaaaaaaaaaaaaaaaaaaaaaa

SEQ ID NO: 24692 - RNA, 4035 nt, Artificial Sequence
  SARS-CoV-2/Wuhan/WIV05/2019__EPI_ISL_402128 spike protein mRNA gc mod (1-1273)(K986P_V987P_N439K_D614G)
aggagaaagcuuaccauguucguguuucuggugcugcugccccugguguccagccagugugugaaccugaccaccagaacacagcugccuccagccuacaccaacagcuucaccagaggcguguacuaccccgacaagguguucagauccagcgugcugcacucuacccaggaccuguuccugccuuucuucagcaacgugaccugguuccacgccauccacguguccggcaccaauggcaccaagagauucgacaaccccgugcugcccuucaacgacgggguguacuuugccagcaccgagaaguccaacaucaucagaggcuggaucuucggcaccacacuggacagcaagacccagagccugcugaucgugaacaacgccaccaacguggucaucaaagugugcgaguuccaguucugcaacgaccccuuccugggcgucuacuaccacaagaacaacaagagcuggauggaaagcgaguuccggguguacagcagcgccaacaacugcaccuucgaguacgugucccagccuuuccugauggaccuggaaggcaagcagggcaacuucaagaaccugcgcgaguucguguucaagaacaucgacggcuacuucaaaaucuacagcaagcacaccccuaucaaccucgugcgggaucugccucagggcuucucugcucuggaaccccugguggaucugcccaucggcaucaacaucacccgguuucagacacugcuggcccugcacagaagcuaccugacaccuggcgauagcagcagcggauggacagcuggugccgccgcuuacuaugugggcuaccugcagccuagaaccuuccugcugaaguacaacgagaacggcaccaucaccgacgccguggauugugcucuggauccucugagcgagacaaagugcacccugaaguccuucaccguggaaaagggcaucuaccagaccagcaacuuccgggugcagcccaccgaauccaucgugcgguuccccaauaucaccaaucugugccccuucggcgagguguucaaugccaccagauucgccucuguguacgccuggaaccggaagcggaucagcaauugcguggccgacuacuccgugcuguacaacuccgccagcuucagcaccuucaagugcuacggcguguccccuaccaagcugaacgaccugugcuucacaaacguguacgccgacagcuucgugauccggggagaugaagugcggcagauugccccuggacagacaggcaagaucgccgacuacaacuacaagcugcccgacgacuucaccggcugugugauugccuggaacagcaagaaccuggacuccaaagucggcggcaacuacaauuaccuguaccggcuguuccggaaguccaaucugaagcccuucgagcgggacaucagcaccgaaaucuaucaggccggcagcaccccuugcaacggcguggaaggcuucaacugcuacuucccacugcaguccuacggcuuucagcccacaaauggcgugggcuaucagcccuacagagugguggugcugagcuucgaacugcugcaugcuccugccacagugugcggcccuaagaaaagcaccaaucucgugaagaacaaaugcgugaacuucaacuucaacggccugaccggcaccggcgugcugacagagagcaacaagaaguuccugccauuccagcaguuuggccgggauaucgccgauaccacagacgccguuagagauccccagacacuggaaauccuggacaucaccccaugcagcuucggcggagugucugugaucaccccuggcaccaacaccagcaaucagguggcagugcuguaccagggcgugaacuguaccgaagugcccguggccauucacgccgaucagcugacaccuacauggcggguguacuccaccggcagcaauguguuucagaccagagccggcugucugaucggagccgagcacgugaacaauagcuacgagugcgacauccccaucggcgcuggcaucugugccagcuaccagacacagacaaacagccccagacgggcuagaagcguggccagccagagcaucauugccuacacaaugucucugggcgccgagaacagcguggccuacuccaacaacucuaucgcuauccccaccaacuucaccaucagcgugaccaccgagauccugccuguguccaugaccaagaccagcguggacugcaccauguacaucugcggcgauuccaccgagugcuccaaccugcugcugcaguacggcagcuucugcacccagcugaauagagcccugacagggaucgccguggaacaggacaagaacacccaagagguguucgcccaagugaagcaaaucuacaagaccccuccuaucaaggacuucggcggcuucaauuucagccagauucugcccgauccuagcaagcccagcaagcggagcuucaucgaggaccugcuguucaacaaagugacacuggccgacgccggcuucaucaagcaguauggcgauugucugggcgacauugccgccagggaucugauuugcgcccagaaguuuaacggacugacagugcugccuccucugcugaccgaugagaugaucgcccaguacacaucugcccugcuggccggcacaaucacaagcggcuggacauuuggagcuggcgccgcucugcagauccccuuugcuaugcagauggccuaccgguucaacggcaucggagugacccagaaugugcuguacgagaaccagaagcugaucgccaaccaguucaacagcgccaucggcaagauccaggacagccugagcagcacagcaagcgcccugggaaagcugcaggacguggucaaccagaaugcccaggcacugaacacccuggucaagcagcuguccuccaacuucggcgccaucagcucugugcugaacgauauccugagcagacuggacccuccugaggccgaggugcagaucgacagacugaucacaggcagacugcagagccuccagacauacgugacccagcagcugaucagagccgccgagauuagagccucugccaaucuggccgccaccaagaugucugagugugugcugggccagagcaagagaguggacuuuugcggcaagggcuaccaccugaugagcuucccucagucugccccucacggcgugguguuucugcacgugacauaugugcccgcucaagagaagaauuucaccaccgcuccagccaucugccacgacggcaaagcccacuuuccuagagaaggcguguucguguccaacggcacccauugguucgugacacagcggaacuucuacgagccccagaucaucaccaccgacaacaccuucgugucuggcaacugcgacguugugaucggcauugugaacaauaccguguacgacccucugcagcccgagcuggacagcuucaaagaggaacuggacaaguacuuuaagaaccacacaagccccgacguggaccugggcgauaucagcggaaucaaugccagcgucgugaacauccagaaagagaucgaccggcugaacgagguggccaagaaucugaacgagagccugaucgaccugcaagaacuggggaaguacgagcaguacaucaaguggcccugguacaucuggcugggcuuuaucgccggacugauugccaucgugauggucacaaucaugcuguguugcaugaccagcugcuguagcugccugaagggcuguuguagcuguggcagcugcugcaaguucgacgaggacgauucugagcccgugcugaagggcgugaaacugcacuacaccugaggacuaguuauaagacugacuagcccgaugggccucccaacgggcccuccuccccuccuugcaccgagagaucucaaaggcucuuuucagagccaccaaaaaaaaaaaaaaaaaaaaaaaaaaaaaaaaaaaaaaaaaaaaaaaaaaaaaaaaaaaaaaaaaaaaaaaaaaaaaaaaaaaaaaaaaaaaaaaaaaaaa

SEQ ID NO: 24693 - RNA, 4035 nt, Artificial Sequence
  SARS-CoV-2/Wuhan/WIV05/2019__EPI_ISL_402128 spike protein mRNA gc mod (1-1273)(K986P_V987P_S477N_D614G)
aggagaaagcuuaccauguucguguuucuggugcugcugccccugguguccagccagugugugaaccugaccaccagaacacagcugccuccagccuacaccaacagcuucaccagaggcguguacuaccccgacaagguguucagauccagcgugcugcacucuacccaggaccuguuccugccuuucuucagcaacgugaccugguuccacgccauccacguguccggcaccaauggcaccaagagauucgacaaccccgugcugcccuucaacgacgggguguacuuugccagcaccgagaaguccaacaucaucagaggcuggaucuucggcaccacacuggacagcaagacccagagccugcugaucgugaacaacgccaccaacguggucaucaaagugugcgaguuccaguucugcaacgaccccuuccugggcgucuacuaccacaagaacaacaagagcuggauggaaagcgaguuccggguguacagcagcgccaacaacugcaccuucgaguacgugucccagccuuuccugauggaccuggaaggcaagcagggcaacuucaagaaccugcgcgaguucguguucaagaacaucgacggcuacuucaaaaucuacagcaagcacaccccuaucaaccucgugcgggaucugccucagggcuucucugcucuggaaccccugguggaucugcccaucggcaucaacaucacccgguuucagacacugcuggcccugcacagaagcuaccugacaccuggcgauagcagcagcggauggacagcuggugccgccgcuuacuaugugggcuaccugcagccuagaaccuuccugcugaaguacaacgagaacggcaccaucaccgacgccguggauugugcucuggauccucugagcgagacaaagugcacccugaaguccuucaccguggaaaagggcaucuaccagaccagcaacuuccgggugcagcccaccgaauccaucgugcgguuccccaauaucaccaaucugugccccuucggcgagguguucaaugccaccagauucgccucuguguacgccuggaaccggaagcggaucagcaauugcguggccgacuacuccgugcuguacaacuccgccagcuucagcaccuucaagugcuacggcguguccccuaccaagcugaacgaccugugcuucacaaacguguacgccgacagcuucgugauccggggagaugaagugcggcagauugccccuggacagacaggcaagaucgccgacuacaacuacaagcugcccgacgacuucaccggcugugugauugccuggaacagcaacaaccuggacuccaaagucggcggcaacuacaauuaccuguaccggcuguuccggaaguccaaucugaagcccuucgagcgggacaucagcaccgaaaucuaucaggccggcaacaccccuugcaacggcguggaaggcuucaacugcuacuucccacugcaguccuacggcuuucagcccacaaauggcgugggcuaucagcccuacagagugguggugcugagcuucgaacugcugcaugcuccugccacagugugcggcccuaagaaaagcaccaaucucgugaagaacaaaugcgugaacuucaacuucaacggccugaccggcaccggcgugcugacagagagcaacaagaaguuccugccauuccagcaguuuggccgggauaucgccgauaccacagacgccguuagagauccccagacacuggaaauccuggacaucaccccaugcagcuucggcggagugucugugaucaccccuggcaccaacaccagcaaucagguggcagugcuguaccagggcgugaacuguaccgaagugcccguggccauucacgccgaucagcugacaccuacauggcggguguacuccaccggcagcaauguguuucagaccagagccggcugucugaucggagccgagcacgugaacaauagcuacgagugcgacauccccaucggcgcuggcaucugugccagcuaccagacacagacaaacagccccagacgggcuagaagcguggccagccagagcaucauugccuacacaaugucucugggcgccgagaacagcguggccuacuccaacaacucuaucgcuauccccaccaacuucaccaucagcgugaccaccgagauccugccuguguccaugaccaagaccagcguggacugcaccauguacaucugcggcgauuccaccgagugcuccaaccugcugcugcaguacggcagcuucugcacccagcugaauagagcccugacagggaucgccguggaacaggacaagaacacccaagagguguucgcccaagugaagcaaaucuacaagaccccuccuaucaaggacuucggcggcuucaauuucagccagauucugcccgauccuagcaagcccagcaagcggagcuucaucgaggaccugcuguucaacaaagugacacuggccgacgccggcuucaucaagcaguauggcgauugucugggcgacauugccgccagggaucugauuugcgcccagaaguuuaacggacugacagugcugccuccucugcugaccgaugagaugaucgcccaguacacaucugcccugcuggccggcacaaucacaagcggcuggacauuuggagcuggcgccgcucugcagauccccuuugcuaugcagauggccuaccgguucaacggcaucggagugacccagaaugugcuguacgagaaccagaagcugaucgccaaccaguucaacagcgccaucggcaagauccaggacagccugagcagcacagcaagcgcccugggaaagcugcaggacguggucaaccagaaugcccaggcacugaacacccuggucaagcagcuguccuccaacuucggcgccaucagcucugugcugaacgauauccugagcagacuggacccuccugaggccgaggugcagaucgacagacugaucacaggcagacugcagagccuccagacauacgugacccagcagcugaucagagccgccgagauuagagccucugccaaucuggccgccaccaagaugucugagugugugcugggccagagcaagagaguggacuuuugcggcaagggcuaccaccugaugagcuucccucagucugccccucacggcgugguguuucugcacgugacauaugugcccgcucaagagaagaauuucaccaccgcuccagccaucugccacgacggcaaagcccacuuuccuagagaaggcguguucguguccaacggcacccauugguucgugacacagcggaacuucuacgagccccagaucaucaccaccgacaacaccuucgugucuggcaacugcgacguugugaucggcauugugaacaauaccguguacgacccucugcagcccgagcuggacagcuucaaagaggaacuggacaaguacuuuaagaaccacacaagccccgacguggaccugggcgauaucagcggaaucaaugccagcgucgugaacauccagaaagagaucgaccggcugaacgagguggccaagaaucugaacgagagccugaucgaccugcaagaacuggggaaguacgagcaguacaucaaguggcccugguacaucuggcugggcuuuaucgccggacugauugccaucgugauggucacaaucaugcuguguugcaugaccagcugcuguagcugccugaagggcuguuguagcuguggcagcugcugcaaguucgacgaggacgauucugagcccgugcugaagggcgugaaacugcacuacaccugaggacuaguuauaagacugacuagcccgaugggccucccaacgggcccuccuccccuccuugcaccgagagaucucaaaggcucuuuucagagccaccaaaaaaaaaaaaaaaaaaaaaaaaaaaaaaaaaaaaaaaaaaaaaaaaaaaaaaaaaaaaaaaaaaaaaaaaaaaaaaaaaaaaaaaaaaaaaaaaaaaaa

SEQ ID NO: 24694 - RNA, 4035 nt, Artificial Sequence
  SARS-CoV-2/Wuhan/WIV05/2019__EPI_ISL_402128 spike protein mRNA gc mod (1-1273)(K986P_V987P_N501Y_D614G)
aggagaaagcuuaccauguucguguuucuggugcugcugccccugguguccagccagugugugaaccugaccaccagaacacagcugccuccagccuacaccaacagcuucaccagaggcguguacuaccccgacaagguguucagauccagcgugcugcacucuacccaggaccuguuccugccuuucuucagcaacgugaccugguuccacgccauccacguguccggcaccaauggcaccaagagauucgacaaccccgugcugcccuucaacgacgggguguacuuugccagcaccgagaaguccaacaucaucagaggcuggaucuucggcaccacacuggacagcaagacccagagccugcugaucgugaacaacgccaccaacguggucaucaaagugugcgaguuccaguucugcaacgaccccuuccugggcgucuacuaccacaagaacaacaagagcuggauggaaagcgaguuccggguguacagcagcgccaacaacugcaccuucgaguacgugucccagccuuuccugauggaccuggaaggcaagcagggcaacuucaagaaccugcgcgaguucguguucaagaacaucgacggcuacuucaaaaucuacagcaagcacaccccuaucaaccucgugcgggaucugccucagggcuucucugcucuggaaccccugguggaucugcccaucggcaucaacaucacccgguuucagacacugcuggcccugcacagaagcuaccugacaccuggcgauagcagcagcggauggacagcuggugccgccgcuuacuaugugggcuaccugcagccuagaaccuuccugcugaaguacaacgagaacggcaccaucaccgacgccguggauugugcucuggauccucugagcgagacaaagugcacccugaaguccuucaccguggaaaagggcaucuaccagaccagcaacuuccgggugcagcccaccgaauccaucgugcgguuccccaauaucaccaaucugugccccuucggcgagguguucaaugccaccagauucgccucuguguacgccuggaaccggaagcggaucagcaauugcguggccgacuacuccgugcuguacaacuccgccagcuucagcaccuucaagugcuacggcguguccccuaccaagcugaacgaccugugcuucacaaacguguacgccgacagcuucgugauccggggagaugaagugcggcagauugccccuggacagacaggcaagaucgccgacuacaacuacaagcugcccgacgacuucaccggcugugugauugccuggaacagcaacaaccuggacuccaaagucggcggcaacuacaauuaccuguaccggcuguuccggaaguccaaucugaagcccuucgagcgggacaucagcaccgaaaucuaucaggccggcagcaccccuugcaacggcguggaaggcuucaacugcuacuucccacugcaguccuacggcuuucagcccacauacggcgugggcuaucagcccuacagagugguggugcugagcuucgaacugcugcaugcuccugccacagugugcggcccuaagaaaagcaccaaucucgugaagaacaaaugcgugaacuucaacuucaacggccugaccggcaccggcgugcugacagagagcaacaagaaguuccugccauuccagcaguuuggccgggauaucgccgauaccacagacgccguuagagauccccagacacuggaaauccuggacaucaccccaugcagcuucggcggagugucugugaucaccccuggcaccaacaccagcaaucagguggcagugcuguaccagggcgugaacuguaccgaagugcccguggccauucacgccgaucagcugacaccuacauggcggguguacuccaccggcagcaauguguuucagaccagagccggcugucugaucggagccgagcacgugaacaauagcuacgagugcgacauccccaucggcgcuggcaucugugccagcuaccagacacagacaaacagccccagacgggcuagaagcguggccagccagagcaucauugccuacacaaugucucugggcgccgagaacagcguggccuacuccaacaacucuaucgcuauccccaccaacuucaccaucagcgugaccaccgagauccugccuguguccaugaccaagaccagcguggacugcaccauguacaucugcggcgauuccaccgagugcuccaaccugcugcugcaguacggcagcuucugcacccagcugaauagagcccugacagggaucgccguggaacaggacaagaacacccaagagguguucgcccaagugaagcaaaucuacaagaccccuccuaucaaggacuucggcggcuucaauuucagccagauucugcccgauccuagcaagcccagcaagcggagcuucaucgaggaccugcuguucaacaaagugacacuggccgacgccggcuucaucaagcaguauggcgauugucugggcgacauugccgccagggaucugauuugcgcccagaaguuuaacggacugacagugcugccuccucugcugaccgaugagaugaucgcccaguacacaucugcccugcuggccggcacaaucacaagcggcuggacauuuggagcuggcgccgcucugcagauccccuuugcuaugcagauggccuaccgguucaacggcaucggagugacccagaaugugcuguacgagaaccagaagcugaucgccaaccaguucaacagcgccaucggcaagauccaggacagccugagcagcacagcaagcgcccugggaaagcugcaggacguggucaaccagaaugcccaggcacugaacacccuggucaagcagcuguccuccaacuucggcgccaucagcucugugcugaacgauauccugagcagacuggacccuccugaggccgaggugcagaucgacagacugaucacaggcagacugcagagccuccagacauacgugacccagcagcugaucagagccgccgagauuagagccucugccaaucuggccgccaccaagaugucugagugugugcugggccagagcaagagaguggacuuuugcggcaagggcuaccaccugaugagcuucccucagucugccccucacggcgugguguuucugcacgugacauaugugcccgcucaagagaagaauuucaccaccgcuccagccaucugccacgacggcaaagcccacuuuccuagagaaggcguguucguguccaacggcacccauugguucgugacacagcggaacuucuacgagccccagaucaucaccaccgacaacaccuucgugucuggcaacugcgacguugugaucggcauugugaacaauaccguguacgacccucugcagcccgagcuggacagcuucaaagaggaacuggacaaguacuuuaagaaccacacaagccccgacguggaccugggcgauaucagcggaaucaaugccagcgucgugaacauccagaaagagaucgaccggcugaacgagguggccaagaaucugaacgagagccugaucgaccugcaagaacuggggaaguacgagcaguacaucaaguggcccugguacaucuggcugggcuuuaucgccggacugauugccaucgugauggucacaaucaugcuguguugcaugaccagcugcuguagcugccugaagggcuguuguagcuguggcagcugcugcaaguucgacgaggacgauucugagcccgugcugaagggcgugaaacugcacuacaccugaggacuaguuauaagacugacuagcccgaugggccucccaacgggcccuccuccccuccuugcaccgagagaucucaaaggcucuuuucagagccaccaaaaaaaaaaaaaaaaaaaaaaaaaaaaaaaaaaaaaaaaaaaaaaaaaaaaaaaaaaaaaaaaaaaaaaaaaaaaaaaaaaaaaaaaaaaaaaaaaaaaa

SEQ ID NO: 24695 - RNA, 4029 nt, Artificial Sequence
  SARS-CoV-2/Wuhan/WIV05/2019__EPI_ISL_402128 spike protein mRNA gc mod (1-1273)(K986P_V987P_H69del_V70del_D614G)
aggagaaagcuuaccauguucguguuucuggugcugcugccccugguguccagccagugugugaaccugaccaccagaacacagcugccuccagccuacaccaacagcuucaccagaggcguguacuaccccgacaagguguucagauccagcgugcugcacucuacccaggaccuguuccugccuuucuucagcaacgugaccugguuccacgccaucuccggcaccaauggcaccaagagauucgacaaccccgugcugcccuucaacgacgggguguacuuugccagcaccgagaaguccaacaucaucagaggcuggaucuucggcaccacacuggacagcaagacccagagccugcugaucgugaacaacgccaccaacguggucaucaaagugugcgaguuccaguucugcaacgaccccuuccugggcgucuacuaccacaagaacaacaagagcuggauggaaagcgaguuccggguguacagcagcgccaacaacugcaccuucgaguacgugucccagccuuuccugauggaccuggaaggcaagcagggcaacuucaagaaccugcgcgaguucguguucaagaacaucgacggcuacuucaaaaucuacagcaagcacaccccuaucaaccucgugcgggaucugccucagggcuucucugcucuggaaccccugguggaucugcccaucggcaucaacaucacccgguuucagacacugcuggcccugcacagaagcuaccugacaccuggcgauagcagcagcggauggacagcuggugccgccgcuuacuaugugggcuaccugcagccuagaaccuuccugcugaaguacaacgagaacggcaccaucaccgacgccguggauugugcucuggauccucugagcgagacaaagugcacccugaaguccuucaccguggaaaagggcaucuaccagaccagcaacuuccgggugcagcccaccgaauccaucgugcgguuccccaauaucaccaaucugugccccuucggcgagguguucaaugccaccagauucgccucuguguacgccuggaaccggaagcggaucagcaauugcguggccgacuacuccgugcuguacaacuccgccagcuucagcaccuucaagugcuacggcguguccccuaccaagcugaacgaccugugcuucacaaacguguacgccgacagcuucgugauccggggagaugaagugcggcagauugccccuggacagacaggcaagaucgccgacuacaacuacaagcugcccgacgacuucaccggcugugugauugccuggaacagcaacaaccuggacuccaaagucggcggcaacuacaauuaccuguaccggcuguuccggaaguccaaucugaagcccuucgagcgggacaucagcaccgaaaucuaucaggccggcagcaccccuugcaacggcguggaaggcuucaacugcuacuucccacugcaguccuacggcuuucagcccacaaauggcgugggcuaucagcccuacagagugguggugcugagcuucgaacugcugcaugcuccugccacagugugcggcccuaagaaaagcaccaaucucgugaagaacaaaugcgugaacuucaacuucaacggccugaccggcaccggcgugcugacagagagcaacaagaaguuccugccauuccagcaguuuggccgggauaucgccgauaccacagacgccguuagagauccccagacacuggaaauccuggacaucaccccaugcagcuucggcggagugucugugaucaccccuggcaccaacaccagcaaucagguggcagugcuguaccagggcgugaacuguaccgaagugcccguggccauucacgccgaucagcugacaccuacauggcggguguacuccaccggcagcaauguguuucagaccagagccggcugucugaucggagccgagcacgugaacaauagcuacgagugcgacauccccaucggcgcuggcaucugugccagcuaccagacacagacaaacagccccagacgggcuagaagcguggccagccagagcaucauugccuacacaaugucucugggcgccgagaacagcguggccuacuccaacaacucuaucgcuauccccaccaacuucaccaucagcgugaccaccgagauccugccuguguccaugaccaagaccagcguggacugcaccauguacaucugcggcgauuccaccgagugcuccaaccugcugcugcaguacggcagcuucugcacccagcugaauagagcccugacagggaucgccguggaacaggacaagaacacccaagagguguucgcccaagugaagcaaaucuacaagaccccuccuaucaaggacuucggcggcuucaauuucagccagauucugcccgauccuagcaagcccagcaagcggagcuucaucgaggaccugcuguucaacaaagugacacuggccgacgccggcuucaucaagcaguauggcgauugucugggcgacauugccgccagggaucugauuugcgcccagaaguuuaacggacugacagugcugccuccucugcugaccgaugagaugaucgcccaguacacaucugcccugcuggccggcacaaucacaagcggcuggacauuuggagcuggcgccgcucugcagauccccuuugcuaugcagauggccuaccgguucaacggcaucggagugacccagaaugugcuguacgagaaccagaagcugaucgccaaccaguucaacagcgccaucggcaagauccaggacagccugagcagcacagcaagcgcccugggaaagcugcaggacguggucaaccagaaugcccaggcacugaacacccuggucaagcagcuguccuccaacuucggcgccaucagcucugugcugaacgauauccugagcagacuggacccuccugaggccgaggugcagaucgacagacugaucacaggcagacugcagagccuccagacauacgugacccagcagcugaucagagccgccgagauuagagccucugccaaucuggccgccaccaagaugucugagugugugcugggccagagcaagagaguggacuuuugcggcaagggcuaccaccugaugagcuucccucagucugccccucacggcgugguguuucugcacgugacauaugugcccgcucaagagaagaauuucaccaccgcuccagccaucugccacgacggcaaagcccacuuuccuagagaaggcguguucguguccaacggcacccauugguucgugacacagcggaacuucuacgagccccagaucaucaccaccgacaacaccuucgugucuggcaacugcgacguugugaucggcauugugaacaauaccguguacgacccucugcagcccgagcuggacagcuucaaagaggaacuggacaaguacuuuaagaaccacacaagccccgacguggaccugggcgauaucagcggaaucaaugccagcgucgugaacauccagaaagagaucgaccggcugaacgagguggccaagaaucugaacgagagccugaucgaccugcaagaacuggggaaguacgagcaguacaucaaguggcccugguacaucuggcugggcuuuaucgccggacugauugccaucgugauggucacaaucaugcuguguugcaugaccagcugcuguagcugccugaagggcuguuguagcuguggcagcugcugcaaguucgacgaggacgauucugagcccgugcugaagggcgugaaacugcacuacaccugaggacuaguuauaagacugacuagcccgaugggccucccaacgggcccuccuccccuccuugcaccgagagaucucaaaggcucuuuucagagccaccaaaaaaaaaaaaaaaaaaaaaaaaaaaaaaaaaaaaaaaaaaaaaaaaaaaaaaaaaaaaaaaaaaaaaaaaaaaaaaaaaaaaaaaaaaaaaaaaaaaaa

SEQ ID NO: 24696 - RNA, 4035 nt, Artificial Sequence
  SARS-CoV-2/Wuhan/WIV05/2019__EPI_ISL_402128 spike protein mRNA gc mod (1-1273)(K986P_V987P_Y453F_D614G)
aggagaaagcuuaccauguucguguuucuggugcugcugccccugguguccagccagugugugaaccugaccaccagaacacagcugccuccagccuacaccaacagcuucaccagaggcguguacuaccccgacaagguguucagauccagcgugcugcacucuacccaggaccuguuccugccuuucuucagcaacgugaccugguuccacgccauccacguguccggcaccaauggcaccaagagauucgacaaccccgugcugcccuucaacgacgggguguacuuugccagcaccgagaaguccaacaucaucagaggcuggaucuucggcaccacacuggacagcaagacccagagccugcugaucgugaacaacgccaccaacguggucaucaaagugugcgaguuccaguucugcaacgaccccuuccugggcgucuacuaccacaagaacaacaagagcuggauggaaagcgaguuccggguguacagcagcgccaacaacugcaccuucgaguacgugucccagccuuuccugauggaccuggaaggcaagcagggcaacuucaagaaccugcgcgaguucguguucaagaacaucgacggcuacuucaaaaucuacagcaagcacaccccuaucaaccucgugcgggaucugccucagggcuucucugcucuggaaccccugguggaucugcccaucggcaucaacaucacccgguuucagacacugcuggcccugcacagaagcuaccugacaccuggcgauagcagcagcggauggacagcuggugccgccgcuuacuaugugggcuaccugcagccuagaaccuuccugcugaaguacaacgagaacggcaccaucaccgacgccguggauugugcucuggauccucugagcgagacaaagugcacccugaaguccuucaccguggaaaagggcaucuaccagaccagcaacuuccgggugcagcccaccgaauccaucgugcgguuccccaauaucaccaaucugugccccuucggcgagguguucaaugccaccagauucgccucuguguacgccuggaaccggaagcggaucagcaauugcguggccgacuacuccgugcuguacaacuccgccagcuucagcaccuucaagugcuacggcguguccccuaccaagcugaacgaccugugcuucacaaacguguacgccgacagcuucgugauccggggagaugaagugcggcagauugccccuggacagacaggcaagaucgccgacuacaacuacaagcugcccgacgacuucaccggcugugugauugccuggaacagcaacaaccuggacuccaaagucggcggcaacuacaauuaccuguuccggcuguuccggaaguccaaucugaagcccuucgagcgggacaucagcaccgaaaucuaucaggccggcagcaccccuugcaacggcguggaaggcuucaacugcuacuucccacugcaguccuacggcuuucagcccacaaauggcgugggcuaucagcccuacagagugguggugcugagcuucgaacugcugcaugcuccugccacagugugcggcccuaagaaaagcaccaaucucgugaagaacaaaugcgugaacuucaacuucaacggccugaccggcaccggcgugcugacagagagcaacaagaaguuccugccauuccagcaguuuggccgggauaucgccgauaccacagacgccguuagagauccccagacacuggaaauccuggacaucaccccaugcagcuucggcggagugucugugaucaccccuggcaccaacaccagcaaucagguggcagugcuguaccagggcgugaacuguaccgaagugcccguggccauucacgccgaucagcugacaccuacauggcggguguacuccaccggcagcaauguguuucagaccagagccggcugucugaucggagccgagcacgugaacaauagcuacgagugcgacauccccaucggcgcuggcaucugugccagcuaccagacacagacaaacagccccagacgggcuagaagcguggccagccagagcaucauugccuacacaaugucucugggcgccgagaacagcguggccuacuccaacaacucuaucgcuauccccaccaacuucaccaucagcgugaccaccgagauccugccuguguccaugaccaagaccagcguggacugcaccauguacaucugcggcgauuccaccgagugcuccaaccugcugcugcaguacggcagcuucugcacccagcugaauagagcccugacagggaucgccguggaacaggacaagaacacccaagagguguucgcccaagugaagcaaaucuacaagaccccuccuaucaaggacuucggcggcuucaauuucagccagauucugcccgauccuagcaagcccagcaagcggagcuucaucgaggaccugcuguucaacaaagugacacuggccgacgccggcuucaucaagcaguauggcgauugucugggcgacauugccgccagggaucugauuugcgcccagaaguuuaacggacugacagugcugccuccucugcugaccgaugagaugaucgcccaguacacaucugcccugcuggccggcacaaucacaagcggcuggacauuuggagcuggcgccgcucugcagauccccuuugcuaugcagauggccuaccgguucaacggcaucggagugacccagaaugugcuguacgagaaccagaagcugaucgccaaccaguucaacagcgccaucggcaagauccaggacagccugagcagcacagcaagcgcccugggaaagcugcaggacguggucaaccagaaugcccaggcacugaacacccuggucaagcagcuguccuccaacuucggcgccaucagcucugugcugaacgauauccugagcagacuggacccuccugaggccgaggugcagaucgacagacugaucacaggcagacugcagagccuccagacauacgugacccagcagcugaucagagccgccgagauuagagccucugccaaucuggccgccaccaagaugucugagugugugcugggccagagcaagagaguggacuuuugcggcaagggcuaccaccugaugagcuucccucagucugccccucacggcgugguguuucugcacgugacauaugugcccgcucaagagaagaauuucaccaccgcuccagccaucugccacgacggcaaagcccacuuuccuagagaaggcguguucguguccaacggcacccauugguucgugacacagcggaacuucuacgagccccagaucaucaccaccgacaacaccuucgugucuggcaacugcgacguugugaucggcauugugaacaauaccguguacgacccucugcagcccgagcuggacagcuucaaagaggaacuggacaaguacuuuaagaaccacacaagccccgacguggaccugggcgauaucagcggaaucaaugccagcgucgugaacauccagaaagagaucgaccggcugaacgagguggccaagaaucugaacgagagccugaucgaccugcaagaacuggggaaguacgagcaguacaucaaguggcccugguacaucuggcugggcuuuaucgccggacugauugccaucgugauggucacaaucaugcuguguugcaugaccagcugcuguagcugccugaagggcuguuguagcuguggcagcugcugcaaguucgacgaggacgauucugagcccgugcugaagggcgugaaacugcacuacaccugaggacuaguuauaagacugacuagcccgaugggccucccaacgggcccuccuccccuccuugcaccgagagaucucaaaggcucuuuucagagccaccaaaaaaaaaaaaaaaaaaaaaaaaaaaaaaaaaaaaaaaaaaaaaaaaaaaaaaaaaaaaaaaaaaaaaaaaaaaaaaaaaaaaaaaaaaaaaaaaaaaaa

SEQ ID NO: 24697 - RNA, 4035 nt, Artificial Sequence
  SARS-CoV-2/Wuhan/WIV05/2019__EPI_ISL_402128 spike protein mRNA gc mod (1-1273)(K986P_V987P_D614G_I692V)
aggagaaagcuuaccauguucguguuucuggugcugcugccccugguguccagccagugugugaaccugaccaccagaacacagcugccuccagccuacaccaacagcuucaccagaggcguguacuaccccgacaagguguucagauccagcgugcugcacucuacccaggaccuguuccugccuuucuucagcaacgugaccugguuccacgccauccacguguccggcaccaauggcaccaagagauucgacaaccccgugcugcccuucaacgacgggguguacuuugccagcaccgagaaguccaacaucaucagaggcuggaucuucggcaccacacuggacagcaagacccagagccugcugaucgugaacaacgccaccaacguggucaucaaagugugcgaguuccaguucugcaacgaccccuuccugggcgucuacuaccacaagaacaacaagagcuggauggaaagcgaguuccggguguacagcagcgccaacaacugcaccuucgaguacgugucccagccuuuccugauggaccuggaaggcaagcagggcaacuucaagaaccugcgcgaguucguguucaagaacaucgacggcuacuucaaaaucuacagcaagcacaccccuaucaaccucgugcgggaucugccucagggcuucucugcucuggaaccccugguggaucugcccaucggcaucaacaucacccgguuucagacacugcuggcccugcacagaagcuaccugacaccuggcgauagcagcagcggauggacagcuggugccgccgcuuacuaugugggcuaccugcagccuagaaccuuccugcugaaguacaacgagaacggcaccaucaccgacgccguggauugugcucuggauccucugagcgagacaaagugcacccugaaguccuucaccguggaaaagggcaucuaccagaccagcaacuuccgggugcagcccaccgaauccaucgugcgguuccccaauaucaccaaucugugccccuucggcgagguguucaaugccaccagauucgccucuguguacgccuggaaccggaagcggaucagcaauugcguggccgacuacuccgugcuguacaacuccgccagcuucagcaccuucaagugcuacggcguguccccuaccaagcugaacgaccugugcuucacaaacguguacgccgacagcuucgugauccggggagaugaagugcggcagauugccccuggacagacaggcaagaucgccgacuacaacuacaagcugcccgacgacuucaccggcugugugauugccuggaacagcaacaaccuggacuccaaagucggcggcaacuacaauuaccuguaccggcuguuccggaaguccaaucugaagcccuucgagcgggacaucagcaccgaaaucuaucaggccggcagcaccccuugcaacggcguggaaggcuucaacugcuacuucccacugcaguccuacggcuuucagcccacaaauggcgugggcuaucagcccuacagagugguggugcugagcuucgaacugcugcaugcuccugccacagugugcggcccuaagaaaagcaccaaucucgugaagaacaaaugcgugaacuucaacuucaacggccugaccggcaccggcgugcugacagagagcaacaagaaguuccugccauuccagcaguuuggccgggauaucgccgauaccacagacgccguuagagauccccagacacuggaaauccuggacaucaccccaugcagcuucggcggagugucugugaucaccccuggcaccaacaccagcaaucagguggcagugcuguaccagggcgugaacuguaccgaagugcccguggccauucacgccgaucagcugacaccuacauggcggguguacuccaccggcagcaauguguuucagaccagagccggcugucugaucggagccgagcacgugaacaauagcuacgagugcgacauccccaucggcgcuggcaucugugccagcuaccagacacagacaaacagccccagacgggcuagaagcguggccagccagagcgugauugccuacacaaugucucugggcgccgagaacagcguggccuacuccaacaacucuaucgcuauccccaccaacuucaccaucagcgugaccaccgagauccugccuguguccaugaccaagaccagcguggacugcaccauguacaucugcggcgauuccaccgagugcuccaaccugcugcugcaguacggcagcuucugcacccagcugaauagagcccugacagggaucgccguggaacaggacaagaacacccaagagguguucgcccaagugaagcaaaucuacaagaccccuccuaucaaggacuucggcggcuucaauuucagccagauucugcccgauccuagcaagcccagcaagcggagcuucaucgaggaccugcuguucaacaaagugacacuggccgacgccggcuucaucaagcaguauggcgauugucugggcgacauugccgccagggaucugauuugcgcccagaaguuuaacggacugacagugcugccuccucugcugaccgaugagaugaucgcccaguacacaucugcccugcuggccggcacaaucacaagcggcuggacauuuggagcuggcgccgcucugcagauccccuuugcuaugcagauggccuaccgguucaacggcaucggagugacccagaaugugcuguacgagaaccagaagcugaucgccaaccaguucaacagcgccaucggcaagauccaggacagccugagcagcacagcaagcgcccugggaaagcugcaggacguggucaaccagaaugcccaggcacugaacacccuggucaagcagcuguccuccaacuucggcgccaucagcucugugcugaacgauauccugagcagacuggacccuccugaggccgaggugcagaucgacagacugaucacaggcagacugcagagccuccagacauacgugacccagcagcugaucagagccgccgagauuagagccucugccaaucuggccgccaccaagaugucugagugugugcugggccagagcaagagaguggacuuuugcggcaagggcuaccaccugaugagcuucccucagucugccccucacggcgugguguuucugcacgugacauaugugcccgcucaagagaagaauuucaccaccgcuccagccaucugccacgacggcaaagcccacuuuccuagagaaggcguguucguguccaacggcacccauugguucgugacacagcggaacuucuacgagccccagaucaucaccaccgacaacaccuucgugucuggcaacugcgacguugugaucggcauugugaacaauaccguguacgacccucugcagcccgagcuggacagcuucaaagaggaacuggacaaguacuuuaagaaccacacaagccccgacguggaccugggcgauaucagcggaaucaaugccagcgucgugaacauccagaaagagaucgaccggcugaacgagguggccaagaaucugaacgagagccugaucgaccugcaagaacuggggaaguacgagcaguacaucaaguggcccugguacaucuggcugggcuuuaucgccggacugauugccaucgugauggucacaaucaugcuguguugcaugaccagcugcuguagcugccugaagggcuguuguagcuguggcagcugcugcaaguucgacgaggacgauucugagcccgugcugaagggcgugaaacugcacuacaccugaggacuaguuauaagacugacuagcccgaugggccucccaacgggcccuccuccccuccuugcaccgagagaucucaaaggcucuuuucagagccaccaaaaaaaaaaaaaaaaaaaaaaaaaaaaaaaaaaaaaaaaaaaaaaaaaaaaaaaaaaaaaaaaaaaaaaaaaaaaaaaaaaaaaaaaaaaaaaaaaaaaa

SEQ ID NO: 24698 - RNA, 4035 nt, Artificial Sequence
  SARS-CoV-2/Wuhan/WIV05/2019__EPI_ISL_402128 spike protein mRNA gc mod (1-1273)(K986P_V987P_D614G_M1229I)
aggagaaagcuuaccauguucguguuucuggugcugcugccccugguguccagccagugugugaaccugaccaccagaacacagcugccuccagccuacaccaacagcuucaccagaggcguguacuaccccgacaagguguucagauccagcgugcugcacucuacccaggaccuguuccugccuuucuucagcaacgugaccugguuccacgccauccacguguccggcaccaauggcaccaagagauucgacaaccccgugcugcccuucaacgacgggguguacuuugccagcaccgagaaguccaacaucaucagaggcuggaucuucggcaccacacuggacagcaagacccagagccugcugaucgugaacaacgccaccaacguggucaucaaagugugcgaguuccaguucugcaacgaccccuuccugggcgucuacuaccacaagaacaacaagagcuggauggaaagcgaguuccggguguacagcagcgccaacaacugcaccuucgaguacgugucccagccuuuccugauggaccuggaaggcaagcagggcaacuucaagaaccugcgcgaguucguguucaagaacaucgacggcuacuucaaaaucuacagcaagcacaccccuaucaaccucgugcgggaucugccucagggcuucucugcucuggaaccccugguggaucugcccaucggcaucaacaucacccgguuucagacacugcuggcccugcacagaagcuaccugacaccuggcgauagcagcagcggauggacagcuggugccgccgcuuacuaugugggcuaccugcagccuagaaccuuccugcugaaguacaacgagaacggcaccaucaccgacgccguggauugugcucuggauccucugagcgagacaaagugcacccugaaguccuucaccguggaaaagggcaucuaccagaccagcaacuuccgggugcagcccaccgaauccaucgugcgguuccccaauaucaccaaucugugccccuucggcgagguguucaaugccaccagauucgccucuguguacgccuggaaccggaagcggaucagcaauugcguggccgacuacuccgugcuguacaacuccgccagcuucagcaccuucaagugcuacggcguguccccuaccaagcugaacgaccugugcuucacaaacguguacgccgacagcuucgugauccggggagaugaagugcggcagauugccccuggacagacaggcaagaucgccgacuacaacuacaagcugcccgacgacuucaccggcugugugauugccuggaacagcaacaaccuggacuccaaagucggcggcaacuacaauuaccuguaccggcuguuccggaaguccaaucugaagcccuucgagcgggacaucagcaccgaaaucuaucaggccggcagcaccccuugcaacggcguggaaggcuucaacugcuacuucccacugcaguccuacggcuuucagcccacaaauggcgugggcuaucagcccuacagagugguggugcugagcuucgaacugcugcaugcuccugccacagugugcggcccuaagaaaagcaccaaucucgugaagaacaaaugcgugaacuucaacuucaacggccugaccggcaccggcgugcugacagagagcaacaagaaguuccugccauuccagcaguuuggccgggauaucgccgauaccacagacgccguuagagauccccagacacuggaaauccuggacaucaccccaugcagcuucggcggagugucugugaucaccccuggcaccaacaccagcaaucagguggcagugcuguaccagggcgugaacuguaccgaagugcccguggccauucacgccgaucagcugacaccuacauggcggguguacuccaccggcagcaauguguuucagaccagagccggcugucugaucggagccgagcacgugaacaauagcuacgagugcgacauccccaucggcgcuggcaucugugccagcuaccagacacagacaaacagccccagacgggcuagaagcguggccagccagagcaucauugccuacacaaugucucugggcgccgagaacagcguggccuacuccaacaacucuaucgcuauccccaccaacuucaccaucagcgugaccaccgagauccugccuguguccaugaccaagaccagcguggacugcaccauguacaucugcggcgauuccaccgagugcuccaaccugcugcugcaguacggcagcuucugcacccagcugaauagagcccugacagggaucgccguggaacaggacaagaacacccaagagguguucgcccaagugaagcaaaucuacaagaccccuccuaucaaggacuucggcggcuucaauuucagccagauucugcccgauccuagcaagcccagcaagcggagcuucaucgaggaccugcuguucaacaaagugacacuggccgacgccggcuucaucaagcaguauggcgauugucugggcgacauugccgccagggaucugauuugcgcccagaaguuuaacggacugacagugcugccuccucugcugaccgaugagaugaucgcccaguacacaucugcccugcuggccggcacaaucacaagcggcuggacauuuggagcuggcgccgcucugcagauccccuuugcuaugcagauggccuaccgguucaacggcaucggagugacccagaaugugcuguacgagaaccagaagcugaucgccaaccaguucaacagcgccaucggcaagauccaggacagccugagcagcacagcaagcgcccugggaaagcugcaggacguggucaaccagaaugcccaggcacugaacacccuggucaagcagcuguccuccaacuucggcgccaucagcucugugcugaacgauauccugagcagacuggacccuccugaggccgaggugcagaucgacagacugaucacaggcagacugcagagccuccagacauacgugacccagcagcugaucagagccgccgagauuagagccucugccaaucuggccgccaccaagaugucugagugugugcugggccagagcaagagaguggacuuuugcggcaagggcuaccaccugaugagcuucccucagucugccccucacggcgugguguuucugcacgugacauaugugcccgcucaagagaagaauuucaccaccgcuccagccaucugccacgacggcaaagcccacuuuccuagagaaggcguguucguguccaacggcacccauugguucgugacacagcggaacuucuacgagccccagaucaucaccaccgacaacaccuucgugucuggcaacugcgacguugugaucggcauugugaacaauaccguguacgacccucugcagcccgagcuggacagcuucaaagaggaacuggacaaguacuuuaagaaccacacaagccccgacguggaccugggcgauaucagcggaaucaaugccagcgucgugaacauccagaaagagaucgaccggcugaacgagguggccaagaaucugaacgagagccugaucgaccugcaagaacuggggaaguacgagcaguacaucaaguggcccugguacaucuggcugggcuuuaucgccggacugauugccaucgugaucgucacaaucaugcuguguugcaugaccagcugcuguagcugccugaagggcuguuguagcuguggcagcugcugcaaguucgacgaggacgauucugagcccgugcugaagggcgugaaacugcacuacaccugaggacuaguuauaagacugacuagcccgaugggccucccaacgggcccuccuccccuccuugcaccgagagaucucaaaggcucuuuucagagccaccaaaaaaaaaaaaaaaaaaaaaaaaaaaaaaaaaaaaaaaaaaaaaaaaaaaaaaaaaaaaaaaaaaaaaaaaaaaaaaaaaaaaaaaaaaaaaaaaaaaaa

SEQ ID NO: 24699 - RNA, 4029 nt, Artificial Sequence
  SARS-CoV-2/Wuhan/WIV05/2019__EPI_ISL_402128 spike protein mRNA gc mod (1-1273)(K986P_V987P_H69del_V70del_A222V_Y453F_S477N_D614G_I692V)
aggagaaagcuuaccauguucguguuucuggugcugcugccccugguguccagccagugugugaaccugaccaccagaacacagcugccuccagccuacaccaacagcuucaccagaggcguguacuaccccgacaagguguucagauccagcgugcugcacucuacccaggaccuguuccugccuuucuucagcaacgugaccugguuccacgccaucuccggcaccaauggcaccaagagauucgacaaccccgugcugcccuucaacgacgggguguacuuugccagcaccgagaaguccaacaucaucagaggcuggaucuucggcaccacacuggacagcaagacccagagccugcugaucgugaacaacgccaccaacguggucaucaaagugugcgaguuccaguucugcaacgaccccuuccugggcgucuacuaccacaagaacaacaagagcuggauggaaagcgaguuccggguguacagcagcgccaacaacugcaccuucgaguacgugucccagccuuuccugauggaccuggaaggcaagcagggcaacuucaagaaccugcgcgaguucguguucaagaacaucgacggcuacuucaaaaucuacagcaagcacaccccuaucaaccucgugcgggaucugccucagggcuucucugugcuggaaccccugguggaucugcccaucggcaucaacaucacccgguuucagacacugcuggcccugcacagaagcuaccugacaccuggcgauagcagcagcggauggacagcuggugccgccgcuuacuaugugggcuaccugcagccuagaaccuuccugcugaaguacaacgagaacggcaccaucaccgacgccguggauugugcucuggauccucugagcgagacaaagugcacccugaaguccuucaccguggaaaagggcaucuaccagaccagcaacuuccgggugcagcccaccgaauccaucgugcgguuccccaauaucaccaaucugugccccuucggcgagguguucaaugccaccagauucgccucuguguacgccuggaaccggaagcggaucagcaauugcguggccgacuacuccgugcuguacaacuccgccagcuucagcaccuucaagugcuacggcguguccccuaccaagcugaacgaccugugcuucacaaacguguacgccgacagcuucgugauccggggagaugaagugcggcagauugccccuggacagacaggcaagaucgccgacuacaacuacaagcugcccgacgacuucaccggcugugugauugccuggaacagcaacaaccuggacuccaaagucggcggcaacuacaauuaccuguuccggcuguuccggaaguccaaucugaagcccuucgagcgggacaucagcaccgaaaucuaucaggccggcaacaccccuugcaacggcguggaaggcuucaacugcuacuucccacugcaguccuacggcuuucagcccacaaauggcgugggcuaucagcccuacagagugguggugcugagcuucgaacugcugcaugcuccugccacagugugcggcccuaagaaaagcaccaaucucgugaagaacaaaugcgugaacuucaacuucaacggccugaccggcaccggcgugcugacagagagcaacaagaaguuccugccauuccagcaguuuggccgggauaucgccgauaccacagacgccguuagagauccccagacacuggaaauccuggacaucaccccaugcagcuucggcggagugucugugaucaccccuggcaccaacaccagcaaucagguggcagugcuguaccagggcgugaacuguaccgaagugcccguggccauucacgccgaucagcugacaccuacauggcggguguacuccaccggcagcaauguguuucagaccagagccggcugucugaucggagccgagcacgugaacaauagcuacgagugcgacauccccaucggcgcuggcaucugugccagcuaccagacacagacaaacagccccagacgggcuagaagcguggccagccagagcgugauugccuacacaaugucucugggcgccgagaacagcguggccuacuccaacaacucuaucgcuauccccaccaacuucaccaucagcgugaccaccgagauccugccuguguccaugaccaagaccagcguggacugcaccauguacaucugcggcgauuccaccgagugcuccaaccugcugcugcaguacggcagcuucugcacccagcugaauagagcccugacagggaucgccguggaacaggacaagaacacccaagagguguucgcccaagugaagcaaaucuacaagaccccuccuaucaaggacuucggcggcuucaauuucagccagauucugcccgauccuagcaagcccagcaagcggagcuucaucgaggaccugcuguucaacaaagugacacuggccgacgccggcuucaucaagcaguauggcgauugucugggcgacauugccgccagggaucugauuugcgcccagaaguuuaacggacugacagugcugccuccucugcugaccgaugagaugaucgcccaguacacaucugcccugcuggccggcacaaucacaagcggcuggacauuuggagcuggcgccgcucugcagauccccuuugcuaugcagauggccuaccgguucaacggcaucggagugacccagaaugugcuguacgagaaccagaagcugaucgccaaccaguucaacagcgccaucggcaagauccaggacagccugagcagcacagcaagcgcccugggaaagcugcaggacguggucaaccagaaugcccaggcacugaacacccuggucaagcagcuguccuccaacuucggcgccaucagcucugugcugaacgauauccugagcagacuggacccuccugaggccgaggugcagaucgacagacugaucacaggcagacugcagagccuccagacauacgugacccagcagcugaucagagccgccgagauuagagccucugccaaucuggccgccaccaagaugucugagugugugcugggccagagcaagagaguggacuuuugcggcaagggcuaccaccugaugagcuucccucagucugccccucacggcgugguguuucugcacgugacauaugugcccgcucaagagaagaauuucaccaccgcuccagccaucugccacgacggcaaagcccacuuuccuagagaaggcguguucguguccaacggcacccauugguucgugacacagcggaacuucuacgagccccagaucaucaccaccgacaacaccuucgugucuggcaacugcgacguugugaucggcauugugaacaauaccguguacgacccucugcagcccgagcuggacagcuucaaagaggaacuggacaaguacuuuaagaaccacacaagccccgacguggaccugggcgauaucagcggaaucaaugccagcgucgugaacauccagaaagagaucgaccggcugaacgagguggccaagaaucugaacgagagccugaucgaccugcaagaacuggggaaguacgagcaguacaucaaguggcccugguacaucuggcugggcuuuaucgccggacugauugccaucgugauggucacaaucaugcuguguugcaugaccagcugcuguagcugccugaagggcuguuguagcuguggcagcugcugcaaguucgacgaggacgauucugagcccgugcugaagggcgugaaacugcacuacaccugaggacuaguuauaagacugacuagcccgaugggccucccaacgggcccuccuccccuccuugcaccgagagaucucaaaggcucuuuucagagccaccaaaaaaaaaaaaaaaaaaaaaaaaaaaaaaaaaaaaaaaaaaaaaaaaaaaaaaaaaaaaaaaaaaaaaaaaaaaaaaaaaaaaaaaaaaaaaaaaaaaaa

SEQ ID NO: 24700 - RNA, 4029 nt, Artificial Sequence
  SARS-CoV-2/Wuhan/WIV05/2019__EPI_ISL_402128 spike protein mRNA gc mod (1-1273)(K986P_V987P_H69del_V70del_Y453F_D614G_I692V_M1229I)
aggagaaagcuuaccauguucguguuucuggugcugcugccccugguguccagccagugugugaaccugaccaccagaacacagcugccuccagccuacaccaacagcuucaccagaggcguguacuaccccgacaagguguucagauccagcgugcugcacucuacccaggaccuguuccugccuuucuucagcaacgugaccugguuccacgccaucuccggcaccaauggcaccaagagauucgacaaccccgugcugcccuucaacgacgggguguacuuugccagcaccgagaaguccaacaucaucagaggcuggaucuucggcaccacacuggacagcaagacccagagccugcugaucgugaacaacgccaccaacguggucaucaaagugugcgaguuccaguucugcaacgaccccuuccugggcgucuacuaccacaagaacaacaagagcuggauggaaagcgaguuccggguguacagcagcgccaacaacugcaccuucgaguacgugucccagccuuuccugauggaccuggaaggcaagcagggcaacuucaagaaccugcgcgaguucguguucaagaacaucgacggcuacuucaaaaucuacagcaagcacaccccuaucaaccucgugcgggaucugccucagggcuucucugcucuggaaccccugguggaucugcccaucggcaucaacaucacccgguuucagacacugcuggcccugcacagaagcuaccugacaccuggcgauagcagcagcggauggacagcuggugccgccgcuuacuaugugggcuaccugcagccuagaaccuuccugcugaaguacaacgagaacggcaccaucaccgacgccguggauugugcucuggauccucugagcgagacaaagugcacccugaaguccuucaccguggaaaagggcaucuaccagaccagcaacuuccgggugcagcccaccgaauccaucgugcgguuccccaauaucaccaaucugugccccuucggcgagguguucaaugccaccagauucgccucuguguacgccuggaaccggaagcggaucagcaauugcguggccgacuacuccgugcuguacaacuccgccagcuucagcaccuucaagugcuacggcguguccccuaccaagcugaacgaccugugcuucacaaacguguacgccgacagcuucgugauccggggagaugaagugcggcagauugccccuggacagacaggcaagaucgccgacuacaacuacaagcugcccgacgacuucaccggcugugugauugccuggaacagcaacaaccuggacuccaaagucggcggcaacuacaauuaccuguuccggcuguuccggaaguccaaucugaagcccuucgagcgggacaucagcaccgaaaucuaucaggccggcagcaccccuugcaacggcguggaaggcuucaacugcuacuucccacugcaguccuacggcuuucagcccacaaauggcgugggcuaucagcccuacagagugguggugcugagcuucgaacugcugcaugcuccugccacagugugcggcccuaagaaaagcaccaaucucgugaagaacaaaugcgugaacuucaacuucaacggccugaccggcaccggcgugcugacagagagcaacaagaaguuccugccauuccagcaguuuggccgggauaucgccgauaccacagacgccguuagagauccccagacacuggaaauccuggacaucaccccaugcagcuucggcggagugucugugaucaccccuggcaccaacaccagcaaucagguggcagugcuguaccagggcgugaacuguaccgaagugcccguggccauucacgccgaucagcugacaccuacauggcggguguacuccaccggcagcaauguguuucagaccagagccggcugucugaucggagccgagcacgugaacaauagcuacgagugcgacauccccaucggcgcuggcaucugugccagcuaccagacacagacaaacagccccagacgggcuagaagcguggccagccagagcgugauugccuacacaaugucucugggcgccgagaacagcguggccuacuccaacaacucuaucgcuauccccaccaacuucaccaucagcgugaccaccgagauccugccuguguccaugaccaagaccagcguggacugcaccauguacaucugcggcgauuccaccgagugcuccaaccugcugcugcaguacggcagcuucugcacccagcugaauagagcccugacagggaucgccguggaacaggacaagaacacccaagagguguucgcccaagugaagcaaaucuacaagaccccuccuaucaaggacuucggcggcuucaauuucagccagauucugcccgauccuagcaagcccagcaagcggagcuucaucgaggaccugcuguucaacaaagugacacuggccgacgccggcuucaucaagcaguauggcgauugucugggcgacauugccgccagggaucugauuugcgcccagaaguuuaacggacugacagugcugccuccucugcugaccgaugagaugaucgcccaguacacaucugcccugcuggccggcacaaucacaagcggcuggacauuuggagcuggcgccgcucugcagauccccuuugcuaugcagauggccuaccgguucaacggcaucggagugacccagaaugugcuguacgagaaccagaagcugaucgccaaccaguucaacagcgccaucggcaagauccaggacagccugagcagcacagcaagcgcccugggaaagcugcaggacguggucaaccagaaugcccaggcacugaacacccuggucaagcagcuguccuccaacuucggcgccaucagcucugugcugaacgauauccugagcagacuggacccuccugaggccgaggugcagaucgacagacugaucacaggcagacugcagagccuccagacauacgugacccagcagcugaucagagccgccgagauuagagccucugccaaucuggccgccaccaagaugucugagugugugcugggccagagcaagagaguggacuuuugcggcaagggcuaccaccugaugagcuucccucagucugccccucacggcgugguguuucugcacgugacauaugugcccgcucaagagaagaauuucaccaccgcuccagccaucugccacgacggcaaagcccacuuuccuagagaaggcguguucguguccaacggcacccauugguucgugacacagcggaacuucuacgagccccagaucaucaccaccgacaacaccuucgugucuggcaacugcgacguugugaucggcauugugaacaauaccguguacgacccucugcagcccgagcuggacagcuucaaagaggaacuggacaaguacuuuaagaaccacacaagccccgacguggaccugggcgauaucagcggaaucaaugccagcgucgugaacauccagaaagagaucgaccggcugaacgagguggccaagaaucugaacgagagccugaucgaccugcaagaacuggggaaguacgagcaguacaucaaguggcccugguacaucuggcugggcuuuaucgccggacugauugccaucgugaucgucacaaucaugcuguguugcaugaccagcugcuguagcugccugaagggcuguuguagcuguggcagcugcugcaaguucgacgaggacgauucugagcccgugcugaagggcgugaaacugcacuacaccugaggacuaguuauaagacugacuagcccgaugggccucccaacgggcccuccuccccuccuugcaccgagagaucucaaaggcucuuuucagagccaccaaaaaaaaaaaaaaaaaaaaaaaaaaaaaaaaaaaaaaaaaaaaaaaaaaaaaaaaaaaaaaaaaaaaaaaaaaaaaaaaaaaaaaaaaaaaaaaaaaaaa

SEQ ID NO: 24701 - RNA, 4026 nt, Artificial Sequence
  SARS-CoV-2/Wuhan/WIV05/2019__EPI_ISL_402128 spike protein mRNA gc mod (1-1273)(K986P_V987P_K986P_V987P_H69del_V70del_Y144del_N501Y_A570 D_D614G_P681H_T716I_S982A_D1118H)
aggagaaagcuuaccauguucguguuucuggugcugcugccccugguguccagccagugugugaaccugaccaccagaacacagcugccuccagccuacaccaacagcuucaccagaggcguguacuaccccgacaagguguucagauccagcgugcugcacucuacccaggaccuguuccugccuuucuucagcaacgugaccugguuccacgccaucuccggcaccaauggcaccaagagauucgacaaccccgugcugcccuucaacgacgggguguacuuugccagcaccgagaaguccaacaucaucagaggcuggaucuucggcaccacacuggacagcaagacccagagccugcugaucgugaacaacgccaccaacguggucaucaaagugugcgaguuccaguucugcaacgaccccuuccugggcgucuaccacaagaacaacaagagcuggauggaaagcgaguuccggguguacagcagcgccaacaacugcaccuucgaguacgugucccagccuuuccugauggaccuggaaggcaagcagggcaacuucaagaaccugcgcgaguucguguucaagaacaucgacggcuacuucaaaaucuacagcaagcacaccccuaucaaccucgugcgggaucugccucagggcuucucugcucuggaaccccugguggaucugcccaucggcaucaacaucacccgguuucagacacugcuggcccugcacagaagcuaccugacaccuggcgauagcagcagcggauggacagcuggugccgccgcuuacuaugugggcuaccugcagccuagaaccuuccugcugaaguacaacgagaacggcaccaucaccgacgccguggauugugcucuggauccucugagcgagacaaagugcacccugaaguccuucaccguggaaaagggcaucuaccagaccagcaacuuccgggugcagcccaccgaauccaucgugcgguuccccaauaucaccaaucugugccccuucggcgagguguucaaugccaccagauucgccucuguguacgccuggaaccggaagcggaucagcaauugcguggccgacuacuccgugcuguacaacuccgccagcuucagcaccuucaagugcuacggcguguccccuaccaagcugaacgaccugugcuucacaaacguguacgccgacagcuucgugauccggggagaugaagugcggcagauugccccuggacagacaggcaagaucgccgacuacaacuacaagcugcccgacgacuucaccggcugugugauugccuggaacagcaacaaccuggacuccaaagucggcggcaacuacaauuaccuguaccggcuguuccggaaguccaaucugaagcccuucgagcgggacaucagcaccgaaaucuaucaggccggcagcaccccuugcaacggcguggaaggcuucaacugcuacuucccacugcaguccuacggcuuucagcccacauacggcgugggcuaucagcccuacagagugguggugcugagcuucgaacugcugcaugcuccugccacagugugcggcccuaagaaaagcaccaaucucgugaagaacaaaugcgugaacuucaacuucaacggccugaccggcaccggcgugcugacagagagcaacaagaaguuccugccauuccagcaguuuggccgggauaucgacgauaccacagacgccguuagagauccccagacacuggaaauccuggacaucaccccaugcagcuucggcggagugucugugaucaccccuggcaccaacaccagcaaucagguggcagugcuguaccagggcgugaacuguaccgaagugcccguggccauucacgccgaucagcugacaccuacauggcggguguacuccaccggcagcaauguguuucagaccagagccggcugucugaucggagccgagcacgugaacaauagcuacgagugcgacauccccaucggcgcuggcaucugugccagcuaccagacacagacaaacagccacagacgggcuagaagcguggccagccagagcaucauugccuacacaaugucucugggcgccgagaacagcguggccuacuccaacaacucuaucgcuauccccaucaacuucaccaucagcgugaccaccgagauccugccuguguccaugaccaagaccagcguggacugcaccauguacaucugcggcgauuccaccgagugcuccaaccugcugcugcaguacggcagcuucugcacccagcugaauagagcccugacagggaucgccguggaacaggacaagaacacccaagagguguucgcccaagugaagcaaaucuacaagaccccuccuaucaaggacuucggcggcuucaauuucagccagauucugcccgauccuagcaagcccagcaagcggagcuucaucgaggaccugcuguucaacaaagugacacuggccgacgccggcuucaucaagcaguauggcgauugucugggcgacauugccgccagggaucugauuugcgcccagaaguuuaacggacugacagugcugccuccucugcugaccgaugagaugaucgcccaguacacaucugcccugcuggccggcacaaucacaagcggcuggacauuuggagcuggcgccgcucugcagauccccuuugcuaugcagauggccuaccgguucaacggcaucggagugacccagaaugugcuguacgagaaccagaagcugaucgccaaccaguucaacagcgccaucggcaagauccaggacagccugagcagcacagcaagcgcccugggaaagcugcaggacguggucaaccagaaugcccaggcacugaacacccuggucaagcagcuguccuccaacuucggcgccaucagcucugugcugaacgauauccuggccagacuggacccuccugaggccgaggugcagaucgacagacugaucacaggcagacugcagagccuccagacauacgugacccagcagcugaucagagccgccgagauuagagccucugccaaucuggccgccaccaagaugucugagugugugcugggccagagcaagagaguggacuuuugcggcaagggcuaccaccugaugagcuucccucagucugccccucacggcgugguguuucugcacgugacauaugugcccgcucaagagaagaauuucaccaccgcuccagccaucugccacgacggcaaagcccacuuuccuagagaaggcguguucguguccaacggcacccauugguucgugacacagcggaacuucuacgagccccagaucaucaccacccacaacaccuucgugucuggcaacugcgacguugugaucggcauugugaacaauaccguguacgacccucugcagcccgagcuggacagcuucaaagaggaacuggacaaguacuuuaagaaccacacaagccccgacguggaccugggcgauaucagcggaaucaaugccagcgucgugaacauccagaaagagaucgaccggcugaacgagguggccaagaaucugaacgagagccugaucgaccugcaagaacuggggaaguacgagcaguacaucaaguggcccugguacaucuggcugggcuuuaucgccggacugauugccaucgugauggucacaaucaugcuguguugcaugaccagcugcuguagcugccugaagggcuguuguagcuguggcagcugcugcaaguucgacgaggacgauucugagcccgugcugaagggcgugaaacugcacuacaccugaggacuaguuauaagacugacuagcccgaugggccucccaacgggcccuccuccccuccuugcaccgagagaucucaaaggcucuuuucagagccaccaaaaaaaaaaaaaaaaaaaaaaaaaaaaaaaaaaaaaaaaaaaaaaaaaaaaaaaaaaaaaaaaaaaaaaaaaaaaaaaaaaaaaaaaaaaaaaaaaaaaa

SEQ ID NO: 24702 - RNA, 4035 nt, Artificial Sequence
  SARS-CoV-2/Wuhan/WIV05/2019__EPI_ISL_402128 spike protein mRNA gc mod (1-1273)(K986P_V987P_K986P_V987P_K417N_E484K_N501Y_D614G)
aggagaaagcuuaccauguucguguuucuggugcugcugccccugguguccagccagugugugaaccugaccaccagaacacagcugccuccagccuacaccaacagcuucaccagaggcguguacuaccccgacaagguguucagauccagcgugcugcacucuacccaggaccuguuccugccuuucuucagcaacgugaccugguuccacgccauccacguguccggcaccaauggcaccaagagauucgacaaccccgugcugcccuucaacgacgggguguacuuugccagcaccgagaaguccaacaucaucagaggcuggaucuucggcaccacacuggacagcaagacccagagccugcugaucgugaacaacgccaccaacguggucaucaaagugugcgaguuccaguucugcaacgaccccuuccugggcgucuacuaccacaagaacaacaagagcuggauggaaagcgaguuccggguguacagcagcgccaacaacugcaccuucgaguacgugucccagccuuuccugauggaccuggaaggcaagcagggcaacuucaagaaccugcgcgaguucguguucaagaacaucgacggcuacuucaaaaucuacagcaagcacaccccuaucaaccucgugcgggaucugccucagggcuucucugcucuggaaccccugguggaucugcccaucggcaucaacaucacccgguuucagacacugcuggcccugcacagaagcuaccugacaccuggcgauagcagcagcggauggacagcuggugccgccgcuuacuaugugggcuaccugcagccuagaaccuuccugcugaaguacaacgagaacggcaccaucaccgacgccguggauugugcucuggauccucugagcgagacaaagugcacccugaaguccuucaccguggaaaagggcaucuaccagaccagcaacuuccgggugcagcccaccgaauccaucgugcgguuccccaauaucaccaaucugugccccuucggcgagguguucaaugccaccagauucgccucuguguacgccuggaaccggaagcggaucagcaauugcguggccgacuacuccgugcuguacaacuccgccagcuucagcaccuucaagugcuacggcguguccccuaccaagcugaacgaccugugcuucacaaacguguacgccgacagcuucgugauccggggagaugaagugcggcagauugccccuggacagacaggcaacaucgccgacuacaacuacaagcugcccgacgacuucaccggcugugugauugccuggaacagcaacaaccuggacuccaaagucggcggcaacuacaauuaccuguaccggcuguuccggaaguccaaucugaagcccuucgagcgggacaucagcaccgaaaucuaucaggccggcagcaccccuugcaacggcgugaagggcuucaacugcuacuucccacugcaguccuacggcuuucagcccacauacggcgugggcuaucagcccuacagagugguggugcugagcuucgaacugcugcaugcuccugccacagugugcggcccuaagaaaagcaccaaucucgugaagaacaaaugcgugaacuucaacuucaacggccugaccggcaccggcgugcugacagagagcaacaagaaguuccugccauuccagcaguuuggccgggauaucgccgauaccacagacgccguuagagauccccagacacuggaaauccuggacaucaccccaugcagcuucggcggagugucugugaucaccccuggcaccaacaccagcaaucagguggcagugcuguaccagggcgugaacuguaccgaagugcccguggccauucacgccgaucagcugacaccuacauggcggguguacuccaccggcagcaauguguuucagaccagagccggcugucugaucggagccgagcacgugaacaauagcuacgagugcgacauccccaucggcgcuggcaucugugccagcuaccagacacagacaaacagccccagacgggcuagaagcguggccagccagagcaucauugccuacacaaugucucugggcgccgagaacagcguggccuacuccaacaacucuaucgcuauccccaccaacuucaccaucagcgugaccaccgagauccugccuguguccaugaccaagaccagcguggacugcaccauguacaucugcggcgauuccaccgagugcuccaaccugcugcugcaguacggcagcuucugcacccagcugaauagagcccugacagggaucgccguggaacaggacaagaacacccaagagguguucgcccaagugaagcaaaucuacaagaccccuccuaucaaggacuucggcggcuucaauuucagccagauucugcccgauccuagcaagcccagcaagcggagcuucaucgaggaccugcuguucaacaaagugacacuggccgacgccggcuucaucaagcaguauggcgauugucugggcgacauugccgccagggaucugauuugcgcccagaaguuuaacggacugacagugcugccuccucugcugaccgaugagaugaucgcccaguacacaucugcccugcuggccggcacaaucacaagcggcuggacauuuggagcuggcgccgcucugcagauccccuuugcuaugcagauggccuaccgguucaacggcaucggagugacccagaaugugcuguacgagaaccagaagcugaucgccaaccaguucaacagcgccaucggcaagauccaggacagccugagcagcacagcaagcgcccugggaaagcugcaggacguggucaaccagaaugcccaggcacugaacacccuggucaagcagcuguccuccaacuucggcgccaucagcucugugcugaacgauauccugagcagacuggacccuccugaggccgaggugcagaucgacagacugaucacaggcagacugcagagccuccagacauacgugacccagcagcugaucagagccgccgagauuagagccucugccaaucuggccgccaccaagaugucugagugugugcugggccagagcaagagaguggacuuuugcggcaagggcuaccaccugaugagcuucccucagucugccccucacggcgugguguuucugcacgugacauaugugcccgcucaagagaagaauuucaccaccgcuccagccaucugccacgacggcaaagcccacuuuccuagagaaggcguguucguguccaacggcacccauugguucgugacacagcggaacuucuacgagccccagaucaucaccaccgacaacaccuucgugucuggcaacugcgacguugugaucggcauugugaacaauaccguguacgacccucugcagcccgagcuggacagcuucaaagaggaacuggacaaguacuuuaagaaccacacaagccccgacguggaccugggcgauaucagcggaaucaaugccagcgucgugaacauccagaaagagaucgaccggcugaacgagguggccaagaaucugaacgagagccugaucgaccugcaagaacuggggaaguacgagcaguacaucaaguggcccugguacaucuggcugggcuuuaucgccggacugauugccaucgugauggucacaaucaugcuguguugcaugaccagcugcuguagcugccugaagggcuguuguagcuguggcagcugcugcaaguucgacgaggacgauucugagcccgugcugaagggcgugaaacugcacuacaccugaggacuaguuauaagacugacuagcccgaugggccucccaacgggcccuccuccccuccuugcaccgagagaucucaaaggcucuuuucagagccaccaaaaaaaaaaaaaaaaaaaaaaaaaaaaaaaaaaaaaaaaaaaaaaaaaaaaaaaaaaaaaaaaaaaaaaaaaaaaaaaaaaaaaaaaaaaaaaaaaaaaa

SEQ ID NO: 24703 - RNA, 4026 nt, Artificial Sequence
  SARS-CoV-2/Wuhan/WIV05/2019__EPI_ISL_402128 spike protein mRNA gc mod (1-1273)(K986P_V987P_K986P_V987P_L18F_D80A_D215G_L242del_A243del_ L244del_R246I_K417N_E484K_N501Y_D614G_A701V)
aggagaaagcuuaccauguucguguuucuggugcugcugccccugguguccagccagugugugaacuucaccaccagaacacagcugccuccagccuacaccaacagcuucaccagaggcguguacuaccccgacaagguguucagauccagcgugcugcacucuacccaggaccuguuccugccuuucuucagcaacgugaccugguuccacgccauccacguguccggcaccaauggcaccaagagauucgccaaccccgugcugcccuucaacgacgggguguacuuugccagcaccgagaaguccaacaucaucagaggcuggaucuucggcaccacacuggacagcaagacccagagccugcugaucgugaacaacgccaccaacguggucaucaaagugugcgaguuccaguucugcaacgaccccuuccugggcgucuacuaccacaagaacaacaagagcuggauggaaagcgaguuccggguguacagcagcgccaacaacugcaccuucgaguacgugucccagccuuuccugauggaccuggaaggcaagcagggcaacuucaagaaccugcgcgaguucguguucaagaacaucgacggcuacuucaaaaucuacagcaagcacaccccuaucaaccucgugcggggccugccucagggcuucucugcucuggaaccccugguggaucugcccaucggcaucaacaucacccgguuucagacacugcacaucagcuaccugacaccuggcgauagcagcagcggauggacagcuggugccgccgcuuacuaugugggcuaccugcagccuagaaccuuccugcugaaguacaacgagaacggcaccaucaccgacgccguggauugugcucuggauccucugagcgagacaaagugcacccugaaguccuucaccguggaaaagggcaucuaccagaccagcaacuuccgggugcagcccaccgaauccaucgugcgguuccccaauaucaccaaucugugccccuucggcgagguguucaaugccaccagauucgccucuguguacgccuggaaccggaagcggaucagcaauugcguggccgacuacuccgugcuguacaacuccgccagcuucagcaccuucaagugcuacggcguguccccuaccaagcugaacgaccugugcuucacaaacguguacgccgacagcuucgugauccggggagaugaagugcggcagauugccccuggacagacaggcaacaucgccgacuacaacuacaagcugcccgacgacuucaccggcugugugauugccuggaacagcaacaaccuggacuccaaagucggcggcaacuacaauuaccuguaccggcuguuccggaaguccaaucugaagcccuucgagcgggacaucagcaccgaaaucuaucaggccggcagcaccccuugcaacggcgugaagggcuucaacugcuacuucccacugcaguccuacggcuuucagcccacauacggcgugggcuaucagcccuacagagugguggugcugagcuucgaacugcugcaugcuccugccacagugugcggcccuaagaaaagcaccaaucucgugaagaacaaaugcgugaacuucaacuucaacggccugaccggcaccggcgugcugacagagagcaacaagaaguuccugccauuccagcaguuuggccgggauaucgccgauaccacagacgccguuagagauccccagacacuggaaauccuggacaucaccccaugcagcuucggcggagugucugugaucaccccuggcaccaacaccagcaaucagguggcagugcuguaccagggcgugaacuguaccgaagugcccguggccauucacgccgaucagcugacaccuacauggcggguguacuccaccggcagcaauguguuucagaccagagccggcugucugaucggagccgagcacgugaacaauagcuacgagugcgacauccccaucggcgcuggcaucugugccagcuaccagacacagacaaacagccccagacgggcuagaagcguggccagccagagcaucauugccuacacaaugucucugggcguggagaacagcguggccuacuccaacaacucuaucgcuauccccaccaacuucaccaucagcgugaccaccgagauccugccuguguccaugaccaagaccagcguggacugcaccauguacaucugcggcgauuccaccgagugcuccaaccugcugcugcaguacggcagcuucugcacccagcugaauagagcccugacagggaucgccguggaacaggacaagaacacccaagagguguucgcccaagugaagcaaaucuacaagaccccuccuaucaaggacuucggcggcuucaauuucagccagauucugcccgauccuagcaagcccagcaagcggagcuucaucgaggaccugcuguucaacaaagugacacuggccgacgccggcuucaucaagcaguauggcgauugucugggcgacauugccgccagggaucugauuugcgcccagaaguuuaacggacugacagugcugccuccucugcugaccgaugagaugaucgcccaguacacaucugcccugcuggccggcacaaucacaagcggcuggacauuuggagcuggcgccgcucugcagauccccuuugcuaugcagauggccuaccgguucaacggcaucggagugacccagaaugugcuguacgagaaccagaagcugaucgccaaccaguucaacagcgccaucggcaagauccaggacagccugagcagcacagcaagcgcccugggaaagcugcaggacguggucaaccagaaugcccaggcacugaacacccuggucaagcagcuguccuccaacuucggcgccaucagcucugugcugaacgauauccugagcagacuggacccuccugaggccgaggugcagaucgacagacugaucacaggcagacugcagagccuccagacauacgugacccagcagcugaucagagccgccgagauuagagccucugccaaucuggccgccaccaagaugucugagugugugcugggccagagcaagagaguggacuuuugcggcaagggcuaccaccugaugagcuucccucagucugccccucacggcgugguguuucugcacgugacauaugugcccgcucaagagaagaauuucaccaccgcuccagccaucugccacgacggcaaagcccacuuuccuagagaaggcguguucguguccaacggcacccauugguucgugacacagcggaacuucuacgagccccagaucaucaccaccgacaacaccuucgugucuggcaacugcgacguugugaucggcauugugaacaauaccguguacgacccucugcagcccgagcuggacagcuucaaagaggaacuggacaaguacuuuaagaaccacacaagccccgacguggaccugggcgauaucagcggaaucaaugccagcgucgugaacauccagaaagagaucgaccggcugaacgagguggccaagaaucugaacgagagccugaucgaccugcaagaacuggggaaguacgagcaguacaucaaguggcccugguacaucuggcugggcuuuaucgccggacugauugccaucgugauggucacaaucaugcuguguugcaugaccagcugcuguagcugccugaagggcuguuguagcuguggcagcugcugcaaguucgacgaggacgauucugagcccgugcugaagggcgugaaacugcacuacaccugaggacuaguuauaagacugacuagcccgaugggccucccaacgggcccuccuccccuccuugcaccgagagaucucaaaggcucuuuucagagccaccaaaaaaaaaaaaaaaaaaaaaaaaaaaaaaaaaaaaaaaaaaaaaaaaaaaaaaaaaaaaaaaaaaaaaaaaaaaaaaaaaaaaaaaaaaaaaaaaaaaaa

SEQ ID NO: 24704 - RNA, 4035 nt, Artificial Sequence
  SARS-CoV-2/Wuhan/WIV05/2019__EPI_ISL_402128 spike protein mRNA gc mod (1-1273)(K986P_V987P_K986P_V987P_E484K_D614G)
aggagaaagcuuaccauguucguguuucuggugcugcugccccugguguccagccagugugugaaccugaccaccagaacacagcugccuccagccuacaccaacagcuucaccagaggcguguacuaccccgacaagguguucagauccagcgugcugcacucuacccaggaccuguuccugccuuucuucagcaacgugaccugguuccacgccauccacguguccggcaccaauggcaccaagagauucgacaaccccgugcugcccuucaacgacgggguguacuuugccagcaccgagaaguccaacaucaucagaggcuggaucuucggcaccacacuggacagcaagacccagagccugcugaucgugaacaacgccaccaacguggucaucaaagugugcgaguuccaguucugcaacgaccccuuccugggcgucuacuaccacaagaacaacaagagcuggauggaaagcgaguuccggguguacagcagcgccaacaacugcaccuucgaguacgugucccagccuuuccugauggaccuggaaggcaagcagggcaacuucaagaaccugcgcgaguucguguucaagaacaucgacggcuacuucaaaaucuacagcaagcacaccccuaucaaccucgugcgggaucugccucagggcuucucugcucuggaaccccugguggaucugcccaucggcaucaacaucacccgguuucagacacugcuggcccugcacagaagcuaccugacaccuggcgauagcagcagcggauggacagcuggugccgccgcuuacuaugugggcuaccugcagccuagaaccuuccugcugaaguacaacgagaacggcaccaucaccgacgccguggauugugcucuggauccucugagcgagacaaagugcacccugaaguccuucaccguggaaaagggcaucuaccagaccagcaacuuccgggugcagcccaccgaauccaucgugcgguuccccaauaucaccaaucugugccccuucggcgagguguucaaugccaccagauucgccucuguguacgccuggaaccggaagcggaucagcaauugcguggccgacuacuccgugcuguacaacuccgccagcuucagcaccuucaagugcuacggcguguccccuaccaagcugaacgaccugugcuucacaaacguguacgccgacagcuucgugauccggggagaugaagugcggcagauugccccuggacagacaggcaagaucgccgacuacaacuacaagcugcccgacgacuucaccggcugugugauugccuggaacagcaacaaccuggacuccaaagucggcggcaacuacaauuaccuguaccggcuguuccggaaguccaaucugaagcccuucgagcgggacaucagcaccgaaaucuaucaggccggcagcaccccuugcaacggcgugaagggcuucaacugcuacuucccacugcaguccuacggcuuucagcccacaaauggcgugggcuaucagcccuacagagugguggugcugagcuucgaacugcugcaugcuccugccacagugugcggcccuaagaaaagcaccaaucucgugaagaacaaaugcgugaacuucaacuucaacggccugaccggcaccggcgugcugacagagagcaacaagaaguuccugccauuccagcaguuuggccgggauaucgccgauaccacagacgccguuagagauccccagacacuggaaauccuggacaucaccccaugcagcuucggcggagugucugugaucaccccuggcaccaacaccagcaaucagguggcagugcuguaccagggcgugaacuguaccgaagugcccguggccauucacgccgaucagcugacaccuacauggcggguguacuccaccggcagcaauguguuucagaccagagccggcugucugaucggagccgagcacgugaacaauagcuacgagugcgacauccccaucggcgcuggcaucugugccagcuaccagacacagacaaacagccccagacgggcuagaagcguggccagccagagcaucauugccuacacaaugucucugggcgccgagaacagcguggccuacuccaacaacucuaucgcuauccccaccaacuucaccaucagcgugaccaccgagauccugccuguguccaugaccaagaccagcguggacugcaccauguacaucugcggcgauuccaccgagugcuccaaccugcugcugcaguacggcagcuucugcacccagcugaauagagcccugacagggaucgccguggaacaggacaagaacacccaagagguguucgcccaagugaagcaaaucuacaagaccccuccuaucaaggacuucggcggcuucaauuucagccagauucugcccgauccuagcaagcccagcaagcggagcuucaucgaggaccugcuguucaacaaagugacacuggccgacgccggcuucaucaagcaguauggcgauugucugggcgacauugccgccagggaucugauuugcgcccagaaguuuaacggacugacagugcugccuccucugcugaccgaugagaugaucgcccaguacacaucugcccugcuggccggcacaaucacaagcggcuggacauuuggagcuggcgccgcucugcagauccccuuugcuaugcagauggccuaccgguucaacggcaucggagugacccagaaugugcuguacgagaaccagaagcugaucgccaaccaguucaacagcgccaucggcaagauccaggacagccugagcagcacagcaagcgcccugggaaagcugcaggacguggucaaccagaaugcccaggcacugaacacccuggucaagcagcuguccuccaacuucggcgccaucagcucugugcugaacgauauccugagcagacuggacccuccugaggccgaggugcagaucgacagacugaucacaggcagacugcagagccuccagacauacgugacccagcagcugaucagagccgccgagauuagagccucugccaaucuggccgccaccaagaugucugagugugugcugggccagagcaagagaguggacuuuugcggcaagggcuaccaccugaugagcuucccucagucugccccucacggcgugguguuucugcacgugacauaugugcccgcucaagagaagaauuucaccaccgcuccagccaucugccacgacggcaaagcccacuuuccuagagaaggcguguucguguccaacggcacccauugguucgugacacagcggaacuucuacgagccccagaucaucaccaccgacaacaccuucgugucuggcaacugcgacguugugaucggcauugugaacaauaccguguacgacccucugcagcccgagcuggacagcuucaaagaggaacuggacaaguacuuuaagaaccacacaagccccgacguggaccugggcgauaucagcggaaucaaugccagcgucgugaacauccagaaagagaucgaccggcugaacgagguggccaagaaucugaacgagagccugaucgaccugcaagaacuggggaaguacgagcaguacaucaaguggcccugguacaucuggcugggcuuuaucgccggacugauugccaucgugauggucacaaucaugcuguguugcaugaccagcugcuguagcugccugaagggcuguuguagcuguggcagcugcugcaaguucgacgaggacgauucugagcccgugcugaagggcgugaaacugcacuacaccugaggacuaguuauaagacugacuagcccgaugggccucccaacgggcccuccuccccuccuugcaccgagagaucucaaaggcucuuuucagagccaccaaaaaaaaaaaaaaaaaaaaaaaaaaaaaaaaaaaaaaaaaaaaaaaaaaaaaaaaaaaaaaaaaaaaaaaaaaaaaaaaaaaaaaaaaaaaaaaaaaaaa

SEQ ID NO: 24705 - RNA, 4035 nt, Artificial Sequence
  SARS-CoV-2/Wuhan/WIV05/2019__EPI_ISL_402128 spike protein mRNA gc mod (1-1273)(K986P_V987P_K986P_V987P_L18F_T20N_P26S_D138Y_R190S_K417T _E484K_N501Y_D614G_H655Y_T1027I)
aggagaaagcuuaccauguucguguuucuggugcugcugccccugguguccagccagugugugaacuucaccaacagaacacagcugccuagcgccuacaccaacagcuucaccagaggcguguacuaccccgacaagguguucagauccagcgugcugcacucuacccaggaccuguuccugccuuucuucagcaacgugaccugguuccacgccauccacguguccggcaccaauggcaccaagagauucgacaaccccgugcugcccuucaacgacgggguguacuuugccagcaccgagaaguccaacaucaucagaggcuggaucuucggcaccacacuggacagcaagacccagagccugcugaucgugaacaacgccaccaacguggucaucaaagugugcgaguuccaguucugcaacuaccccuuccugggcgucuacuaccacaagaacaacaagagcuggauggaaagcgaguuccggguguacagcagcgccaacaacugcaccuucgaguacgugucccagccuuuccugauggaccuggaaggcaagcagggcaacuucaagaaccugagcgaguucguguucaagaacaucgacggcuacuucaaaaucuacagcaagcacaccccuaucaaccucgugcgggaucugccucagggcuucucugcucuggaaccccugguggaucugcccaucggcaucaacaucacccgguuucagacacugcuggcccugcacagaagcuaccugacaccuggcgauagcagcagcggauggacagcuggugccgccgcuuacuaugugggcuaccugcagccuagaaccuuccugcugaaguacaacgagaacggcaccaucaccgacgccguggauugugcucuggauccucugagcgagacaaagugcacccugaaguccuucaccguggaaaagggcaucuaccagaccagcaacuuccgggugcagcccaccgaauccaucgugcgguuccccaauaucaccaaucugugccccuucggcgagguguucaaugccaccagauucgccucuguguacgccuggaaccggaagcggaucagcaauugcguggccgacuacuccgugcuguacaacuccgccagcuucagcaccuucaagugcuacggcguguccccuaccaagcugaacgaccugugcuucacaaacguguacgccgacagcuucgugauccggggagaugaagugcggcagauugccccuggacagacaggcaccaucgccgacuacaacuacaagcugcccgacgacuucaccggcugugugauugccuggaacagcaacaaccuggacuccaaagucggcggcaacuacaauuaccuguaccggcuguuccggaaguccaaucugaagcccuucgagcgggacaucagcaccgaaaucuaucaggccggcagcaccccuugcaacggcgugaagggcuucaacugcuacuucccacugcaguccuacggcuuucagcccacauacggcgugggcuaucagcccuacagagugguggugcugagcuucgaacugcugcaugcuccugccacagugugcggcccuaagaaaagcaccaaucucgugaagaacaaaugcgugaacuucaacuucaacggccugaccggcaccggcgugcugacagagagcaacaagaaguuccugccauuccagcaguuuggccgggauaucgccgauaccacagacgccguuagagauccccagacacuggaaauccuggacaucaccccaugcagcuucggcggagugucugugaucaccccuggcaccaacaccagcaaucagguggcagugcuguaccagggcgugaacuguaccgaagugcccguggccauucacgccgaucagcugacaccuacauggcggguguacuccaccggcagcaauguguuucagaccagagccggcugucugaucggagccgaguacgugaacaauagcuacgagugcgacauccccaucggcgcuggcaucugugccagcuaccagacacagacaaacagccccagacgggcuagaagcguggccagccagagcaucauugccuacacaaugucucugggcgccgagaacagcguggccuacuccaacaacucuaucgcuauccccaccaacuucaccaucagcgugaccaccgagauccugccuguguccaugaccaagaccagcguggacugcaccauguacaucugcggcgauuccaccgagugcuccaaccugcugcugcaguacggcagcuucugcacccagcugaauagagcccugacagggaucgccguggaacaggacaagaacacccaagagguguucgcccaagugaagcaaaucuacaagaccccuccuaucaaggacuucggcggcuucaauuucagccagauucugcccgauccuagcaagcccagcaagcggagcuucaucgaggaccugcuguucaacaaagugacacuggccgacgccggcuucaucaagcaguauggcgauugucugggcgacauugccgccagggaucugauuugcgcccagaaguuuaacggacugacagugcugccuccucugcugaccgaugagaugaucgcccaguacacaucugcccugcuggccggcacaaucacaagcggcuggacauuuggagcuggcgccgcucugcagauccccuuugcuaugcagauggccuaccgguucaacggcaucggagugacccagaaugugcuguacgagaaccagaagcugaucgccaaccaguucaacagcgccaucggcaagauccaggacagccugagcagcacagcaagcgcccugggaaagcugcaggacguggucaaccagaaugcccaggcacugaacacccuggucaagcagcuguccuccaacuucggcgccaucagcucugugcugaacgauauccugagcagacuggacccuccugaggccgaggugcagaucgacagacugaucacaggcagacugcagagccuccagacauacgugacccagcagcugaucagagccgccgagauuagagccucugccaaucuggccgccaucaagaugucugagugugugcugggccagagcaagagaguggacuuuugcggcaagggcuaccaccugaugagcuucccucagucugccccucacggcgugguguuucugcacgugacauaugugcccgcucaagagaagaauuucaccaccgcuccagccaucugccacgacggcaaagcccacuuuccuagagaaggcguguucguguccaacggcacccauugguucgugacacagcggaacuucuacgagccccagaucaucaccaccgacaacaccuucgugucuggcaacugcgacguugugaucggcauugugaacaauaccguguacgacccucugcagcccgagcuggacagcuucaaagaggaacuggacaaguacuuuaagaaccacacaagccccgacguggaccugggcgauaucagcggaaucaaugccagcgucgugaacauccagaaagagaucgaccggcugaacgagguggccaagaaucugaacgagagccugaucgaccugcaagaacuggggaaguacgagcaguacaucaaguggcccugguacaucuggcugggcuuuaucgccggacugauugccaucgugauggucacaaucaugcuguguugcaugaccagcugcuguagcugccugaagggcuguuguagcuguggcagcugcugcaaguucgacgaggacgauucugagcccgugcugaagggcgugaaacugcacuacaccugaggacuaguuauaagacugacuagcccgaugggccucccaacgggcccuccuccccuccuugcaccgagagaucucaaaggcucuuuucagagccaccaaaaaaaaaaaaaaaaaaaaaaaaaaaaaaaaaaaaaaaaaaaaaaaaaaaaaaaaaaaaaaaaaaaaaaaaaaaaaaaaaaaaaaaaaaaaaaaaaaaaa

SEQ ID NO: 24706 - RNA, 4035 nt, Artificial Sequence
  SARS-CoV-2/Wuhan/WIV05/2019__EPI_ISL_402128 spike protein mRNA gc mod (1-1273)(K986P_V987P_K986P_V987P_S13I_W152C_L452R_D614G)
aggagaaagcuuaccauguucguguuucuggugcugcugccccugguguccauccagugugugaaccugaccaccagaacacagcugccuccagccuacaccaacagcuucaccagaggcguguacuaccccgacaagguguucagauccagcgugcugcacucuacccaggaccuguuccugccuuucuucagcaacgugaccugguuccacgccauccacguguccggcaccaauggcaccaagagauucgacaaccccgugcugcccuucaacgacgggguguacuuugccagcaccgagaaguccaacaucaucagaggcuggaucuucggcaccacacuggacagcaagacccagagccugcugaucgugaacaacgccaccaacguggucaucaaagugugcgaguuccaguucugcaacgaccccuuccugggcgucuacuaccacaagaacaacaagagcugcauggaaagcgaguuccggguguacagcagcgccaacaacugcaccuucgaguacgugucccagccuuuccugauggaccuggaaggcaagcagggcaacuucaagaaccugcgcgaguucguguucaagaacaucgacggcuacuucaaaaucuacagcaagcacaccccuaucaaccucgugcgggaucugccucagggcuucucugcucuggaaccccugguggaucugcccaucggcaucaacaucacccgguuucagacacugcuggcccugcacagaagcuaccugacaccuggcgauagcagcagcggauggacagcuggugccgccgcuuacuaugugggcuaccugcagccuagaaccuuccugcugaaguacaacgagaacggcaccaucaccgacgccguggauugugcucuggauccucugagcgagacaaagugcacccugaaguccuucaccguggaaaagggcaucuaccagaccagcaacuuccgggugcagcccaccgaauccaucgugcgguuccccaauaucaccaaucugugccccuucggcgagguguucaaugccaccagauucgccucuguguacgccuggaaccggaagcggaucagcaauugcguggccgacuacuccgugcuguacaacuccgccagcuucagcaccuucaagugcuacggcguguccccuaccaagcugaacgaccugugcuucacaaacguguacgccgacagcuucgugauccggggagaugaagugcggcagauugccccuggacagacaggcaagaucgccgacuacaacuacaagcugcccgacgacuucaccggcugugugauugccuggaacagcaacaaccuggacuccaaagucggcggcaacuacaauuaccgcuaccggcuguuccggaaguccaaucugaagcccuucgagcgggacaucagcaccgaaaucuaucaggccggcagcaccccuugcaacggcguggaaggcuucaacugcuacuucccacugcaguccuacggcuuucagcccacaaauggcgugggcuaucagcccuacagagugguggugcugagcuucgaacugcugcaugcuccugccacagugugcggcccuaagaaaagcaccaaucucgugaagaacaaaugcgugaacuucaacuucaacggccugaccggcaccggcgugcugacagagagcaacaagaaguuccugccauuccagcaguuuggccgggauaucgccgauaccacagacgccguuagagauccccagacacuggaaauccuggacaucaccccaugcagcuucggcggagugucugugaucaccccuggcaccaacaccagcaaucagguggcagugcuguaccagggcgugaacuguaccgaagugcccguggccauucacgccgaucagcugacaccuacauggcggguguacuccaccggcagcaauguguuucagaccagagccggcugucugaucggagccgagcacgugaacaauagcuacgagugcgacauccccaucggcgcuggcaucugugccagcuaccagacacagacaaacagccccagacgggcuagaagcguggccagccagagcaucauugccuacacaaugucucugggcgccgagaacagcguggccuacuccaacaacucuaucgcuauccccaccaacuucaccaucagcgugaccaccgagauccugccuguguccaugaccaagaccagcguggacugcaccauguacaucugcggcgauuccaccgagugcuccaaccugcugcugcaguacggcagcuucugcacccagcugaauagagcccugacagggaucgccguggaacaggacaagaacacccaagagguguucgcccaagugaagcaaaucuacaagaccccuccuaucaaggacuucggcggcuucaauuucagccagauucugcccgauccuagcaagcccagcaagcggagcuucaucgaggaccugcuguucaacaaagugacacuggccgacgccggcuucaucaagcaguauggcgauugucugggcgacauugccgccagggaucugauuugcgcccagaaguuuaacggacugacagugcugccuccucugcugaccgaugagaugaucgcccaguacacaucugcccugcuggccggcacaaucacaagcggcuggacauuuggagcuggcgccgcucugcagauccccuuugcuaugcagauggccuaccgguucaacggcaucggagugacccagaaugugcuguacgagaaccagaagcugaucgccaaccaguucaacagcgccaucggcaagauccaggacagccugagcagcacagcaagcgcccugggaaagcugcaggacguggucaaccagaaugcccaggcacugaacacccuggucaagcagcuguccuccaacuucggcgccaucagcucugugcugaacgauauccugagcagacuggacccuccugaggccgaggugcagaucgacagacugaucacaggcagacugcagagccuccagacauacgugacccagcagcugaucagagccgccgagauuagagccucugccaaucuggccgccaccaagaugucugagugugugcugggccagagcaagagaguggacuuuugcggcaagggcuaccaccugaugagcuucccucagucugccccucacggcgugguguuucugcacgugacauaugugcccgcucaagagaagaauuucaccaccgcuccagccaucugccacgacggcaaagcccacuuuccuagagaaggcguguucguguccaacggcacccauugguucgugacacagcggaacuucuacgagccccagaucaucaccaccgacaacaccuucgugucuggcaacugcgacguugugaucggcauugugaacaauaccguguacgacccucugcagcccgagcuggacagcuucaaagaggaacuggacaaguacuuuaagaaccacacaagccccgacguggaccugggcgauaucagcggaaucaaugccagcgucgugaacauccagaaagagaucgaccggcugaacgagguggccaagaaucugaacgagagccugaucgaccugcaagaacuggggaaguacgagcaguacaucaaguggcccugguacaucuggcugggcuuuaucgccggacugauugccaucgugauggucacaaucaugcuguguugcaugaccagcugcuguagcugccugaagggcuguuguagcuguggcagcugcugcaaguucgacgaggacgauucugagcccgugcugaagggcgugaaacugcacuacaccugaggacuaguuauaagacugacuagcccgaugggccucccaacgggcccuccuccccuccuugcaccgagagaucucaaaggcucuuuucagagccaccaaaaaaaaaaaaaaaaaaaaaaaaaaaaaaaaaaaaaaaaaaaaaaaaaaaaaaaaaaaaaaaaaaaaaaaaaaaaaaaaaaaaaaaaaaaaaaaaaaaaa

SEQ ID NO: 24707 - RNA, 4035 nt, Artificial Sequence
  SARS-CoV-2/Wuhan/WIV05/2019__EPI_ISL_402128 spike protein mRNA gc mod (1-1273)(K986P_V987P)
aggagaaagcuuaccauguucguguuccuggugcugcugccucugguguccagccagugugugaaccugaccaccagaacacagcugccuccagccuacaccaacagcuuuaccagaggcguguacuaccccgacaagguguucagauccagcgugcugcacucuacccaggaccuguuccugccuuucuucagcaacgugaccugguuccacgccauccacguguccggcaccaauggcaccaagagauucgacaaccccgugcugcccuucaacgacgggguguacuuugccagcaccgagaaguccaacaucaucagaggcuggaucuucggcaccacacuggacagcaagacccagagccugcugaucgugaacaacgccaccaacguggucaucaaagugugcgaguuccaguucugcaacgaccccuuccugggcgucuacuaccacaagaacaacaagagcuggauggaaagcgaguuccggguguacagcagcgccaacaacugcaccuucgaguacgugucccagccuuuccugauggaccuggaaggcaagcagggcaacuucaagaaccugcgcgaguucguguuuaagaacaucgacggcuacuucaagaucuacagcaagcacaccccuaucaaccucgugcgggaucugccucagggcuucucugcucuggaaccccugguggaucugcccaucggcaucaacaucacccgguuucagacacugcuggcccugcacagaagcuaccugacaccuggcgauagcagcagcggauggacagcuggugccgccgcuuacuaugugggcuaccugcagccuagaaccuuccugcugaaguacaacgagaacggcaccaucaccgacgccguggauugugcucuggauccucugagcgagacaaagugcacccugaaguccuucaccguggaaaagggcaucuaccagaccagcaacuuccgggugcagcccaccgaauccaucgugcgguuccccaauaucaccaaucugugccccuucggcgagguguucaaugccaccagauucgccucuguguacgccuggaaccggaagcggaucagcaauugcguggccgacuacuccgugcuguacaacuccgccagcuucagcaccuucaagugcuacggcguguccccuaccaagcugaacgaccugugcuucacaaacguguacgccgacagcuucgugauccggggagaugaagugcggcagauugccccuggacagacaggcaagaucgccgacuacaacuacaagcugcccgacgacuucaccggcugugugauugccuggaacagcaacaaccuggacuccaaagucggcggcaacuacaauuaccuguaccggcuguuccggaaguccaaucugaagcccuucgagcgggacaucuccaccgagaucuaucaggccggcagcaccccuuguaacggcguggaaggcuucaacugcuacuucccacugcaguccuacggcuuucagcccacaaauggcgugggcuaucagcccuacagagugguggugcugagcuucgaacugcugcaugccccugccacagugugcggcccuaagaaaagcaccaaucucgugaagaacaaaugcgugaacuucaacuucaacggccugaccggcaccggcgugcugacagagagcaacaagaaguuccugccauuccagcaguuuggccgggauaucgccgauaccacagacgccguuagagauccccagacacuggaaauccuggacaucaccccuugcagcuucggcggagugucugugaucaccccuggcaccaacaccagcaaucagguggcagugcuguaccaggacgugaacuguaccgaagugcccguggccauucacgccgaucagcugacaccuacauggcggguguacuccaccggcagcaauguguuucagaccagagccggcugucugaucggagccgagcacgugaacaauagcuacgagugcgacauccccaucggcgcuggaaucugcgccagcuaccagacacagacaaacagcccucggagagccagaagcguggccagccagagcaucauugccuacacaaugucucugggcgccgagaacagcguggccuacuccaacaacucuaucgcuauccccaccaacuucaccaucagcgugaccacagagauccugccuguguccaugaccaagaccagcguggacugcaccauguacaucugcggcgauuccaccgagugcuccaaccugcugcugcaguacggcagcuucugcacccagcugaauagagcccugacagggaucgccguggaacaggacaagaacacccaagagguguucgcccaagugaagcagaucuacaagaccccuccuaucaaggacuucggcggcuucaauuucagccagauucugcccgauccuagcaagcccagcaagcggagcuucaucgaggaccugcuguucaacaaagugacacuggccgacgccggcuucaucaagcaguauggcgauugucugggcgacauugccgccagggaucugauuugcgcccagaaguuuaacggacugacagugcugccuccucugcugaccgaugagaugaucgcccaguacacaucugcccugcuggccggcacaaucacaagcggcuggacauuuggagcaggcgccgcucugcagauccccuuugcuaugcagauggccuaccgguucaacggcaucggagugacccagaaugugcuguacgagaaccagaagcugaucgccaaccaguucaacagcgccaucggcaagauccaggacagccugagcagcacagcaagcgcccugggaaagcugcaggacguggucaaccagaaugcccaggcacugaacacccuggucaagcagcuguccuccaacuucggcgccaucagcucugugcugaacgauauccugagcagacuggacccuccugaggccgaggugcagaucgacagacugaucacaggcagacugcagagccuccagacauacgugacccagcagcugaucagagccgccgagauuagagccucugccaaucuggccgccaccaagaugucugagugugugcugggccagagcaagagaguggacuuuugcggcaagggcuaccaccugaugagcuucccucagucugccccucacggcgugguguuucugcacgugacauaugugcccgcucaagagaagaauuucaccaccgcuccagccaucugccacgacggcaaagcccacuuuccuagagaaggcguguucguguccaacggcacccauugguucgugacacagcggaacuucuacgagccccagaucaucaccaccgacaacaccuucgugucuggcaacugcgacgucgugaucggcauugugaacaauaccguguacgacccucugcagcccgagcuggacagcuucaaagaggaacuggacaaguacuuuaagaaccacacaagccccgacguggaccugggcgauaucagcggaaucaaugccagcgucgugaacauccagaaagagaucgaccggcugaacgagguggccaagaaucugaacgagagccugaucgaccugcaagaacuggggaaguacgagcaguacaucaaguggcccugguacaucuggcugggcuuuaucgccggacugauugccaucgugauggucacaaucaugcuguguugcaugaccagcugcuguagcugccugaagggcuguuguagcuguggcagcugcugcaaguucgacgaggacgauucugagcccgugcugaagggcgugaaacugcacuacacaugaggacuaguuauaagacugacuagcccgaugggccucccaacgggcccuccuccccuccuugcaccgagagaucucaaaggcucuuuucagagccaccaaaaaaaaaaaaaaaaaaaaaaaaaaaaaaaaaaaaaaaaaaaaaaaaaaaaaaaaaaaaaaaaaaaaaaaaaaaaaaaaaaaaaaaaaaaaaaaaaaaaa

SEQ ID NO: 24708 - RNA, 4035 nt, Artificial Sequence
  SARS-CoV-2/Wuhan/WIV05/2019__EPI_ISL_402128 spike protein mRNA gc mod (1-1273)(K986P_V987P_ D614G)
aggagaaagcuuaccauguucguguuccuggugcugcugccucugguguccagccagugugugaaccugaccaccagaacacagcugccuccagccuacaccaacagcuuuaccagaggcguguacuaccccgacaagguguucagauccagcgugcugcacucuacccaggaccuguuccugccuuucuucagcaacgugaccugguuccacgccauccacguguccggcaccaauggcaccaagagauucgacaaccccgugcugcccuucaacgacgggguguacuuugccagcaccgagaaguccaacaucaucagaggcuggaucuucggcaccacacuggacagcaagacccagagccugcugaucgugaacaacgccaccaacguggucaucaaagugugcgaguuccaguucugcaacgaccccuuccugggcgucuacuaccacaagaacaacaagagcuggauggaaagcgaguuccggguguacagcagcgccaacaacugcaccuucgaguacgugucccagccuuuccugauggaccuggaaggcaagcagggcaacuucaagaaccugcgcgaguucguguuuaagaacaucgacggcuacuucaagaucuacagcaagcacaccccuaucaaccucgugcgggaucugccucagggcuucucugcucuggaaccccugguggaucugcccaucggcaucaacaucacccgguuucagacacugcuggcccugcacagaagcuaccugacaccuggcgauagcagcagcggauggacagcuggugccgccgcuuacuaugugggcuaccugcagccuagaaccuuccugcugaaguacaacgagaacggcaccaucaccgacgccguggauugugcucuggauccucugagcgagacaaagugcacccugaaguccuucaccguggaaaagggcaucuaccagaccagcaacuuccgggugcagcccaccgaauccaucgugcgguuccccaauaucaccaaucugugccccuucggcgagguguucaaugccaccagauucgccucuguguacgccuggaaccggaagcggaucagcaauugcguggccgacuacuccgugcuguacaacuccgccagcuucagcaccuucaagugcuacggcguguccccuaccaagcugaacgaccugugcuucacaaacguguacgccgacagcuucgugauccggggagaugaagugcggcagauugccccuggacagacaggcaagaucgccgacuacaacuacaagcugcccgacgacuucaccggcugugugauugccuggaacagcaacaaccuggacuccaaagucggcggcaacuacaauuaccuguaccggcuguuccggaaguccaaucugaagcccuucgagcgggacaucuccaccgagaucuaucaggccggcagcaccccuuguaacggcguggaaggcuucaacugcuacuucccacugcaguccuacggcuuucagcccacaaauggcgugggcuaucagcccuacagagugguggugcugagcuucgaacugcugcaugccccugccacagugugcggcccuaagaaaagcaccaaucucgugaagaacaaaugcgugaacuucaacuucaacggccugaccggcaccggcgugcugacagagagcaacaagaaguuccugccauuccagcaguuuggccgggauaucgccgauaccacagacgccguuagagauccccagacacuggaaauccuggacaucaccccuugcagcuucggcggagugucugugaucaccccuggcaccaacaccagcaaucagguggcagugcuguaccagggcgugaacuguaccgaagugcccguggccauucacgccgaucagcugacaccuacauggcggguguacuccaccggcagcaauguguuucagaccagagccggcugucugaucggagccgagcacgugaacaauagcuacgagugcgacauccccaucggcgcuggaaucugcgccagcuaccagacacagacaaacagcccucggagagccagaagcguggccagccagagcaucauugccuacacaaugucucugggcgccgagaacagcguggccuacuccaacaacucuaucgcuauccccaccaacuucaccaucagcgugaccacagagauccugccuguguccaugaccaagaccagcguggacugcaccauguacaucugcggcgauuccaccgagugcuccaaccugcugcugcaguacggcagcuucugcacccagcugaauagagcccugacagggaucgccguggaacaggacaagaacacccaagagguguucgcccaagugaagcagaucuacaagaccccuccuaucaaggacuucggcggcuucaauuucagccagauucugcccgauccuagcaagcccagcaagcggagcuucaucgaggaccugcuguucaacaaagugacacuggccgacgccggcuucaucaagcaguauggcgauugucugggcgacauugccgccagggaucugauuugcgcccagaaguuuaacggacugacagugcugccuccucugcugaccgaugagaugaucgcccaguacacaucugcccugcuggccggcacaaucacaagcggcuggacauuuggagcaggcgccgcucugcagauccccuuugcuaugcagauggccuaccgguucaacggcaucggagugacccagaaugugcuguacgagaaccagaagcugaucgccaaccaguucaacagcgccaucggcaagauccaggacagccugagcagcacagcaagcgcccugggaaagcugcaggacguggucaaccagaaugcccaggcacugaacacccuggucaagcagcuguccuccaacuucggcgccaucagcucugugcugaacgauauccugagcagacuggacccuccugaggccgaggugcagaucgacagacugaucacaggcagacugcagagccuccagacauacgugacccagcagcugaucagagccgccgagauuagagccucugccaaucuggccgccaccaagaugucugagugugugcugggccagagcaagagaguggacuuuugcggcaagggcuaccaccugaugagcuucccucagucugccccucacggcgugguguuucugcacgugacauaugugcccgcucaagagaagaauuucaccaccgcuccagccaucugccacgacggcaaagcccacuuuccuagagaaggcguguucguguccaacggcacccauugguucgugacacagcggaacuucuacgagccccagaucaucaccaccgacaacaccuucgugucuggcaacugcgacgucgugaucggcauugugaacaauaccguguacgacccucugcagcccgagcuggacagcuucaaagaggaacuggacaaguacuuuaagaaccacacaagccccgacguggaccugggcgauaucagcggaaucaaugccagcgucgugaacauccagaaagagaucgaccggcugaacgagguggccaagaaucugaacgagagccugaucgaccugcaagaacuggggaaguacgagcaguacaucaaguggcccugguacaucuggcugggcuuuaucgccggacugauugccaucgugauggucacaaucaugcuguguugcaugaccagcugcuguagcugccugaagggcuguuguagcuguggcagcugcugcaaguucgacgaggacgauucugagcccgugcugaagggcgugaaacugcacuacacaugaggacuaguuauaagacugacuagcccgaugggccucccaacgggcccuccuccccuccuugcaccgagagaucucaaaggcucuuuucagagccaccaaaaaaaaaaaaaaaaaaaaaaaaaaaaaaaaaaaaaaaaaaaaaaaaaaaaaaaaaaaaaaaaaaaaaaaaaaaaaaaaaaaaaaaaaaaaaaaaaaaaa

SEQ ID NO: 24709 - RNA, 4035 nt, Artificial Sequence
  SARS-CoV-2/Wuhan/WIV05/2019__EPI_ISL_402128 spike protein mRNA gc mod (1-1273)(K986P_V987P_A222V_D614G)
aggagaaagcuuaccauguucguguuccuggugcugcugccucugguguccagccagugugugaaccugaccaccagaacacagcugccuccagccuacaccaacagcuuuaccagaggcguguacuaccccgacaagguguucagauccagcgugcugcacucuacccaggaccuguuccugccuuucuucagcaacgugaccugguuccacgccauccacguguccggcaccaauggcaccaagagauucgacaaccccgugcugcccuucaacgacgggguguacuuugccagcaccgagaaguccaacaucaucagaggcuggaucuucggcaccacacuggacagcaagacccagagccugcugaucgugaacaacgccaccaacguggucaucaaagugugcgaguuccaguucugcaacgaccccuuccugggcgucuacuaccacaagaacaacaagagcuggauggaaagcgaguuccggguguacagcagcgccaacaacugcaccuucgaguacgugucccagccuuuccugauggaccuggaaggcaagcagggcaacuucaagaaccugcgcgaguucguguuuaagaacaucgacggcuacuucaagaucuacagcaagcacaccccuaucaaccucgugcgggaucugccucagggcuucucugugcuggaaccccugguggaucugcccaucggcaucaacaucacccgguuucagacacugcuggcccugcacagaagcuaccugacaccuggcgauagcagcagcggauggacagcuggugccgccgcuuacuaugugggcuaccugcagccuagaaccuuccugcugaaguacaacgagaacggcaccaucaccgacgccguggauugugcucuggauccucugagcgagacaaagugcacccugaaguccuucaccguggaaaagggcaucuaccagaccagcaacuuccgggugcagcccaccgaauccaucgugcgguuccccaauaucaccaaucugugccccuucggcgagguguucaaugccaccagauucgccucuguguacgccuggaaccggaagcggaucagcaauugcguggccgacuacuccgugcuguacaacuccgccagcuucagcaccuucaagugcuacggcguguccccuaccaagcugaacgaccugugcuucacaaacguguacgccgacagcuucgugauccggggagaugaagugcggcagauugccccuggacagacaggcaagaucgccgacuacaacuacaagcugcccgacgacuucaccggcugugugauugccuggaacagcaacaaccuggacuccaaagucggcggcaacuacaauuaccuguaccggcuguuccggaaguccaaucugaagcccuucgagcgggacaucuccaccgagaucuaucaggccggcagcaccccuuguaacggcguggaaggcuucaacugcuacuucccacugcaguccuacggcuuucagcccacaaauggcgugggcuaucagcccuacagagugguggugcugagcuucgaacugcugcaugccccugccacagugugcggcccuaagaaaagcaccaaucucgugaagaacaaaugcgugaacuucaacuucaacggccugaccggcaccggcgugcugacagagagcaacaagaaguuccugccauuccagcaguuuggccgggauaucgccgauaccacagacgccguuagagauccccagacacuggaaauccuggacaucaccccuugcagcuucggcggagugucugugaucaccccuggcaccaacaccagcaaucagguggcagugcuguaccagggcgugaacuguaccgaagugcccguggccauucacgccgaucagcugacaccuacauggcggguguacuccaccggcagcaauguguuucagaccagagccggcugucugaucggagccgagcacgugaacaauagcuacgagugcgacauccccaucggcgcuggaaucugcgccagcuaccagacacagacaaacagcccucggagagccagaagcguggccagccagagcaucauugccuacacaaugucucugggcgccgagaacagcguggccuacuccaacaacucuaucgcuauccccaccaacuucaccaucagcgugaccacagagauccugccuguguccaugaccaagaccagcguggacugcaccauguacaucugcggcgauuccaccgagugcuccaaccugcugcugcaguacggcagcuucugcacccagcugaauagagcccugacagggaucgccguggaacaggacaagaacacccaagagguguucgcccaagugaagcagaucuacaagaccccuccuaucaaggacuucggcggcuucaauuucagccagauucugcccgauccuagcaagcccagcaagcggagcuucaucgaggaccugcuguucaacaaagugacacuggccgacgccggcuucaucaagcaguauggcgauugucugggcgacauugccgccagggaucugauuugcgcccagaaguuuaacggacugacagugcugccuccucugcugaccgaugagaugaucgcccaguacacaucugcccugcuggccggcacaaucacaagcggcuggacauuuggagcaggcgccgcucugcagauccccuuugcuaugcagauggccuaccgguucaacggcaucggagugacccagaaugugcuguacgagaaccagaagcugaucgccaaccaguucaacagcgccaucggcaagauccaggacagccugagcagcacagcaagcgcccugggaaagcugcaggacguggucaaccagaaugcccaggcacugaacacccuggucaagcagcuguccuccaacuucggcgccaucagcucugugcugaacgauauccugagcagacuggacccuccugaggccgaggugcagaucgacagacugaucacaggcagacugcagagccuccagacauacgugacccagcagcugaucagagccgccgagauuagagccucugccaaucuggccgccaccaagaugucugagugugugcugggccagagcaagagaguggacuuuugcggcaagggcuaccaccugaugagcuucccucagucugccccucacggcgugguguuucugcacgugacauaugugcccgcucaagagaagaauuucaccaccgcuccagccaucugccacgacggcaaagcccacuuuccuagagaaggcguguucguguccaacggcacccauugguucgugacacagcggaacuucuacgagccccagaucaucaccaccgacaacaccuucgugucuggcaacugcgacgucgugaucggcauugugaacaauaccguguacgacccucugcagcccgagcuggacagcuucaaagaggaacuggacaaguacuuuaagaaccacacaagccccgacguggaccugggcgauaucagcggaaucaaugccagcgucgugaacauccagaaagagaucgaccggcugaacgagguggccaagaaucugaacgagagccugaucgaccugcaagaacuggggaaguacgagcaguacaucaaguggcccugguacaucuggcugggcuuuaucgccggacugauugccaucgugauggucacaaucaugcuguguugcaugaccagcugcuguagcugccugaagggcuguuguagcuguggcagcugcugcaaguucgacgaggacgauucugagcccgugcugaagggcgugaaacugcacuacacaugaggacuaguuauaagacugacuagcccgaugggccucccaacgggcccuccuccccuccuugcaccgagagaucucaaaggcucuuuucagagccaccaaaaaaaaaaaaaaaaaaaaaaaaaaaaaaaaaaaaaaaaaaaaaaaaaaaaaaaaaaaaaaaaaaaaaaaaaaaaaaaaaaaaaaaaaaaaaaaaaaaaa

SEQ ID NO: 24710 - RNA, 4035 nt, Artificial Sequence
  SARS-CoV-2/Wuhan/WIV05/2019__EPI_ISL_402128 spike protein mRNA gc mod (1-1273)(K986P_V987P_N439K_D614G)
aggagaaagcuuaccauguucguguuccuggugcugcugccucugguguccagccagugugugaaccugaccaccagaacacagcugccuccagccuacaccaacagcuuuaccagaggcguguacuaccccgacaagguguucagauccagcgugcugcacucuacccaggaccuguuccugccuuucuucagcaacgugaccugguuccacgccauccacguguccggcaccaauggcaccaagagauucgacaaccccgugcugcccuucaacgacgggguguacuuugccagcaccgagaaguccaacaucaucagaggcuggaucuucggcaccacacuggacagcaagacccagagccugcugaucgugaacaacgccaccaacguggucaucaaagugugcgaguuccaguucugcaacgaccccuuccugggcgucuacuaccacaagaacaacaagagcuggauggaaagcgaguuccggguguacagcagcgccaacaacugcaccuucgaguacgugucccagccuuuccugauggaccuggaaggcaagcagggcaacuucaagaaccugcgcgaguucguguuuaagaacaucgacggcuacuucaagaucuacagcaagcacaccccuaucaaccucgugcgggaucugccucagggcuucucugcucuggaaccccugguggaucugcccaucggcaucaacaucacccgguuucagacacugcuggcccugcacagaagcuaccugacaccuggcgauagcagcagcggauggacagcuggugccgccgcuuacuaugugggcuaccugcagccuagaaccuuccugcugaaguacaacgagaacggcaccaucaccgacgccguggauugugcucuggauccucugagcgagacaaagugcacccugaaguccuucaccguggaaaagggcaucuaccagaccagcaacuuccgggugcagcccaccgaauccaucgugcgguuccccaauaucaccaaucugugccccuucggcgagguguucaaugccaccagauucgccucuguguacgccuggaaccggaagcggaucagcaauugcguggccgacuacuccgugcuguacaacuccgccagcuucagcaccuucaagugcuacggcguguccccuaccaagcugaacgaccugugcuucacaaacguguacgccgacagcuucgugauccggggagaugaagugcggcagauugccccuggacagacaggcaagaucgccgacuacaacuacaagcugcccgacgacuucaccggcugugugauugccuggaacagcaagaaccuggacuccaaagucggcggcaacuacaauuaccuguaccggcuguuccggaaguccaaucugaagcccuucgagcgggacaucuccaccgagaucuaucaggccggcagcaccccuuguaacggcguggaaggcuucaacugcuacuucccacugcaguccuacggcuuucagcccacaaauggcgugggcuaucagcccuacagagugguggugcugagcuucgaacugcugcaugccccugccacagugugcggcccuaagaaaagcaccaaucucgugaagaacaaaugcgugaacuucaacuucaacggccugaccggcaccggcgugcugacagagagcaacaagaaguuccugccauuccagcaguuuggccgggauaucgccgauaccacagacgccguuagagauccccagacacuggaaauccuggacaucaccccuugcagcuucggcggagugucugugaucaccccuggcaccaacaccagcaaucagguggcagugcuguaccagggcgugaacuguaccgaagugcccguggccauucacgccgaucagcugacaccuacauggcggguguacuccaccggcagcaauguguuucagaccagagccggcugucugaucggagccgagcacgugaacaauagcuacgagugcgacauccccaucggcgcuggaaucugcgccagcuaccagacacagacaaacagcccucggagagccagaagcguggccagccagagcaucauugccuacacaaugucucugggcgccgagaacagcguggccuacuccaacaacucuaucgcuauccccaccaacuucaccaucagcgugaccacagagauccugccuguguccaugaccaagaccagcguggacugcaccauguacaucugcggcgauuccaccgagugcuccaaccugcugcugcaguacggcagcuucugcacccagcugaauagagcccugacagggaucgccguggaacaggacaagaacacccaagagguguucgcccaagugaagcagaucuacaagaccccuccuaucaaggacuucggcggcuucaauuucagccagauucugcccgauccuagcaagcccagcaagcggagcuucaucgaggaccugcuguucaacaaagugacacuggccgacgccggcuucaucaagcaguauggcgauugucugggcgacauugccgccagggaucugauuugcgcccagaaguuuaacggacugacagugcugccuccucugcugaccgaugagaugaucgcccaguacacaucugcccugcuggccggcacaaucacaagcggcuggacauuuggagcaggcgccgcucugcagauccccuuugcuaugcagauggccuaccgguucaacggcaucggagugacccagaaugugcuguacgagaaccagaagcugaucgccaaccaguucaacagcgccaucggcaagauccaggacagccugagcagcacagcaagcgcccugggaaagcugcaggacguggucaaccagaaugcccaggcacugaacacccuggucaagcagcuguccuccaacuucggcgccaucagcucugugcugaacgauauccugagcagacuggacccuccugaggccgaggugcagaucgacagacugaucacaggcagacugcagagccuccagacauacgugacccagcagcugaucagagccgccgagauuagagccucugccaaucuggccgccaccaagaugucugagugugugcugggccagagcaagagaguggacuuuugcggcaagggcuaccaccugaugagcuucccucagucugccccucacggcgugguguuucugcacgugacauaugugcccgcucaagagaagaauuucaccaccgcuccagccaucugccacgacggcaaagcccacuuuccuagagaaggcguguucguguccaacggcacccauugguucgugacacagcggaacuucuacgagccccagaucaucaccaccgacaacaccuucgugucuggcaacugcgacgucgugaucggcauugugaacaauaccguguacgacccucugcagcccgagcuggacagcuucaaagaggaacuggacaaguacuuuaagaaccacacaagccccgacguggaccugggcgauaucagcggaaucaaugccagcgucgugaacauccagaaagagaucgaccggcugaacgagguggccaagaaucugaacgagagccugaucgaccugcaagaacuggggaaguacgagcaguacaucaaguggcccugguacaucuggcugggcuuuaucgccggacugauugccaucgugauggucacaaucaugcuguguugcaugaccagcugcuguagcugccugaagggcuguuguagcuguggcagcugcugcaaguucgacgaggacgauucugagcccgugcugaagggcgugaaacugcacuacacaugaggacuaguuauaagacugacuagcccgaugggccucccaacgggcccuccuccccuccuugcaccgagagaucucaaaggcucuuuucagagccaccaaaaaaaaaaaaaaaaaaaaaaaaaaaaaaaaaaaaaaaaaaaaaaaaaaaaaaaaaaaaaaaaaaaaaaaaaaaaaaaaaaaaaaaaaaaaaaaaaaaaa

SEQ ID NO: 24711 - RNA, 4035 nt, Artificial Sequence
  SARS-CoV-2/Wuhan/WIV05/2019__EPI_ISL_402128 spike protein mRNA gc mod (1-1273)(K986P_V987P_S477N_D614G)
aggagaaagcuuaccauguucguguuccuggugcugcugccucugguguccagccagugugugaaccugaccaccagaacacagcugccuccagccuacaccaacagcuuuaccagaggcguguacuaccccgacaagguguucagauccagcgugcugcacucuacccaggaccuguuccugccuuucuucagcaacgugaccugguuccacgccauccacguguccggcaccaauggcaccaagagauucgacaaccccgugcugcccuucaacgacgggguguacuuugccagcaccgagaaguccaacaucaucagaggcuggaucuucggcaccacacuggacagcaagacccagagccugcugaucgugaacaacgccaccaacguggucaucaaagugugcgaguuccaguucugcaacgaccccuuccugggcgucuacuaccacaagaacaacaagagcuggauggaaagcgaguuccggguguacagcagcgccaacaacugcaccuucgaguacgugucccagccuuuccugauggaccuggaaggcaagcagggcaacuucaagaaccugcgcgaguucguguuuaagaacaucgacggcuacuucaagaucuacagcaagcacaccccuaucaaccucgugcgggaucugccucagggcuucucugcucuggaaccccugguggaucugcccaucggcaucaacaucacccgguuucagacacugcuggcccugcacagaagcuaccugacaccuggcgauagcagcagcggauggacagcuggugccgccgcuuacuaugugggcuaccugcagccuagaaccuuccugcugaaguacaacgagaacggcaccaucaccgacgccguggauugugcucuggauccucugagcgagacaaagugcacccugaaguccuucaccguggaaaagggcaucuaccagaccagcaacuuccgggugcagcccaccgaauccaucgugcgguuccccaauaucaccaaucugugccccuucggcgagguguucaaugccaccagauucgccucuguguacgccuggaaccggaagcggaucagcaauugcguggccgacuacuccgugcuguacaacuccgccagcuucagcaccuucaagugcuacggcguguccccuaccaagcugaacgaccugugcuucacaaacguguacgccgacagcuucgugauccggggagaugaagugcggcagauugccccuggacagacaggcaagaucgccgacuacaacuacaagcugcccgacgacuucaccggcugugugauugccuggaacagcaacaaccuggacuccaaagucggcggcaacuacaauuaccuguaccggcuguuccggaaguccaaucugaagcccuucgagcgggacaucuccaccgagaucuaucaggccggcaacaccccuuguaacggcguggaaggcuucaacugcuacuucccacugcaguccuacggcuuucagcccacaaauggcgugggcuaucagcccuacagagugguggugcugagcuucgaacugcugcaugccccugccacagugugcggcccuaagaaaagcaccaaucucgugaagaacaaaugcgugaacuucaacuucaacggccugaccggcaccggcgugcugacagagagcaacaagaaguuccugccauuccagcaguuuggccgggauaucgccgauaccacagacgccguuagagauccccagacacuggaaauccuggacaucaccccuugcagcuucggcggagugucugugaucaccccuggcaccaacaccagcaaucagguggcagugcuguaccagggcgugaacuguaccgaagugcccguggccauucacgccgaucagcugacaccuacauggcggguguacuccaccggcagcaauguguuucagaccagagccggcugucugaucggagccgagcacgugaacaauagcuacgagugcgacauccccaucggcgcuggaaucugcgccagcuaccagacacagacaaacagcccucggagagccagaagcguggccagccagagcaucauugccuacacaaugucucugggcgccgagaacagcguggccuacuccaacaacucuaucgcuauccccaccaacuucaccaucagcgugaccacagagauccugccuguguccaugaccaagaccagcguggacugcaccauguacaucugcggcgauuccaccgagugcuccaaccugcugcugcaguacggcagcuucugcacccagcugaauagagcccugacagggaucgccguggaacaggacaagaacacccaagagguguucgcccaagugaagcagaucuacaagaccccuccuaucaaggacuucggcggcuucaauuucagccagauucugcccgauccuagcaagcccagcaagcggagcuucaucgaggaccugcuguucaacaaagugacacuggccgacgccggcuucaucaagcaguauggcgauugucugggcgacauugccgccagggaucugauuugcgcccagaaguuuaacggacugacagugcugccuccucugcugaccgaugagaugaucgcccaguacacaucugcccugcuggccggcacaaucacaagcggcuggacauuuggagcaggcgccgcucugcagauccccuuugcuaugcagauggccuaccgguucaacggcaucggagugacccagaaugugcuguacgagaaccagaagcugaucgccaaccaguucaacagcgccaucggcaagauccaggacagccugagcagcacagcaagcgcccugggaaagcugcaggacguggucaaccagaaugcccaggcacugaacacccuggucaagcagcuguccuccaacuucggcgccaucagcucugugcugaacgauauccugagcagacuggacccuccugaggccgaggugcagaucgacagacugaucacaggcagacugcagagccuccagacauacgugacccagcagcugaucagagccgccgagauuagagccucugccaaucuggccgccaccaagaugucugagugugugcugggccagagcaagagaguggacuuuugcggcaagggcuaccaccugaugagcuucccucagucugccccucacggcgugguguuucugcacgugacauaugugcccgcucaagagaagaauuucaccaccgcuccagccaucugccacgacggcaaagcccacuuuccuagagaaggcguguucguguccaacggcacccauugguucgugacacagcggaacuucuacgagccccagaucaucaccaccgacaacaccuucgugucuggcaacugcgacgucgugaucggcauugugaacaauaccguguacgacccucugcagcccgagcuggacagcuucaaagaggaacuggacaaguacuuuaagaaccacacaagccccgacguggaccugggcgauaucagcggaaucaaugccagcgucgugaacauccagaaagagaucgaccggcugaacgagguggccaagaaucugaacgagagccugaucgaccugcaagaacuggggaaguacgagcaguacaucaaguggcccugguacaucuggcugggcuuuaucgccggacugauugccaucgugauggucacaaucaugcuguguugcaugaccagcugcuguagcugccugaagggcuguuguagcuguggcagcugcugcaaguucgacgaggacgauucugagcccgugcugaagggcgugaaacugcacuacacaugaggacuaguuauaagacugacuagcccgaugggccucccaacgggcccuccuccccuccuugcaccgagagaucucaaaggcucuuuucagagccaccaaaaaaaaaaaaaaaaaaaaaaaaaaaaaaaaaaaaaaaaaaaaaaaaaaaaaaaaaaaaaaaaaaaaaaaaaaaaaaaaaaaaaaaaaaaaaaaaaaaaa

SEQ ID NO: 24712 - RNA, 4035 nt, Artificial Sequence
  SARS-CoV-2/Wuhan/WIV05/2019__EPI_ISL_402128 spike protein mRNA gc mod (1-1273)(K986P_V987P_N501Y_D614G)
aggagaaagcuuaccauguucguguuccuggugcugcugccucugguguccagccagugugugaaccugaccaccagaacacagcugccuccagccuacaccaacagcuuuaccagaggcguguacuaccccgacaagguguucagauccagcgugcugcacucuacccaggaccuguuccugccuuucuucagcaacgugaccugguuccacgccauccacguguccggcaccaauggcaccaagagauucgacaaccccgugcugcccuucaacgacgggguguacuuugccagcaccgagaaguccaacaucaucagaggcuggaucuucggcaccacacuggacagcaagacccagagccugcugaucgugaacaacgccaccaacguggucaucaaagugugcgaguuccaguucugcaacgaccccuuccugggcgucuacuaccacaagaacaacaagagcuggauggaaagcgaguuccggguguacagcagcgccaacaacugcaccuucgaguacgugucccagccuuuccugauggaccuggaaggcaagcagggcaacuucaagaaccugcgcgaguucguguuuaagaacaucgacggcuacuucaagaucuacagcaagcacaccccuaucaaccucgugcgggaucugccucagggcuucucugcucuggaaccccugguggaucugcccaucggcaucaacaucacccgguuucagacacugcuggcccugcacagaagcuaccugacaccuggcgauagcagcagcggauggacagcuggugccgccgcuuacuaugugggcuaccugcagccuagaaccuuccugcugaaguacaacgagaacggcaccaucaccgacgccguggauugugcucuggauccucugagcgagacaaagugcacccugaaguccuucaccguggaaaagggcaucuaccagaccagcaacuuccgggugcagcccaccgaauccaucgugcgguuccccaauaucaccaaucugugccccuucggcgagguguucaaugccaccagauucgccucuguguacgccuggaaccggaagcggaucagcaauugcguggccgacuacuccgugcuguacaacuccgccagcuucagcaccuucaagugcuacggcguguccccuaccaagcugaacgaccugugcuucacaaacguguacgccgacagcuucgugauccggggagaugaagugcggcagauugccccuggacagacaggcaagaucgccgacuacaacuacaagcugcccgacgacuucaccggcugugugauugccuggaacagcaacaaccuggacuccaaagucggcggcaacuacaauuaccuguaccggcuguuccggaaguccaaucugaagcccuucgagcgggacaucuccaccgagaucuaucaggccggcagcaccccuuguaacggcguggaaggcuucaacugcuacuucccacugcaguccuacggcuuucagcccacauacggcgugggcuaucagcccuacagagugguggugcugagcuucgaacugcugcaugccccugccacagugugcggcccuaagaaaagcaccaaucucgugaagaacaaaugcgugaacuucaacuucaacggccugaccggcaccggcgugcugacagagagcaacaagaaguuccugccauuccagcaguuuggccgggauaucgccgauaccacagacgccguuagagauccccagacacuggaaauccuggacaucaccccuugcagcuucggcggagugucugugaucaccccuggcaccaacaccagcaaucagguggcagugcuguaccagggcgugaacuguaccgaagugcccguggccauucacgccgaucagcugacaccuacauggcggguguacuccaccggcagcaauguguuucagaccagagccggcugucugaucggagccgagcacgugaacaauagcuacgagugcgacauccccaucggcgcuggaaucugcgccagcuaccagacacagacaaacagcccucggagagccagaagcguggccagccagagcaucauugccuacacaaugucucugggcgccgagaacagcguggccuacuccaacaacucuaucgcuauccccaccaacuucaccaucagcgugaccacagagauccugccuguguccaugaccaagaccagcguggacugcaccauguacaucugcggcgauuccaccgagugcuccaaccugcugcugcaguacggcagcuucugcacccagcugaauagagcccugacagggaucgccguggaacaggacaagaacacccaagagguguucgcccaagugaagcagaucuacaagaccccuccuaucaaggacuucggcggcuucaauuucagccagauucugcccgauccuagcaagcccagcaagcggagcuucaucgaggaccugcuguucaacaaagugacacuggccgacgccggcuucaucaagcaguauggcgauugucugggcgacauugccgccagggaucugauuugcgcccagaaguuuaacggacugacagugcugccuccucugcugaccgaugagaugaucgcccaguacacaucugcccugcuggccggcacaaucacaagcggcuggacauuuggagcaggcgccgcucugcagauccccuuugcuaugcagauggccuaccgguucaacggcaucggagugacccagaaugugcuguacgagaaccagaagcugaucgccaaccaguucaacagcgccaucggcaagauccaggacagccugagcagcacagcaagcgcccugggaaagcugcaggacguggucaaccagaaugcccaggcacugaacacccuggucaagcagcuguccuccaacuucggcgccaucagcucugugcugaacgauauccugagcagacuggacccuccugaggccgaggugcagaucgacagacugaucacaggcagacugcagagccuccagacauacgugacccagcagcugaucagagccgccgagauuagagccucugccaaucuggccgccaccaagaugucugagugugugcugggccagagcaagagaguggacuuuugcggcaagggcuaccaccugaugagcuucccucagucugccccucacggcgugguguuucugcacgugacauaugugcccgcucaagagaagaauuucaccaccgcuccagccaucugccacgacggcaaagcccacuuuccuagagaaggcguguucguguccaacggcacccauugguucgugacacagcggaacuucuacgagccccagaucaucaccaccgacaacaccuucgugucuggcaacugcgacgucgugaucggcauugugaacaauaccguguacgacccucugcagcccgagcuggacagcuucaaagaggaacuggacaaguacuuuaagaaccacacaagccccgacguggaccugggcgauaucagcggaaucaaugccagcgucgugaacauccagaaagagaucgaccggcugaacgagguggccaagaaucugaacgagagccugaucgaccugcaagaacuggggaaguacgagcaguacaucaaguggcccugguacaucuggcugggcuuuaucgccggacugauugccaucgugauggucacaaucaugcuguguugcaugaccagcugcuguagcugccugaagggcuguuguagcuguggcagcugcugcaaguucgacgaggacgauucugagcccgugcugaagggcgugaaacugcacuacacaugaggacuaguuauaagacugacuagcccgaugggccucccaacgggcccuccuccccuccuugcaccgagagaucucaaaggcucuuuucagagccaccaaaaaaaaaaaaaaaaaaaaaaaaaaaaaaaaaaaaaaaaaaaaaaaaaaaaaaaaaaaaaaaaaaaaaaaaaaaaaaaaaaaaaaaaaaaaaaaaaaaaa

SEQ ID NO: 24713 - RNA, 4029 nt, Artificial Sequence
  SARS-CoV-2/Wuhan/WIV05/2019__EPI_ISL_402128 spike protein mRNA gc mod (1-1273)(K986P_V987P_H69del_V70del_D614G)
aggagaaagcuuaccauguucguguuccuggugcugcugccucugguguccagccagugugugaaccugaccaccagaacacagcugccuccagccuacaccaacagcuuuaccagaggcguguacuaccccgacaagguguucagauccagcgugcugcacucuacccaggaccuguuccugccuuucuucagcaacgugaccugguuccacgccaucuccggcaccaauggcaccaagagauucgacaaccccgugcugcccuucaacgacgggguguacuuugccagcaccgagaaguccaacaucaucagaggcuggaucuucggcaccacacuggacagcaagacccagagccugcugaucgugaacaacgccaccaacguggucaucaaagugugcgaguuccaguucugcaacgaccccuuccugggcgucuacuaccacaagaacaacaagagcuggauggaaagcgaguuccggguguacagcagcgccaacaacugcaccuucgaguacgugucccagccuuuccugauggaccuggaaggcaagcagggcaacuucaagaaccugcgcgaguucguguuuaagaacaucgacggcuacuucaagaucuacagcaagcacaccccuaucaaccucgugcgggaucugccucagggcuucucugcucuggaaccccugguggaucugcccaucggcaucaacaucacccgguuucagacacugcuggcccugcacagaagcuaccugacaccuggcgauagcagcagcggauggacagcuggugccgccgcuuacuaugugggcuaccugcagccuagaaccuuccugcugaaguacaacgagaacggcaccaucaccgacgccguggauugugcucuggauccucugagcgagacaaagugcacccugaaguccuucaccguggaaaagggcaucuaccagaccagcaacuuccgggugcagcccaccgaauccaucgugcgguuccccaauaucaccaaucugugccccuucggcgagguguucaaugccaccagauucgccucuguguacgccuggaaccggaagcggaucagcaauugcguggccgacuacuccgugcuguacaacuccgccagcuucagcaccuucaagugcuacggcguguccccuaccaagcugaacgaccugugcuucacaaacguguacgccgacagcuucgugauccggggagaugaagugcggcagauugccccuggacagacaggcaagaucgccgacuacaacuacaagcugcccgacgacuucaccggcugugugauugccuggaacagcaacaaccuggacuccaaagucggcggcaacuacaauuaccuguaccggcuguuccggaaguccaaucugaagcccuucgagcgggacaucuccaccgagaucuaucaggccggcagcaccccuuguaacggcguggaaggcuucaacugcuacuucccacugcaguccuacggcuuucagcccacaaauggcgugggcuaucagcccuacagagugguggugcugagcuucgaacugcugcaugccccugccacagugugcggcccuaagaaaagcaccaaucucgugaagaacaaaugcgugaacuucaacuucaacggccugaccggcaccggcgugcugacagagagcaacaagaaguuccugccauuccagcaguuuggccgggauaucgccgauaccacagacgccguuagagauccccagacacuggaaauccuggacaucaccccuugcagcuucggcggagugucugugaucaccccuggcaccaacaccagcaaucagguggcagugcuguaccagggcgugaacuguaccgaagugcccguggccauucacgccgaucagcugacaccuacauggcggguguacuccaccggcagcaauguguuucagaccagagccggcugucugaucggagccgagcacgugaacaauagcuacgagugcgacauccccaucggcgcuggaaucugcgccagcuaccagacacagacaaacagcccucggagagccagaagcguggccagccagagcaucauugccuacacaaugucucugggcgccgagaacagcguggccuacuccaacaacucuaucgcuauccccaccaacuucaccaucagcgugaccacagagauccugccuguguccaugaccaagaccagcguggacugcaccauguacaucugcggcgauuccaccgagugcuccaaccugcugcugcaguacggcagcuucugcacccagcugaauagagcccugacagggaucgccguggaacaggacaagaacacccaagagguguucgcccaagugaagcagaucuacaagaccccuccuaucaaggacuucggcggcuucaauuucagccagauucugcccgauccuagcaagcccagcaagcggagcuucaucgaggaccugcuguucaacaaagugacacuggccgacgccggcuucaucaagcaguauggcgauugucugggcgacauugccgccagggaucugauuugcgcccagaaguuuaacggacugacagugcugccuccucugcugaccgaugagaugaucgcccaguacacaucugcccugcuggccggcacaaucacaagcggcuggacauuuggagcaggcgccgcucugcagauccccuuugcuaugcagauggccuaccgguucaacggcaucggagugacccagaaugugcuguacgagaaccagaagcugaucgccaaccaguucaacagcgccaucggcaagauccaggacagccugagcagcacagcaagcgcccugggaaagcugcaggacguggucaaccagaaugcccaggcacugaacacccuggucaagcagcuguccuccaacuucggcgccaucagcucugugcugaacgauauccugagcagacuggacccuccugaggccgaggugcagaucgacagacugaucacaggcagacugcagagccuccagacauacgugacccagcagcugaucagagccgccgagauuagagccucugccaaucuggccgccaccaagaugucugagugugugcugggccagagcaagagaguggacuuuugcggcaagggcuaccaccugaugagcuucccucagucugccccucacggcgugguguuucugcacgugacauaugugcccgcucaagagaagaauuucaccaccgcuccagccaucugccacgacggcaaagcccacuuuccuagagaaggcguguucguguccaacggcacccauugguucgugacacagcggaacuucuacgagccccagaucaucaccaccgacaacaccuucgugucuggcaacugcgacgucgugaucggcauugugaacaauaccguguacgacccucugcagcccgagcuggacagcuucaaagaggaacuggacaaguacuuuaagaaccacacaagccccgacguggaccugggcgauaucagcggaaucaaugccagcgucgugaacauccagaaagagaucgaccggcugaacgagguggccaagaaucugaacgagagccugaucgaccugcaagaacuggggaaguacgagcaguacaucaaguggcccugguacaucuggcugggcuuuaucgccggacugauugccaucgugauggucacaaucaugcuguguugcaugaccagcugcuguagcugccugaagggcuguuguagcuguggcagcugcugcaaguucgacgaggacgauucugagcccgugcugaagggcgugaaacugcacuacacaugaggacuaguuauaagacugacuagcccgaugggccucccaacgggcccuccuccccuccuugcaccgagagaucucaaaggcucuuuucagagccaccaaaaaaaaaaaaaaaaaaaaaaaaaaaaaaaaaaaaaaaaaaaaaaaaaaaaaaaaaaaaaaaaaaaaaaaaaaaaaaaaaaaaaaaaaaaaaaaaaaaaa

SEQ ID NO: 24714 - RNA, 4035 nt, Artificial Sequence
  SARS-CoV-2/Wuhan/WIV05/2019__EPI_ISL_402128 spike protein mRNA gc mod (1-1273)(K986P_V987P_Y453F_D614G)
aggagaaagcuuaccauguucguguuccuggugcugcugccucugguguccagccagugugugaaccugaccaccagaacacagcugccuccagccuacaccaacagcuuuaccagaggcguguacuaccccgacaagguguucagauccagcgugcugcacucuacccaggaccuguuccugccuuucuucagcaacgugaccugguuccacgccauccacguguccggcaccaauggcaccaagagauucgacaaccccgugcugcccuucaacgacgggguguacuuugccagcaccgagaaguccaacaucaucagaggcuggaucuucggcaccacacuggacagcaagacccagagccugcugaucgugaacaacgccaccaacguggucaucaaagugugcgaguuccaguucugcaacgaccccuuccugggcgucuacuaccacaagaacaacaagagcuggauggaaagcgaguuccggguguacagcagcgccaacaacugcaccuucgaguacgugucccagccuuuccugauggaccuggaaggcaagcagggcaacuucaagaaccugcgcgaguucguguuuaagaacaucgacggcuacuucaagaucuacagcaagcacaccccuaucaaccucgugcgggaucugccucagggcuucucugcucuggaaccccugguggaucugcccaucggcaucaacaucacccgguuucagacacugcuggcccugcacagaagcuaccugacaccuggcgauagcagcagcggauggacagcuggugccgccgcuuacuaugugggcuaccugcagccuagaaccuuccugcugaaguacaacgagaacggcaccaucaccgacgccguggauugugcucuggauccucugagcgagacaaagugcacccugaaguccuucaccguggaaaagggcaucuaccagaccagcaacuuccgggugcagcccaccgaauccaucgugcgguuccccaauaucaccaaucugugccccuucggcgagguguucaaugccaccagauucgccucuguguacgccuggaaccggaagcggaucagcaauugcguggccgacuacuccgugcuguacaacuccgccagcuucagcaccuucaagugcuacggcguguccccuaccaagcugaacgaccugugcuucacaaacguguacgccgacagcuucgugauccggggagaugaagugcggcagauugccccuggacagacaggcaagaucgccgacuacaacuacaagcugcccgacgacuucaccggcugugugauugccuggaacagcaacaaccuggacuccaaagucggcggcaacuacaauuaccuguuccggcuguuccggaaguccaaucugaagcccuucgagcgggacaucuccaccgagaucuaucaggccggcagcaccccuuguaacggcguggaaggcuucaacugcuacuucccacugcaguccuacggcuuucagcccacaaauggcgugggcuaucagcccuacagagugguggugcugagcuucgaacugcugcaugccccugccacagugugcggcccuaagaaaagcaccaaucucgugaagaacaaaugcgugaacuucaacuucaacggccugaccggcaccggcgugcugacagagagcaacaagaaguuccugccauuccagcaguuuggccgggauaucgccgauaccacagacgccguuagagauccccagacacuggaaauccuggacaucaccccuugcagcuucggcggagugucugugaucaccccuggcaccaacaccagcaaucagguggcagugcuguaccagggcgugaacuguaccgaagugcccguggccauucacgccgaucagcugacaccuacauggcggguguacuccaccggcagcaauguguuucagaccagagccggcugucugaucggagccgagcacgugaacaauagcuacgagugcgacauccccaucggcgcuggaaucugcgccagcuaccagacacagacaaacagcccucggagagccagaagcguggccagccagagcaucauugccuacacaaugucucugggcgccgagaacagcguggccuacuccaacaacucuaucgcuauccccaccaacuucaccaucagcgugaccacagagauccugccuguguccaugaccaagaccagcguggacugcaccauguacaucugcggcgauuccaccgagugcuccaaccugcugcugcaguacggcagcuucugcacccagcugaauagagcccugacagggaucgccguggaacaggacaagaacacccaagagguguucgcccaagugaagcagaucuacaagaccccuccuaucaaggacuucggcggcuucaauuucagccagauucugcccgauccuagcaagcccagcaagcggagcuucaucgaggaccugcuguucaacaaagugacacuggccgacgccggcuucaucaagcaguauggcgauugucugggcgacauugccgccagggaucugauuugcgcccagaaguuuaacggacugacagugcugccuccucugcugaccgaugagaugaucgcccaguacacaucugcccugcuggccggcacaaucacaagcggcuggacauuuggagcaggcgccgcucugcagauccccuuugcuaugcagauggccuaccgguucaacggcaucggagugacccagaaugugcuguacgagaaccagaagcugaucgccaaccaguucaacagcgccaucggcaagauccaggacagccugagcagcacagcaagcgcccugggaaagcugcaggacguggucaaccagaaugcccaggcacugaacacccuggucaagcagcuguccuccaacuucggcgccaucagcucugugcugaacgauauccugagcagacuggacccuccugaggccgaggugcagaucgacagacugaucacaggcagacugcagagccuccagacauacgugacccagcagcugaucagagccgccgagauuagagccucugccaaucuggccgccaccaagaugucugagugugugcugggccagagcaagagaguggacuuuugcggcaagggcuaccaccugaugagcuucccucagucugccccucacggcgugguguuucugcacgugacauaugugcccgcucaagagaagaauuucaccaccgcuccagccaucugccacgacggcaaagcccacuuuccuagagaaggcguguucguguccaacggcacccauugguucgugacacagcggaacuucuacgagccccagaucaucaccaccgacaacaccuucgugucuggcaacugcgacgucgugaucggcauugugaacaauaccguguacgacccucugcagcccgagcuggacagcuucaaagaggaacuggacaaguacuuuaagaaccacacaagccccgacguggaccugggcgauaucagcggaaucaaugccagcgucgugaacauccagaaagagaucgaccggcugaacgagguggccaagaaucugaacgagagccugaucgaccugcaagaacuggggaaguacgagcaguacaucaaguggcccugguacaucuggcugggcuuuaucgccggacugauugccaucgugauggucacaaucaugcuguguugcaugaccagcugcuguagcugccugaagggcuguuguagcuguggcagcugcugcaaguucgacgaggacgauucugagcccgugcugaagggcgugaaacugcacuacacaugaggacuaguuauaagacugacuagcccgaugggccucccaacgggcccuccuccccuccuugcaccgagagaucucaaaggcucuuuucagagccaccaaaaaaaaaaaaaaaaaaaaaaaaaaaaaaaaaaaaaaaaaaaaaaaaaaaaaaaaaaaaaaaaaaaaaaaaaaaaaaaaaaaaaaaaaaaaaaaaaaaaa

SEQ ID NO: 24715 - RNA, 4035 nt, Artificial Sequence
  SARS-CoV-2/Wuhan/WIV05/2019__EPI_ISL_402128 spike protein mRNA gc mod (1-1273)(K986P_V987P_D614G_I692V)
aggagaaagcuuaccauguucguguuccuggugcugcugccucugguguccagccagugugugaaccugaccaccagaacacagcugccuccagccuacaccaacagcuuuaccagaggcguguacuaccccgacaagguguucagauccagcgugcugcacucuacccaggaccuguuccugccuuucuucagcaacgugaccugguuccacgccauccacguguccggcaccaauggcaccaagagauucgacaaccccgugcugcccuucaacgacgggguguacuuugccagcaccgagaaguccaacaucaucagaggcuggaucuucggcaccacacuggacagcaagacccagagccugcugaucgugaacaacgccaccaacguggucaucaaagugugcgaguuccaguucugcaacgaccccuuccugggcgucuacuaccacaagaacaacaagagcuggauggaaagcgaguuccggguguacagcagcgccaacaacugcaccuucgaguacgugucccagccuuuccugauggaccuggaaggcaagcagggcaacuucaagaaccugcgcgaguucguguuuaagaacaucgacggcuacuucaagaucuacagcaagcacaccccuaucaaccucgugcgggaucugccucagggcuucucugcucuggaaccccugguggaucugcccaucggcaucaacaucacccgguuucagacacugcuggcccugcacagaagcuaccugacaccuggcgauagcagcagcggauggacagcuggugccgccgcuuacuaugugggcuaccugcagccuagaaccuuccugcugaaguacaacgagaacggcaccaucaccgacgccguggauugugcucuggauccucugagcgagacaaagugcacccugaaguccuucaccguggaaaagggcaucuaccagaccagcaacuuccgggugcagcccaccgaauccaucgugcgguuccccaauaucaccaaucugugccccuucggcgagguguucaaugccaccagauucgccucuguguacgccuggaaccggaagcggaucagcaauugcguggccgacuacuccgugcuguacaacuccgccagcuucagcaccuucaagugcuacggcguguccccuaccaagcugaacgaccugugcuucacaaacguguacgccgacagcuucgugauccggggagaugaagugcggcagauugccccuggacagacaggcaagaucgccgacuacaacuacaagcugcccgacgacuucaccggcugugugauugccuggaacagcaacaaccuggacuccaaagucggcggcaacuacaauuaccuguaccggcuguuccggaaguccaaucugaagcccuucgagcgggacaucuccaccgagaucuaucaggccggcagcaccccuuguaacggcguggaaggcuucaacugcuacuucccacugcaguccuacggcuuucagcccacaaauggcgugggcuaucagcccuacagagugguggugcugagcuucgaacugcugcaugccccugccacagugugcggcccuaagaaaagcaccaaucucgugaagaacaaaugcgugaacuucaacuucaacggccugaccggcaccggcgugcugacagagagcaacaagaaguuccugccauuccagcaguuuggccgggauaucgccgauaccacagacgccguuagagauccccagacacuggaaauccuggacaucaccccuugcagcuucggcggagugucugugaucaccccuggcaccaacaccagcaaucagguggcagugcuguaccagggcgugaacuguaccgaagugcccguggccauucacgccgaucagcugacaccuacauggcggguguacuccaccggcagcaauguguuucagaccagagccggcugucugaucggagccgagcacgugaacaauagcuacgagugcgacauccccaucggcgcuggaaucugcgccagcuaccagacacagacaaacagcccucggagagccagaagcguggccagccagagcgugauugccuacacaaugucucugggcgccgagaacagcguggccuacuccaacaacucuaucgcuauccccaccaacuucaccaucagcgugaccacagagauccugccuguguccaugaccaagaccagcguggacugcaccauguacaucugcggcgauuccaccgagugcuccaaccugcugcugcaguacggcagcuucugcacccagcugaauagagcccugacagggaucgccguggaacaggacaagaacacccaagagguguucgcccaagugaagcagaucuacaagaccccuccuaucaaggacuucggcggcuucaauuucagccagauucugcccgauccuagcaagcccagcaagcggagcuucaucgaggaccugcuguucaacaaagugacacuggccgacgccggcuucaucaagcaguauggcgauugucugggcgacauugccgccagggaucugauuugcgcccagaaguuuaacggacugacagugcugccuccucugcugaccgaugagaugaucgcccaguacacaucugcccugcuggccggcacaaucacaagcggcuggacauuuggagcaggcgccgcucugcagauccccuuugcuaugcagauggccuaccgguucaacggcaucggagugacccagaaugugcuguacgagaaccagaagcugaucgccaaccaguucaacagcgccaucggcaagauccaggacagccugagcagcacagcaagcgcccugggaaagcugcaggacguggucaaccagaaugcccaggcacugaacacccuggucaagcagcuguccuccaacuucggcgccaucagcucugugcugaacgauauccugagcagacuggacccuccugaggccgaggugcagaucgacagacugaucacaggcagacugcagagccuccagacauacgugacccagcagcugaucagagccgccgagauuagagccucugccaaucuggccgccaccaagaugucugagugugugcugggccagagcaagagaguggacuuuugcggcaagggcuaccaccugaugagcuucccucagucugccccucacggcgugguguuucugcacgugacauaugugcccgcucaagagaagaauuucaccaccgcuccagccaucugccacgacggcaaagcccacuuuccuagagaaggcguguucguguccaacggcacccauugguucgugacacagcggaacuucuacgagccccagaucaucaccaccgacaacaccuucgugucuggcaacugcgacgucgugaucggcauugugaacaauaccguguacgacccucugcagcccgagcuggacagcuucaaagaggaacuggacaaguacuuuaagaaccacacaagccccgacguggaccugggcgauaucagcggaaucaaugccagcgucgugaacauccagaaagagaucgaccggcugaacgagguggccaagaaucugaacgagagccugaucgaccugcaagaacuggggaaguacgagcaguacaucaaguggcccugguacaucuggcugggcuuuaucgccggacugauugccaucgugauggucacaaucaugcuguguugcaugaccagcugcuguagcugccugaagggcuguuguagcuguggcagcugcugcaaguucgacgaggacgauucugagcccgugcugaagggcgugaaacugcacuacacaugaggacuaguuauaagacugacuagcccgaugggccucccaacgggcccuccuccccuccuugcaccgagagaucucaaaggcucuuuucagagccaccaaaaaaaaaaaaaaaaaaaaaaaaaaaaaaaaaaaaaaaaaaaaaaaaaaaaaaaaaaaaaaaaaaaaaaaaaaaaaaaaaaaaaaaaaaaaaaaaaaaaa

SEQ ID NO: 24716 - RNA, 4035 nt, Artificial Sequence
  SARS-CoV-2/Wuhan/WIV05/2019__EPI_ISL_402128 spike protein mRNA gc mod (1-1273)(K986P_V987P_D614G_M1229I)
aggagaaagcuuaccauguucguguuccuggugcugcugccucugguguccagccagugugugaaccugaccaccagaacacagcugccuccagccuacaccaacagcuuuaccagaggcguguacuaccccgacaagguguucagauccagcgugcugcacucuacccaggaccuguuccugccuuucuucagcaacgugaccugguuccacgccauccacguguccggcaccaauggcaccaagagauucgacaaccccgugcugcccuucaacgacgggguguacuuugccagcaccgagaaguccaacaucaucagaggcuggaucuucggcaccacacuggacagcaagacccagagccugcugaucgugaacaacgccaccaacguggucaucaaagugugcgaguuccaguucugcaacgaccccuuccugggcgucuacuaccacaagaacaacaagagcuggauggaaagcgaguuccggguguacagcagcgccaacaacugcaccuucgaguacgugucccagccuuuccugauggaccuggaaggcaagcagggcaacuucaagaaccugcgcgaguucguguuuaagaacaucgacggcuacuucaagaucuacagcaagcacaccccuaucaaccucgugcgggaucugccucagggcuucucugcucuggaaccccugguggaucugcccaucggcaucaacaucacccgguuucagacacugcuggcccugcacagaagcuaccugacaccuggcgauagcagcagcggauggacagcuggugccgccgcuuacuaugugggcuaccugcagccuagaaccuuccugcugaaguacaacgagaacggcaccaucaccgacgccguggauugugcucuggauccucugagcgagacaaagugcacccugaaguccuucaccguggaaaagggcaucuaccagaccagcaacuuccgggugcagcccaccgaauccaucgugcgguuccccaauaucaccaaucugugccccuucggcgagguguucaaugccaccagauucgccucuguguacgccuggaaccggaagcggaucagcaauugcguggccgacuacuccgugcuguacaacuccgccagcuucagcaccuucaagugcuacggcguguccccuaccaagcugaacgaccugugcuucacaaacguguacgccgacagcuucgugauccggggagaugaagugcggcagauugccccuggacagacaggcaagaucgccgacuacaacuacaagcugcccgacgacuucaccggcugugugauugccuggaacagcaacaaccuggacuccaaagucggcggcaacuacaauuaccuguaccggcuguuccggaaguccaaucugaagcccuucgagcgggacaucuccaccgagaucuaucaggccggcagcaccccuuguaacggcguggaaggcuucaacugcuacuucccacugcaguccuacggcuuucagcccacaaauggcgugggcuaucagcccuacagagugguggugcugagcuucgaacugcugcaugccccugccacagugugcggcccuaagaaaagcaccaaucucgugaagaacaaaugcgugaacuucaacuucaacggccugaccggcaccggcgugcugacagagagcaacaagaaguuccugccauuccagcaguuuggccgggauaucgccgauaccacagacgccguuagagauccccagacacuggaaauccuggacaucaccccuugcagcuucggcggagugucugugaucaccccuggcaccaacaccagcaaucagguggcagugcuguaccagggcgugaacuguaccgaagugcccguggccauucacgccgaucagcugacaccuacauggcggguguacuccaccggcagcaauguguuucagaccagagccggcugucugaucggagccgagcacgugaacaauagcuacgagugcgacauccccaucggcgcuggaaucugcgccagcuaccagacacagacaaacagcccucggagagccagaagcguggccagccagagcaucauugccuacacaaugucucugggcgccgagaacagcguggccuacuccaacaacucuaucgcuauccccaccaacuucaccaucagcgugaccacagagauccugccuguguccaugaccaagaccagcguggacugcaccauguacaucugcggcgauuccaccgagugcuccaaccugcugcugcaguacggcagcuucugcacccagcugaauagagcccugacagggaucgccguggaacaggacaagaacacccaagagguguucgcccaagugaagcagaucuacaagaccccuccuaucaaggacuucggcggcuucaauuucagccagauucugcccgauccuagcaagcccagcaagcggagcuucaucgaggaccugcuguucaacaaagugacacuggccgacgccggcuucaucaagcaguauggcgauugucugggcgacauugccgccagggaucugauuugcgcccagaaguuuaacggacugacagugcugccuccucugcugaccgaugagaugaucgcccaguacacaucugcccugcuggccggcacaaucacaagcggcuggacauuuggagcaggcgccgcucugcagauccccuuugcuaugcagauggccuaccgguucaacggcaucggagugacccagaaugugcuguacgagaaccagaagcugaucgccaaccaguucaacagcgccaucggcaagauccaggacagccugagcagcacagcaagcgcccugggaaagcugcaggacguggucaaccagaaugcccaggcacugaacacccuggucaagcagcuguccuccaacuucggcgccaucagcucugugcugaacgauauccugagcagacuggacccuccugaggccgaggugcagaucgacagacugaucacaggcagacugcagagccuccagacauacgugacccagcagcugaucagagccgccgagauuagagccucugccaaucuggccgccaccaagaugucugagugugugcugggccagagcaagagaguggacuuuugcggcaagggcuaccaccugaugagcuucccucagucugccccucacggcgugguguuucugcacgugacauaugugcccgcucaagagaagaauuucaccaccgcuccagccaucugccacgacggcaaagcccacuuuccuagagaaggcguguucguguccaacggcacccauugguucgugacacagcggaacuucuacgagccccagaucaucaccaccgacaacaccuucgugucuggcaacugcgacgucgugaucggcauugugaacaauaccguguacgacccucugcagcccgagcuggacagcuucaaagaggaacuggacaaguacuuuaagaaccacacaagccccgacguggaccugggcgauaucagcggaaucaaugccagcgucgugaacauccagaaagagaucgaccggcugaacgagguggccaagaaucugaacgagagccugaucgaccugcaagaacuggggaaguacgagcaguacaucaaguggcccugguacaucuggcugggcuuuaucgccggacugauugccaucgugaucgucacaaucaugcuguguugcaugaccagcugcuguagcugccugaagggcuguuguagcuguggcagcugcugcaaguucgacgaggacgauucugagcccgugcugaagggcgugaaacugcacuacacaugaggacuaguuauaagacugacuagcccgaugggccucccaacgggcccuccuccccuccuugcaccgagagaucucaaaggcucuuuucagagccaccaaaaaaaaaaaaaaaaaaaaaaaaaaaaaaaaaaaaaaaaaaaaaaaaaaaaaaaaaaaaaaaaaaaaaaaaaaaaaaaaaaaaaaaaaaaaaaaaaaaaa

SEQ ID NO: 24717 - RNA, 4029 nt, Artificial Sequence
  SARS-CoV-2/Wuhan/WIV05/2019__EPI_ISL_402128 spike protein mRNA gc mod (1-1273)(K986P_V987P_H69del_V70del_A222V_Y453F_S477N_D614G_I692V)
aggagaaagcuuaccauguucguguuccuggugcugcugccucugguguccagccagugugugaaccugaccaccagaacacagcugccuccagccuacaccaacagcuuuaccagaggcguguacuaccccgacaagguguucagauccagcgugcugcacucuacccaggaccuguuccugccuuucuucagcaacgugaccugguuccacgccaucuccggcaccaauggcaccaagagauucgacaaccccgugcugcccuucaacgacgggguguacuuugccagcaccgagaaguccaacaucaucagaggcuggaucuucggcaccacacuggacagcaagacccagagccugcugaucgugaacaacgccaccaacguggucaucaaagugugcgaguuccaguucugcaacgaccccuuccugggcgucuacuaccacaagaacaacaagagcuggauggaaagcgaguuccggguguacagcagcgccaacaacugcaccuucgaguacgugucccagccuuuccugauggaccuggaaggcaagcagggcaacuucaagaaccugcgcgaguucguguuuaagaacaucgacggcuacuucaagaucuacagcaagcacaccccuaucaaccucgugcgggaucugccucagggcuucucugugcuggaaccccugguggaucugcccaucggcaucaacaucacccgguuucagacacugcuggcccugcacagaagcuaccugacaccuggcgauagcagcagcggauggacagcuggugccgccgcuuacuaugugggcuaccugcagccuagaaccuuccugcugaaguacaacgagaacggcaccaucaccgacgccguggauugugcucuggauccucugagcgagacaaagugcacccugaaguccuucaccguggaaaagggcaucuaccagaccagcaacuuccgggugcagcccaccgaauccaucgugcgguuccccaauaucaccaaucugugccccuucggcgagguguucaaugccaccagauucgccucuguguacgccuggaaccggaagcggaucagcaauugcguggccgacuacuccgugcuguacaacuccgccagcuucagcaccuucaagugcuacggcguguccccuaccaagcugaacgaccugugcuucacaaacguguacgccgacagcuucgugauccggggagaugaagugcggcagauugccccuggacagacaggcaagaucgccgacuacaacuacaagcugcccgacgacuucaccggcugugugauugccuggaacagcaacaaccuggacuccaaagucggcggcaacuacaauuaccuguuccggcuguuccggaaguccaaucugaagcccuucgagcgggacaucuccaccgagaucuaucaggccggcaacaccccuuguaacggcguggaaggcuucaacugcuacuucccacugcaguccuacggcuuucagcccacaaauggcgugggcuaucagcccuacagagugguggugcugagcuucgaacugcugcaugccccugccacagugugcggcccuaagaaaagcaccaaucucgugaagaacaaaugcgugaacuucaacuucaacggccugaccggcaccggcgugcugacagagagcaacaagaaguuccugccauuccagcaguuuggccgggauaucgccgauaccacagacgccguuagagauccccagacacuggaaauccuggacaucaccccuugcagcuucggcggagugucugugaucaccccuggcaccaacaccagcaaucagguggcagugcuguaccagggcgugaacuguaccgaagugcccguggccauucacgccgaucagcugacaccuacauggcggguguacuccaccggcagcaauguguuucagaccagagccggcugucugaucggagccgagcacgugaacaauagcuacgagugcgacauccccaucggcgcuggaaucugcgccagcuaccagacacagacaaacagcccucggagagccagaagcguggccagccagagcgugauugccuacacaaugucucugggcgccgagaacagcguggccuacuccaacaacucuaucgcuauccccaccaacuucaccaucagcgugaccacagagauccugccuguguccaugaccaagaccagcguggacugcaccauguacaucugcggcgauuccaccgagugcuccaaccugcugcugcaguacggcagcuucugcacccagcugaauagagcccugacagggaucgccguggaacaggacaagaacacccaagagguguucgcccaagugaagcagaucuacaagaccccuccuaucaaggacuucggcggcuucaauuucagccagauucugcccgauccuagcaagcccagcaagcggagcuucaucgaggaccugcuguucaacaaagugacacuggccgacgccggcuucaucaagcaguauggcgauugucugggcgacauugccgccagggaucugauuugcgcccagaaguuuaacggacugacagugcugccuccucugcugaccgaugagaugaucgcccaguacacaucugcccugcuggccggcacaaucacaagcggcuggacauuuggagcaggcgccgcucugcagauccccuuugcuaugcagauggccuaccgguucaacggcaucggagugacccagaaugugcuguacgagaaccagaagcugaucgccaaccaguucaacagcgccaucggcaagauccaggacagccugagcagcacagcaagcgcccugggaaagcugcaggacguggucaaccagaaugcccaggcacugaacacccuggucaagcagcuguccuccaacuucggcgccaucagcucugugcugaacgauauccugagcagacuggacccuccugaggccgaggugcagaucgacagacugaucacaggcagacugcagagccuccagacauacgugacccagcagcugaucagagccgccgagauuagagccucugccaaucuggccgccaccaagaugucugagugugugcugggccagagcaagagaguggacuuuugcggcaagggcuaccaccugaugagcuucccucagucugccccucacggcgugguguuucugcacgugacauaugugcccgcucaagagaagaauuucaccaccgcuccagccaucugccacgacggcaaagcccacuuuccuagagaaggcguguucguguccaacggcacccauugguucgugacacagcggaacuucuacgagccccagaucaucaccaccgacaacaccuucgugucuggcaacugcgacgucgugaucggcauugugaacaauaccguguacgacccucugcagcccgagcuggacagcuucaaagaggaacuggacaaguacuuuaagaaccacacaagccccgacguggaccugggcgauaucagcggaaucaaugccagcgucgugaacauccagaaagagaucgaccggcugaacgagguggccaagaaucugaacgagagccugaucgaccugcaagaacuggggaaguacgagcaguacaucaaguggcccugguacaucuggcugggcuuuaucgccggacugauugccaucgugauggucacaaucaugcuguguugcaugaccagcugcuguagcugccugaagggcuguuguagcuguggcagcugcugcaaguucgacgaggacgauucugagcccgugcugaagggcgugaaacugcacuacacaugaggacuaguuauaagacugacuagcccgaugggccucccaacgggcccuccuccccuccuugcaccgagagaucucaaaggcucuuuucagagccaccaaaaaaaaaaaaaaaaaaaaaaaaaaaaaaaaaaaaaaaaaaaaaaaaaaaaaaaaaaaaaaaaaaaaaaaaaaaaaaaaaaaaaaaaaaaaaaaaaaaaa

SEQ ID NO: 24718 - RNA, 4029 nt, Artificial Sequence
  SARS-CoV-2/Wuhan/WIV05/2019__EPI_ISL_402128 spike protein mRNA gc mod (1-1273)(K986P_V987P_H69del_V70del_Y453F_D614G_I692V_M1229I)
aggagaaagcuuaccauguucguguuccuggugcugcugccucugguguccagccagugugugaaccugaccaccagaacacagcugccuccagccuacaccaacagcuuuaccagaggcguguacuaccccgacaagguguucagauccagcgugcugcacucuacccaggaccuguuccugccuuucuucagcaacgugaccugguuccacgccaucuccggcaccaauggcaccaagagauucgacaaccccgugcugcccuucaacgacgggguguacuuugccagcaccgagaaguccaacaucaucagaggcuggaucuucggcaccacacuggacagcaagacccagagccugcugaucgugaacaacgccaccaacguggucaucaaagugugcgaguuccaguucugcaacgaccccuuccugggcgucuacuaccacaagaacaacaagagcuggauggaaagcgaguuccggguguacagcagcgccaacaacugcaccuucgaguacgugucccagccuuuccugauggaccuggaaggcaagcagggcaacuucaagaaccugcgcgaguucguguuuaagaacaucgacggcuacuucaagaucuacagcaagcacaccccuaucaaccucgugcgggaucugccucagggcuucucugcucuggaaccccugguggaucugcccaucggcaucaacaucacccgguuucagacacugcuggcccugcacagaagcuaccugacaccuggcgauagcagcagcggauggacagcuggugccgccgcuuacuaugugggcuaccugcagccuagaaccuuccugcugaaguacaacgagaacggcaccaucaccgacgccguggauugugcucuggauccucugagcgagacaaagugcacccugaaguccuucaccguggaaaagggcaucuaccagaccagcaacuuccgggugcagcccaccgaauccaucgugcgguuccccaauaucaccaaucugugccccuucggcgagguguucaaugccaccagauucgccucuguguacgccuggaaccggaagcggaucagcaauugcguggccgacuacuccgugcuguacaacuccgccagcuucagcaccuucaagugcuacggcguguccccuaccaagcugaacgaccugugcuucacaaacguguacgccgacagcuucgugauccggggagaugaagugcggcagauugccccuggacagacaggcaagaucgccgacuacaacuacaagcugcccgacgacuucaccggcugugugauugccuggaacagcaacaaccuggacuccaaagucggcggcaacuacaauuaccuguuccggcuguuccggaaguccaaucugaagcccuucgagcgggacaucuccaccgagaucuaucaggccggcagcaccccuuguaacggcguggaaggcuucaacugcuacuucccacugcaguccuacggcuuucagcccacaaauggcgugggcuaucagcccuacagagugguggugcugagcuucgaacugcugcaugccccugccacagugugcggcccuaagaaaagcaccaaucucgugaagaacaaaugcgugaacuucaacuucaacggccugaccggcaccggcgugcugacagagagcaacaagaaguuccugccauuccagcaguuuggccgggauaucgccgauaccacagacgccguuagagauccccagacacuggaaauccuggacaucaccccuugcagcuucggcggagugucugugaucaccccuggcaccaacaccagcaaucagguggcagugcuguaccagggcgugaacuguaccgaagugcccguggccauucacgccgaucagcugacaccuacauggcggguguacuccaccggcagcaauguguuucagaccagagccggcugucugaucggagccgagcacgugaacaauagcuacgagugcgacauccccaucggcgcuggaaucugcgccagcuaccagacacagacaaacagcccucggagagccagaagcguggccagccagagcgugauugccuacacaaugucucugggcgccgagaacagcguggccuacuccaacaacucuaucgcuauccccaccaacuucaccaucagcgugaccacagagauccugccuguguccaugaccaagaccagcguggacugcaccauguacaucugcggcgauuccaccgagugcuccaaccugcugcugcaguacggcagcuucugcacccagcugaauagagcccugacagggaucgccguggaacaggacaagaacacccaagagguguucgcccaagugaagcagaucuacaagaccccuccuaucaaggacuucggcggcuucaauuucagccagauucugcccgauccuagcaagcccagcaagcggagcuucaucgaggaccugcuguucaacaaagugacacuggccgacgccggcuucaucaagcaguauggcgauugucugggcgacauugccgccagggaucugauuugcgcccagaaguuuaacggacugacagugcugccuccucugcugaccgaugagaugaucgcccaguacacaucugcccugcuggccggcacaaucacaagcggcuggacauuuggagcaggcgccgcucugcagauccccuuugcuaugcagauggccuaccgguucaacggcaucggagugacccagaaugugcuguacgagaaccagaagcugaucgccaaccaguucaacagcgccaucggcaagauccaggacagccugagcagcacagcaagcgcccugggaaagcugcaggacguggucaaccagaaugcccaggcacugaacacccuggucaagcagcuguccuccaacuucggcgccaucagcucugugcugaacgauauccugagcagacuggacccuccugaggccgaggugcagaucgacagacugaucacaggcagacugcagagccuccagacauacgugacccagcagcugaucagagccgccgagauuagagccucugccaaucuggccgccaccaagaugucugagugugugcugggccagagcaagagaguggacuuuugcggcaagggcuaccaccugaugagcuucccucagucugccccucacggcgugguguuucugcacgugacauaugugcccgcucaagagaagaauuucaccaccgcuccagccaucugccacgacggcaaagcccacuuuccuagagaaggcguguucguguccaacggcacccauugguucgugacacagcggaacuucuacgagccccagaucaucaccaccgacaacaccuucgugucuggcaacugcgacgucgugaucggcauugugaacaauaccguguacgacccucugcagcccgagcuggacagcuucaaagaggaacuggacaaguacuuuaagaaccacacaagccccgacguggaccugggcgauaucagcggaaucaaugccagcgucgugaacauccagaaagagaucgaccggcugaacgagguggccaagaaucugaacgagagccugaucgaccugcaagaacuggggaaguacgagcaguacaucaaguggcccugguacaucuggcugggcuuuaucgccggacugauugccaucgugaucgucacaaucaugcuguguugcaugaccagcugcuguagcugccugaagggcuguuguagcuguggcagcugcugcaaguucgacgaggacgauucugagcccgugcugaagggcgugaaacugcacuacacaugaggacuaguuauaagacugacuagcccgaugggccucccaacgggcccuccuccccuccuugcaccgagagaucucaaaggcucuuuucagagccaccaaaaaaaaaaaaaaaaaaaaaaaaaaaaaaaaaaaaaaaaaaaaaaaaaaaaaaaaaaaaaaaaaaaaaaaaaaaaaaaaaaaaaaaaaaaaaaaaaaaaa

SEQ ID NO: 24719 - RNA, 4026 nt, Artificial Sequence
  SARS-CoV-2/Wuhan/WIV05/2019__EPI_ISL_402128 spike protein mRNA gc mod (1-1273)(K986P_V987P_K986P_V987P_H69del_V70del_Y144del_N501Y_A570 D_D614G_P681H_T716I_S982A_D1118H)
aggagaaagcuuaccauguucguguuccuggugcugcugccucugguguccagccagugugugaaccugaccaccagaacacagcugccuccagccuacaccaacagcuuuaccagaggcguguacuaccccgacaagguguucagauccagcgugcugcacucuacccaggaccuguuccugccuuucuucagcaacgugaccugguuccacgccaucuccggcaccaauggcaccaagagauucgacaaccccgugcugcccuucaacgacgggguguacuuugccagcaccgagaaguccaacaucaucagaggcuggaucuucggcaccacacuggacagcaagacccagagccugcugaucgugaacaacgccaccaacguggucaucaaagugugcgaguuccaguucugcaacgaccccuuccugggcgucuaccacaagaacaacaagagcuggauggaaagcgaguuccggguguacagcagcgccaacaacugcaccuucgaguacgugucccagccuuuccugauggaccuggaaggcaagcagggcaacuucaagaaccugcgcgaguucguguuuaagaacaucgacggcuacuucaagaucuacagcaagcacaccccuaucaaccucgugcgggaucugccucagggcuucucugcucuggaaccccugguggaucugcccaucggcaucaacaucacccgguuucagacacugcuggcccugcacagaagcuaccugacaccuggcgauagcagcagcggauggacagcuggugccgccgcuuacuaugugggcuaccugcagccuagaaccuuccugcugaaguacaacgagaacggcaccaucaccgacgccguggauugugcucuggauccucugagcgagacaaagugcacccugaaguccuucaccguggaaaagggcaucuaccagaccagcaacuuccgggugcagcccaccgaauccaucgugcgguuccccaauaucaccaaucugugccccuucggcgagguguucaaugccaccagauucgccucuguguacgccuggaaccggaagcggaucagcaauugcguggccgacuacuccgugcuguacaacuccgccagcuucagcaccuucaagugcuacggcguguccccuaccaagcugaacgaccugugcuucacaaacguguacgccgacagcuucgugauccggggagaugaagugcggcagauugccccuggacagacaggcaagaucgccgacuacaacuacaagcugcccgacgacuucaccggcugugugauugccuggaacagcaacaaccuggacuccaaagucggcggcaacuacaauuaccuguaccggcuguuccggaaguccaaucugaagcccuucgagcgggacaucuccaccgagaucuaucaggccggcagcaccccuuguaacggcguggaaggcuucaacugcuacuucccacugcaguccuacggcuuucagcccacauacggcgugggcuaucagcccuacagagugguggugcugagcuucgaacugcugcaugccccugccacagugugcggcccuaagaaaagcaccaaucucgugaagaacaaaugcgugaacuucaacuucaacggccugaccggcaccggcgugcugacagagagcaacaagaaguuccugccauuccagcaguuuggccgggauaucgacgauaccacagacgccguuagagauccccagacacuggaaauccuggacaucaccccuugcagcuucggcggagugucugugaucaccccuggcaccaacaccagcaaucagguggcagugcuguaccagggcgugaacuguaccgaagugcccguggccauucacgccgaucagcugacaccuacauggcggguguacuccaccggcagcaauguguuucagaccagagccggcugucugaucggagccgagcacgugaacaauagcuacgagugcgacauccccaucggcgcuggaaucugcgccagcuaccagacacagacaaacagccaccggagagccagaagcguggccagccagagcaucauugccuacacaaugucucugggcgccgagaacagcguggccuacuccaacaacucuaucgcuauccccaucaacuucaccaucagcgugaccacagagauccugccuguguccaugaccaagaccagcguggacugcaccauguacaucugcggcgauuccaccgagugcuccaaccugcugcugcaguacggcagcuucugcacccagcugaauagagcccugacagggaucgccguggaacaggacaagaacacccaagagguguucgcccaagugaagcagaucuacaagaccccuccuaucaaggacuucggcggcuucaauuucagccagauucugcccgauccuagcaagcccagcaagcggagcuucaucgaggaccugcuguucaacaaagugacacuggccgacgccggcuucaucaagcaguauggcgauugucugggcgacauugccgccagggaucugauuugcgcccagaaguuuaacggacugacagugcugccuccucugcugaccgaugagaugaucgcccaguacacaucugcccugcuggccggcacaaucacaagcggcuggacauuuggagcaggcgccgcucugcagauccccuuugcuaugcagauggccuaccgguucaacggcaucggagugacccagaaugugcuguacgagaaccagaagcugaucgccaaccaguucaacagcgccaucggcaagauccaggacagccugagcagcacagcaagcgcccugggaaagcugcaggacguggucaaccagaaugcccaggcacugaacacccuggucaagcagcuguccuccaacuucggcgccaucagcucugugcugaacgauauccuggccagacuggacccuccugaggccgaggugcagaucgacagacugaucacaggcagacugcagagccuccagacauacgugacccagcagcugaucagagccgccgagauuagagccucugccaaucuggccgccaccaagaugucugagugugugcugggccagagcaagagaguggacuuuugcggcaagggcuaccaccugaugagcuucccucagucugccccucacggcgugguguuucugcacgugacauaugugcccgcucaagagaagaauuucaccaccgcuccagccaucugccacgacggcaaagcccacuuuccuagagaaggcguguucguguccaacggcacccauugguucgugacacagcggaacuucuacgagccccagaucaucaccacccacaacaccuucgugucuggcaacugcgacgucgugaucggcauugugaacaauaccguguacgacccucugcagcccgagcuggacagcuucaaagaggaacuggacaaguacuuuaagaaccacacaagccccgacguggaccugggcgauaucagcggaaucaaugccagcgucgugaacauccagaaagagaucgaccggcugaacgagguggccaagaaucugaacgagagccugaucgaccugcaagaacuggggaaguacgagcaguacaucaaguggcccugguacaucuggcugggcuuuaucgccggacugauugccaucgugauggucacaaucaugcuguguugcaugaccagcugcuguagcugccugaagggcuguuguagcuguggcagcugcugcaaguucgacgaggacgauucugagcccgugcugaagggcgugaaacugcacuacacaugaggacuaguuauaagacugacuagcccgaugggccucccaacgggcccuccuccccuccuugcaccgagagaucucaaaggcucuuuucagagccaccaaaaaaaaaaaaaaaaaaaaaaaaaaaaaaaaaaaaaaaaaaaaaaaaaaaaaaaaaaaaaaaaaaaaaaaaaaaaaaaaaaaaaaaaaaaaaaaaaaaaa

SEQ ID NO: 24720 - RNA, 4035 nt, Artificial Sequence
  SARS-CoV-2/Wuhan/WIV05/2019__EPI_ISL_402128 spike protein mRNA gc mod (1-1273)(K986P_V987P_K986P_V987P_K417N_E484K_N501Y_D614G)
aggagaaagcuuaccauguucguguuccuggugcugcugccucugguguccagccagugugugaaccugaccaccagaacacagcugccuccagccuacaccaacagcuuuaccagaggcguguacuaccccgacaagguguucagauccagcgugcugcacucuacccaggaccuguuccugccuuucuucagcaacgugaccugguuccacgccauccacguguccggcaccaauggcaccaagagauucgacaaccccgugcugcccuucaacgacgggguguacuuugccagcaccgagaaguccaacaucaucagaggcuggaucuucggcaccacacuggacagcaagacccagagccugcugaucgugaacaacgccaccaacguggucaucaaagugugcgaguuccaguucugcaacgaccccuuccugggcgucuacuaccacaagaacaacaagagcuggauggaaagcgaguuccggguguacagcagcgccaacaacugcaccuucgaguacgugucccagccuuuccugauggaccuggaaggcaagcagggcaacuucaagaaccugcgcgaguucguguuuaagaacaucgacggcuacuucaagaucuacagcaagcacaccccuaucaaccucgugcgggaucugccucagggcuucucugcucuggaaccccugguggaucugcccaucggcaucaacaucacccgguuucagacacugcuggcccugcacagaagcuaccugacaccuggcgauagcagcagcggauggacagcuggugccgccgcuuacuaugugggcuaccugcagccuagaaccuuccugcugaaguacaacgagaacggcaccaucaccgacgccguggauugugcucuggauccucugagcgagacaaagugcacccugaaguccuucaccguggaaaagggcaucuaccagaccagcaacuuccgggugcagcccaccgaauccaucgugcgguuccccaauaucaccaaucugugccccuucggcgagguguucaaugccaccagauucgccucuguguacgccuggaaccggaagcggaucagcaauugcguggccgacuacuccgugcuguacaacuccgccagcuucagcaccuucaagugcuacggcguguccccuaccaagcugaacgaccugugcuucacaaacguguacgccgacagcuucgugauccggggagaugaagugcggcagauugccccuggacagacaggcaacaucgccgacuacaacuacaagcugcccgacgacuucaccggcugugugauugccuggaacagcaacaaccuggacuccaaagucggcggcaacuacaauuaccuguaccggcuguuccggaaguccaaucugaagcccuucgagcgggacaucuccaccgagaucuaucaggccggcagcaccccuuguaacggcgugaagggcuucaacugcuacuucccacugcaguccuacggcuuucagcccacauacggcgugggcuaucagcccuacagagugguggugcugagcuucgaacugcugcaugccccugccacagugugcggcccuaagaaaagcaccaaucucgugaagaacaaaugcgugaacuucaacuucaacggccugaccggcaccggcgugcugacagagagcaacaagaaguuccugccauuccagcaguuuggccgggauaucgccgauaccacagacgccguuagagauccccagacacuggaaauccuggacaucaccccuugcagcuucggcggagugucugugaucaccccuggcaccaacaccagcaaucagguggcagugcuguaccagggcgugaacuguaccgaagugcccguggccauucacgccgaucagcugacaccuacauggcggguguacuccaccggcagcaauguguuucagaccagagccggcugucugaucggagccgagcacgugaacaauagcuacgagugcgacauccccaucggcgcuggaaucugcgccagcuaccagacacagacaaacagcccucggagagccagaagcguggccagccagagcaucauugccuacacaaugucucugggcgccgagaacagcguggccuacuccaacaacucuaucgcuauccccaccaacuucaccaucagcgugaccacagagauccugccuguguccaugaccaagaccagcguggacugcaccauguacaucugcggcgauuccaccgagugcuccaaccugcugcugcaguacggcagcuucugcacccagcugaauagagcccugacagggaucgccguggaacaggacaagaacacccaagagguguucgcccaagugaagcagaucuacaagaccccuccuaucaaggacuucggcggcuucaauuucagccagauucugcccgauccuagcaagcccagcaagcggagcuucaucgaggaccugcuguucaacaaagugacacuggccgacgccggcuucaucaagcaguauggcgauugucugggcgacauugccgccagggaucugauuugcgcccagaaguuuaacggacugacagugcugccuccucugcugaccgaugagaugaucgcccaguacacaucugcccugcuggccggcacaaucacaagcggcuggacauuuggagcaggcgccgcucugcagauccccuuugcuaugcagauggccuaccgguucaacggcaucggagugacccagaaugugcuguacgagaaccagaagcugaucgccaaccaguucaacagcgccaucggcaagauccaggacagccugagcagcacagcaagcgcccugggaaagcugcaggacguggucaaccagaaugcccaggcacugaacacccuggucaagcagcuguccuccaacuucggcgccaucagcucugugcugaacgauauccugagcagacuggacccuccugaggccgaggugcagaucgacagacugaucacaggcagacugcagagccuccagacauacgugacccagcagcugaucagagccgccgagauuagagccucugccaaucuggccgccaccaagaugucugagugugugcugggccagagcaagagaguggacuuuugcggcaagggcuaccaccugaugagcuucccucagucugccccucacggcgugguguuucugcacgugacauaugugcccgcucaagagaagaauuucaccaccgcuccagccaucugccacgacggcaaagcccacuuuccuagagaaggcguguucguguccaacggcacccauugguucgugacacagcggaacuucuacgagccccagaucaucaccaccgacaacaccuucgugucuggcaacugcgacgucgugaucggcauugugaacaauaccguguacgacccucugcagcccgagcuggacagcuucaaagaggaacuggacaaguacuuuaagaaccacacaagccccgacguggaccugggcgauaucagcggaaucaaugccagcgucgugaacauccagaaagagaucgaccggcugaacgagguggccaagaaucugaacgagagccugaucgaccugcaagaacuggggaaguacgagcaguacaucaaguggcccugguacaucuggcugggcuuuaucgccggacugauugccaucgugauggucacaaucaugcuguguugcaugaccagcugcuguagcugccugaagggcuguuguagcuguggcagcugcugcaaguucgacgaggacgauucugagcccgugcugaagggcgugaaacugcacuacacaugaggacuaguuauaagacugacuagcccgaugggccucccaacgggcccuccuccccuccuugcaccgagagaucucaaaggcucuuuucagagccaccaaaaaaaaaaaaaaaaaaaaaaaaaaaaaaaaaaaaaaaaaaaaaaaaaaaaaaaaaaaaaaaaaaaaaaaaaaaaaaaaaaaaaaaaaaaaaaaaaaaaa

SEQ ID NO: 24721 - RNA, 4026 nt, Artificial Sequence
  SARS-CoV-2/Wuhan/WIV05/2019__EPI_ISL_402128 spike protein mRNA gc mod (1-1273)(K986P_V987P_K986P_V987P_L18F_D80A_D215G_L242del_A243del_ L244del_R246I_K417N_E484K_N501Y_D614G_A701V)
aggagaaagcuuaccauguucguguuccuggugcugcugccucugguguccagccagugugugaacuucaccaccagaacacagcugccuccagccuacaccaacagcuuuaccagaggcguguacuaccccgacaagguguucagauccagcgugcugcacucuacccaggaccuguuccugccuuucuucagcaacgugaccugguuccacgccauccacguguccggcaccaauggcaccaagagauucgccaaccccgugcugcccuucaacgacgggguguacuuugccagcaccgagaaguccaacaucaucagaggcuggaucuucggcaccacacuggacagcaagacccagagccugcugaucgugaacaacgccaccaacguggucaucaaagugugcgaguuccaguucugcaacgaccccuuccugggcgucuacuaccacaagaacaacaagagcuggauggaaagcgaguuccggguguacagcagcgccaacaacugcaccuucgaguacgugucccagccuuuccugauggaccuggaaggcaagcagggcaacuucaagaaccugcgcgaguucguguuuaagaacaucgacggcuacuucaagaucuacagcaagcacaccccuaucaaccucgugcggggccugccucagggcuucucugcucuggaaccccugguggaucugcccaucggcaucaacaucacccgguuucagacacugcacaucagcuaccugacaccuggcgauagcagcagcggauggacagcuggugccgccgcuuacuaugugggcuaccugcagccuagaaccuuccugcugaaguacaacgagaacggcaccaucaccgacgccguggauugugcucuggauccucugagcgagacaaagugcacccugaaguccuucaccguggaaaagggcaucuaccagaccagcaacuuccgggugcagcccaccgaauccaucgugcgguuccccaauaucaccaaucugugccccuucggcgagguguucaaugccaccagauucgccucuguguacgccuggaaccggaagcggaucagcaauugcguggccgacuacuccgugcuguacaacuccgccagcuucagcaccuucaagugcuacggcguguccccuaccaagcugaacgaccugugcuucacaaacguguacgccgacagcuucgugauccggggagaugaagugcggcagauugccccuggacagacaggcaacaucgccgacuacaacuacaagcugcccgacgacuucaccggcugugugauugccuggaacagcaacaaccuggacuccaaagucggcggcaacuacaauuaccuguaccggcuguuccggaaguccaaucugaagcccuucgagcgggacaucuccaccgagaucuaucaggccggcagcaccccuuguaacggcgugaagggcuucaacugcuacuucccacugcaguccuacggcuuucagcccacauacggcgugggcuaucagcccuacagagugguggugcugagcuucgaacugcugcaugccccugccacagugugcggcccuaagaaaagcaccaaucucgugaagaacaaaugcgugaacuucaacuucaacggccugaccggcaccggcgugcugacagagagcaacaagaaguuccugccauuccagcaguuuggccgggauaucgccgauaccacagacgccguuagagauccccagacacuggaaauccuggacaucaccccuugcagcuucggcggagugucugugaucaccccuggcaccaacaccagcaaucagguggcagugcuguaccagggcgugaacuguaccgaagugcccguggccauucacgccgaucagcugacaccuacauggcggguguacuccaccggcagcaauguguuucagaccagagccggcugucugaucggagccgagcacgugaacaauagcuacgagugcgacauccccaucggcgcuggaaucugcgccagcuaccagacacagacaaacagcccucggagagccagaagcguggccagccagagcaucauugccuacacaaugucucugggcguggagaacagcguggccuacuccaacaacucuaucgcuauccccaccaacuucaccaucagcgugaccacagagauccugccuguguccaugaccaagaccagcguggacugcaccauguacaucugcggcgauuccaccgagugcuccaaccugcugcugcaguacggcagcuucugcacccagcugaauagagcccugacagggaucgccguggaacaggacaagaacacccaagagguguucgcccaagugaagcagaucuacaagaccccuccuaucaaggacuucggcggcuucaauuucagccagauucugcccgauccuagcaagcccagcaagcggagcuucaucgaggaccugcuguucaacaaagugacacuggccgacgccggcuucaucaagcaguauggcgauugucugggcgacauugccgccagggaucugauuugcgcccagaaguuuaacggacugacagugcugccuccucugcugaccgaugagaugaucgcccaguacacaucugcccugcuggccggcacaaucacaagcggcuggacauuuggagcaggcgccgcucugcagauccccuuugcuaugcagauggccuaccgguucaacggcaucggagugacccagaaugugcuguacgagaaccagaagcugaucgccaaccaguucaacagcgccaucggcaagauccaggacagccugagcagcacagcaagcgcccugggaaagcugcaggacguggucaaccagaaugcccaggcacugaacacccuggucaagcagcuguccuccaacuucggcgccaucagcucugugcugaacgauauccugagcagacuggacccuccugaggccgaggugcagaucgacagacugaucacaggcagacugcagagccuccagacauacgugacccagcagcugaucagagccgccgagauuagagccucugccaaucuggccgccaccaagaugucugagugugugcugggccagagcaagagaguggacuuuugcggcaagggcuaccaccugaugagcuucccucagucugccccucacggcgugguguuucugcacgugacauaugugcccgcucaagagaagaauuucaccaccgcuccagccaucugccacgacggcaaagcccacuuuccuagagaaggcguguucguguccaacggcacccauugguucgugacacagcggaacuucuacgagccccagaucaucaccaccgacaacaccuucgugucuggcaacugcgacgucgugaucggcauugugaacaauaccguguacgacccucugcagcccgagcuggacagcuucaaagaggaacuggacaaguacuuuaagaaccacacaagccccgacguggaccugggcgauaucagcggaaucaaugccagcgucgugaacauccagaaagagaucgaccggcugaacgagguggccaagaaucugaacgagagccugaucgaccugcaagaacuggggaaguacgagcaguacaucaaguggcccugguacaucuggcugggcuuuaucgccggacugauugccaucgugauggucacaaucaugcuguguugcaugaccagcugcuguagcugccugaagggcuguuguagcuguggcagcugcugcaaguucgacgaggacgauucugagcccgugcugaagggcgugaaacugcacuacacaugaggacuaguuauaagacugacuagcccgaugggccucccaacgggcccuccuccccuccuugcaccgagagaucucaaaggcucuuuucagagccaccaaaaaaaaaaaaaaaaaaaaaaaaaaaaaaaaaaaaaaaaaaaaaaaaaaaaaaaaaaaaaaaaaaaaaaaaaaaaaaaaaaaaaaaaaaaaaaaaaaaaa

SEQ ID NO: 24722 - RNA, 4035 nt, Artificial Sequence
  SARS-CoV-2/Wuhan/WIV05/2019__EPI_ISL_402128 spike protein mRNA gc mod (1-1273)(K986P_V987P_K986P_V987P_E484K_D614G)
aggagaaagcuuaccauguucguguuccuggugcugcugccucugguguccagccagugugugaaccugaccaccagaacacagcugccuccagccuacaccaacagcuuuaccagaggcguguacuaccccgacaagguguucagauccagcgugcugcacucuacccaggaccuguuccugccuuucuucagcaacgugaccugguuccacgccauccacguguccggcaccaauggcaccaagagauucgacaaccccgugcugcccuucaacgacgggguguacuuugccagcaccgagaaguccaacaucaucagaggcuggaucuucggcaccacacuggacagcaagacccagagccugcugaucgugaacaacgccaccaacguggucaucaaagugugcgaguuccaguucugcaacgaccccuuccugggcgucuacuaccacaagaacaacaagagcuggauggaaagcgaguuccggguguacagcagcgccaacaacugcaccuucgaguacgugucccagccuuuccugauggaccuggaaggcaagcagggcaacuucaagaaccugcgcgaguucguguuuaagaacaucgacggcuacuucaagaucuacagcaagcacaccccuaucaaccucgugcgggaucugccucagggcuucucugcucuggaaccccugguggaucugcccaucggcaucaacaucacccgguuucagacacugcuggcccugcacagaagcuaccugacaccuggcgauagcagcagcggauggacagcuggugccgccgcuuacuaugugggcuaccugcagccuagaaccuuccugcugaaguacaacgagaacggcaccaucaccgacgccguggauugugcucuggauccucugagcgagacaaagugcacccugaaguccuucaccguggaaaagggcaucuaccagaccagcaacuuccgggugcagcccaccgaauccaucgugcgguuccccaauaucaccaaucugugccccuucggcgagguguucaaugccaccagauucgccucuguguacgccuggaaccggaagcggaucagcaauugcguggccgacuacuccgugcuguacaacuccgccagcuucagcaccuucaagugcuacggcguguccccuaccaagcugaacgaccugugcuucacaaacguguacgccgacagcuucgugauccggggagaugaagugcggcagauugccccuggacagacaggcaagaucgccgacuacaacuacaagcugcccgacgacuucaccggcugugugauugccuggaacagcaacaaccuggacuccaaagucggcggcaacuacaauuaccuguaccggcuguuccggaaguccaaucugaagcccuucgagcgggacaucuccaccgagaucuaucaggccggcagcaccccuuguaacggcgugaagggcuucaacugcuacuucccacugcaguccuacggcuuucagcccacaaauggcgugggcuaucagcccuacagagugguggugcugagcuucgaacugcugcaugccccugccacagugugcggcccuaagaaaagcaccaaucucgugaagaacaaaugcgugaacuucaacuucaacggccugaccggcaccggcgugcugacagagagcaacaagaaguuccugccauuccagcaguuuggccgggauaucgccgauaccacagacgccguuagagauccccagacacuggaaauccuggacaucaccccuugcagcuucggcggagugucugugaucaccccuggcaccaacaccagcaaucagguggcagugcuguaccagggcgugaacuguaccgaagugcccguggccauucacgccgaucagcugacaccuacauggcggguguacuccaccggcagcaauguguuucagaccagagccggcugucugaucggagccgagcacgugaacaauagcuacgagugcgacauccccaucggcgcuggaaucugcgccagcuaccagacacagacaaacagcccucggagagccagaagcguggccagccagagcaucauugccuacacaaugucucugggcgccgagaacagcguggccuacuccaacaacucuaucgcuauccccaccaacuucaccaucagcgugaccacagagauccugccuguguccaugaccaagaccagcguggacugcaccauguacaucugcggcgauuccaccgagugcuccaaccugcugcugcaguacggcagcuucugcacccagcugaauagagcccugacagggaucgccguggaacaggacaagaacacccaagagguguucgcccaagugaagcagaucuacaagaccccuccuaucaaggacuucggcggcuucaauuucagccagauucugcccgauccuagcaagcccagcaagcggagcuucaucgaggaccugcuguucaacaaagugacacuggccgacgccggcuucaucaagcaguauggcgauugucugggcgacauugccgccagggaucugauuugcgcccagaaguuuaacggacugacagugcugccuccucugcugaccgaugagaugaucgcccaguacacaucugcccugcuggccggcacaaucacaagcggcuggacauuuggagcaggcgccgcucugcagauccccuuugcuaugcagauggccuaccgguucaacggcaucggagugacccagaaugugcuguacgagaaccagaagcugaucgccaaccaguucaacagcgccaucggcaagauccaggacagccugagcagcacagcaagcgcccugggaaagcugcaggacguggucaaccagaaugcccaggcacugaacacccuggucaagcagcuguccuccaacuucggcgccaucagcucugugcugaacgauauccugagcagacuggacccuccugaggccgaggugcagaucgacagacugaucacaggcagacugcagagccuccagacauacgugacccagcagcugaucagagccgccgagauuagagccucugccaaucuggccgccaccaagaugucugagugugugcugggccagagcaagagaguggacuuuugcggcaagggcuaccaccugaugagcuucccucagucugccccucacggcgugguguuucugcacgugacauaugugcccgcucaagagaagaauuucaccaccgcuccagccaucugccacgacggcaaagcccacuuuccuagagaaggcguguucguguccaacggcacccauugguucgugacacagcggaacuucuacgagccccagaucaucaccaccgacaacaccuucgugucuggcaacugcgacgucgugaucggcauugugaacaauaccguguacgacccucugcagcccgagcuggacagcuucaaagaggaacuggacaaguacuuuaagaaccacacaagccccgacguggaccugggcgauaucagcggaaucaaugccagcgucgugaacauccagaaagagaucgaccggcugaacgagguggccaagaaucugaacgagagccugaucgaccugcaagaacuggggaaguacgagcaguacaucaaguggcccugguacaucuggcugggcuuuaucgccggacugauugccaucgugauggucacaaucaugcuguguugcaugaccagcugcuguagcugccugaagggcuguuguagcuguggcagcugcugcaaguucgacgaggacgauucugagcccgugcugaagggcgugaaacugcacuacacaugaggacuaguuauaagacugacuagcccgaugggccucccaacgggcccuccuccccuccuugcaccgagagaucucaaaggcucuuuucagagccaccaaaaaaaaaaaaaaaaaaaaaaaaaaaaaaaaaaaaaaaaaaaaaaaaaaaaaaaaaaaaaaaaaaaaaaaaaaaaaaaaaaaaaaaaaaaaaaaaaaaaa

SEQ ID NO: 24723 - RNA, 4035 nt, Artificial Sequence
  SARS-CoV-2/Wuhan/WIV05/2019__EPI_ISL_402128 spike protein mRNA gc mod (1-1273)(K986P_V987P_K986P_V987P_L18F_T20N_P26S_D138Y_R190S_K417T _E484K_N501Y_D614G_H655Y_T1027I)
aggagaaagcuuaccauguucguguuccuggugcugcugccucugguguccagccagugugugaacuucaccaacagaacacagcugccuagcgccuacaccaacagcuuuaccagaggcguguacuaccccgacaagguguucagauccagcgugcugcacucuacccaggaccuguuccugccuuucuucagcaacgugaccugguuccacgccauccacguguccggcaccaauggcaccaagagauucgacaaccccgugcugcccuucaacgacgggguguacuuugccagcaccgagaaguccaacaucaucagaggcuggaucuucggcaccacacuggacagcaagacccagagccugcugaucgugaacaacgccaccaacguggucaucaaagugugcgaguuccaguucugcaacuaccccuuccugggcgucuacuaccacaagaacaacaagagcuggauggaaagcgaguuccggguguacagcagcgccaacaacugcaccuucgaguacgugucccagccuuuccugauggaccuggaaggcaagcagggcaacuucaagaaccugagcgaguucguguuuaagaacaucgacggcuacuucaagaucuacagcaagcacaccccuaucaaccucgugcgggaucugccucagggcuucucugcucuggaaccccugguggaucugcccaucggcaucaacaucacccgguuucagacacugcuggcccugcacagaagcuaccugacaccuggcgauagcagcagcggauggacagcuggugccgccgcuuacuaugugggcuaccugcagccuagaaccuuccugcugaaguacaacgagaacggcaccaucaccgacgccguggauugugcucuggauccucugagcgagacaaagugcacccugaaguccuucaccguggaaaagggcaucuaccagaccagcaacuuccgggugcagcccaccgaauccaucgugcgguuccccaauaucaccaaucugugccccuucggcgagguguucaaugccaccagauucgccucuguguacgccuggaaccggaagcggaucagcaauugcguggccgacuacuccgugcuguacaacuccgccagcuucagcaccuucaagugcuacggcguguccccuaccaagcugaacgaccugugcuucacaaacguguacgccgacagcuucgugauccggggagaugaagugcggcagauugccccuggacagacaggcaccaucgccgacuacaacuacaagcugcccgacgacuucaccggcugugugauugccuggaacagcaacaaccuggacuccaaagucggcggcaacuacaauuaccuguaccggcuguuccggaaguccaaucugaagcccuucgagcgggacaucuccaccgagaucuaucaggccggcagcaccccuuguaacggcgugaagggcuucaacugcuacuucccacugcaguccuacggcuuucagcccacauacggcgugggcuaucagcccuacagagugguggugcugagcuucgaacugcugcaugccccugccacagugugcggcccuaagaaaagcaccaaucucgugaagaacaaaugcgugaacuucaacuucaacggccugaccggcaccggcgugcugacagagagcaacaagaaguuccugccauuccagcaguuuggccgggauaucgccgauaccacagacgccguuagagauccccagacacuggaaauccuggacaucaccccuugcagcuucggcggagugucugugaucaccccuggcaccaacaccagcaaucagguggcagugcuguaccagggcgugaacuguaccgaagugcccguggccauucacgccgaucagcugacaccuacauggcggguguacuccaccggcagcaauguguuucagaccagagccggcugucugaucggagccgaguacgugaacaauagcuacgagugcgacauccccaucggcgcuggaaucugcgccagcuaccagacacagacaaacagcccucggagagccagaagcguggccagccagagcaucauugccuacacaaugucucugggcgccgagaacagcguggccuacuccaacaacucuaucgcuauccccaccaacuucaccaucagcgugaccacagagauccugccuguguccaugaccaagaccagcguggacugcaccauguacaucugcggcgauuccaccgagugcuccaaccugcugcugcaguacggcagcuucugcacccagcugaauagagcccugacagggaucgccguggaacaggacaagaacacccaagagguguucgcccaagugaagcagaucuacaagaccccuccuaucaaggacuucggcggcuucaauuucagccagauucugcccgauccuagcaagcccagcaagcggagcuucaucgaggaccugcuguucaacaaagugacacuggccgacgccggcuucaucaagcaguauggcgauugucugggcgacauugccgccagggaucugauuugcgcccagaaguuuaacggacugacagugcugccuccucugcugaccgaugagaugaucgcccaguacacaucugcccugcuggccggcacaaucacaagcggcuggacauuuggagcaggcgccgcucugcagauccccuuugcuaugcagauggccuaccgguucaacggcaucggagugacccagaaugugcuguacgagaaccagaagcugaucgccaaccaguucaacagcgccaucggcaagauccaggacagccugagcagcacagcaagcgcccugggaaagcugcaggacguggucaaccagaaugcccaggcacugaacacccuggucaagcagcuguccuccaacuucggcgccaucagcucugugcugaacgauauccugagcagacuggacccuccugaggccgaggugcagaucgacagacugaucacaggcagacugcagagccuccagacauacgugacccagcagcugaucagagccgccgagauuagagccucugccaaucuggccgccaucaagaugucugagugugugcugggccagagcaagagaguggacuuuugcggcaagggcuaccaccugaugagcuucccucagucugccccucacggcgugguguuucugcacgugacauaugugcccgcucaagagaagaauuucaccaccgcuccagccaucugccacgacggcaaagcccacuuuccuagagaaggcguguucguguccaacggcacccauugguucgugacacagcggaacuucuacgagccccagaucaucaccaccgacaacaccuucgugucuggcaacugcgacgucgugaucggcauugugaacaauaccguguacgacccucugcagcccgagcuggacagcuucaaagaggaacuggacaaguacuuuaagaaccacacaagccccgacguggaccugggcgauaucagcggaaucaaugccagcgucgugaacauccagaaagagaucgaccggcugaacgagguggccaagaaucugaacgagagccugaucgaccugcaagaacuggggaaguacgagcaguacaucaaguggcccugguacaucuggcugggcuuuaucgccggacugauugccaucgugauggucacaaucaugcuguguugcaugaccagcugcuguagcugccugaagggcuguuguagcuguggcagcugcugcaaguucgacgaggacgauucugagcccgugcugaagggcgugaaacugcacuacacaugaggacuaguuauaagacugacuagcccgaugggccucccaacgggcccuccuccccuccuugcaccgagagaucucaaaggcucuuuucagagccaccaaaaaaaaaaaaaaaaaaaaaaaaaaaaaaaaaaaaaaaaaaaaaaaaaaaaaaaaaaaaaaaaaaaaaaaaaaaaaaaaaaaaaaaaaaaaaaaaaaaaa

SEQ ID NO: 24724 - RNA, 4035 nt, Artificial Sequence
  SARS-CoV-2/Wuhan/WIV05/2019__EPI_ISL_402128 spike protein mRNA gc mod (1-1273)(K986P_V987P_K986P_V987P_S13I_W152C_L452R_D614G)
aggagaaagcuuaccauguucguguuccuggugcugcugccucugguguccauccagugugugaaccugaccaccagaacacagcugccuccagccuacaccaacagcuuuaccagaggcguguacuaccccgacaagguguucagauccagcgugcugcacucuacccaggaccuguuccugccuuucuucagcaacgugaccugguuccacgccauccacguguccggcaccaauggcaccaagagauucgacaaccccgugcugcccuucaacgacgggguguacuuugccagcaccgagaaguccaacaucaucagaggcuggaucuucggcaccacacuggacagcaagacccagagccugcugaucgugaacaacgccaccaacguggucaucaaagugugcgaguuccaguucugcaacgaccccuuccugggcgucuacuaccacaagaacaacaagagcugcauggaaagcgaguuccggguguacagcagcgccaacaacugcaccuucgaguacgugucccagccuuuccugauggaccuggaaggcaagcagggcaacuucaagaaccugcgcgaguucguguuuaagaacaucgacggcuacuucaagaucuacagcaagcacaccccuaucaaccucgugcgggaucugccucagggcuucucugcucuggaaccccugguggaucugcccaucggcaucaacaucacccgguuucagacacugcuggcccugcacagaagcuaccugacaccuggcgauagcagcagcggauggacagcuggugccgccgcuuacuaugugggcuaccugcagccuagaaccuuccugcugaaguacaacgagaacggcaccaucaccgacgccguggauugugcucuggauccucugagcgagacaaagugcacccugaaguccuucaccguggaaaagggcaucuaccagaccagcaacuuccgggugcagcccaccgaauccaucgugcgguuccccaauaucaccaaucugugccccuucggcgagguguucaaugccaccagauucgccucuguguacgccuggaaccggaagcggaucagcaauugcguggccgacuacuccgugcuguacaacuccgccagcuucagcaccuucaagugcuacggcguguccccuaccaagcugaacgaccugugcuucacaaacguguacgccgacagcuucgugauccggggagaugaagugcggcagauugccccuggacagacaggcaagaucgccgacuacaacuacaagcugcccgacgacuucaccggcugugugauugccuggaacagcaacaaccuggacuccaaagucggcggcaacuacaauuaccgcuaccggcuguuccggaaguccaaucugaagcccuucgagcgggacaucuccaccgagaucuaucaggccggcagcaccccuuguaacggcguggaaggcuucaacugcuacuucccacugcaguccuacggcuuucagcccacaaauggcgugggcuaucagcccuacagagugguggugcugagcuucgaacugcugcaugccccugccacagugugcggcccuaagaaaagcaccaaucucgugaagaacaaaugcgugaacuucaacuucaacggccugaccggcaccggcgugcugacagagagcaacaagaaguuccugccauuccagcaguuuggccgggauaucgccgauaccacagacgccguuagagauccccagacacuggaaauccuggacaucaccccuugcagcuucggcggagugucugugaucaccccuggcaccaacaccagcaaucagguggcagugcuguaccagggcgugaacuguaccgaagugcccguggccauucacgccgaucagcugacaccuacauggcggguguacuccaccggcagcaauguguuucagaccagagccggcugucugaucggagccgagcacgugaacaauagcuacgagugcgacauccccaucggcgcuggaaucugcgccagcuaccagacacagacaaacagcccucggagagccagaagcguggccagccagagcaucauugccuacacaaugucucugggcgccgagaacagcguggccuacuccaacaacucuaucgcuauccccaccaacuucaccaucagcgugaccacagagauccugccuguguccaugaccaagaccagcguggacugcaccauguacaucugcggcgauuccaccgagugcuccaaccugcugcugcaguacggcagcuucugcacccagcugaauagagcccugacagggaucgccguggaacaggacaagaacacccaagagguguucgcccaagugaagcagaucuacaagaccccuccuaucaaggacuucggcggcuucaauuucagccagauucugcccgauccuagcaagcccagcaagcggagcuucaucgaggaccugcuguucaacaaagugacacuggccgacgccggcuucaucaagcaguauggcgauugucugggcgacauugccgccagggaucugauuugcgcccagaaguuuaacggacugacagugcugccuccucugcugaccgaugagaugaucgcccaguacacaucugcccugcuggccggcacaaucacaagcggcuggacauuuggagcaggcgccgcucugcagauccccuuugcuaugcagauggccuaccgguucaacggcaucggagugacccagaaugugcuguacgagaaccagaagcugaucgccaaccaguucaacagcgccaucggcaagauccaggacagccugagcagcacagcaagcgcccugggaaagcugcaggacguggucaaccagaaugcccaggcacugaacacccuggucaagcagcuguccuccaacuucggcgccaucagcucugugcugaacgauauccugagcagacuggacccuccugaggccgaggugcagaucgacagacugaucacaggcagacugcagagccuccagacauacgugacccagcagcugaucagagccgccgagauuagagccucugccaaucuggccgccaccaagaugucugagugugugcugggccagagcaagagaguggacuuuugcggcaagggcuaccaccugaugagcuucccucagucugccccucacggcgugguguuucugcacgugacauaugugcccgcucaagagaagaauuucaccaccgcuccagccaucugccacgacggcaaagcccacuuuccuagagaaggcguguucguguccaacggcacccauugguucgugacacagcggaacuucuacgagccccagaucaucaccaccgacaacaccuucgugucuggcaacugcgacgucgugaucggcauugugaacaauaccguguacgacccucugcagcccgagcuggacagcuucaaagaggaacuggacaaguacuuuaagaaccacacaagccccgacguggaccugggcgauaucagcggaaucaaugccagcgucgugaacauccagaaagagaucgaccggcugaacgagguggccaagaaucugaacgagagccugaucgaccugcaagaacuggggaaguacgagcaguacaucaaguggcccugguacaucuggcugggcuuuaucgccggacugauugccaucgugauggucacaaucaugcuguguugcaugaccagcugcuguagcugccugaagggcuguuguagcuguggcagcugcugcaaguucgacgaggacgauucugagcccgugcugaagggcgugaaacugcacuacacaugaggacuaguuauaagacugacuagcccgaugggccucccaacgggcccuccuccccuccuugcaccgagagaucucaaaggcucuuuucagagccaccaaaaaaaaaaaaaaaaaaaaaaaaaaaaaaaaaaaaaaaaaaaaaaaaaaaaaaaaaaaaaaaaaaaaaaaaaaaaaaaaaaaaaaaaaaaaaaaaaaaaa

SEQ ID NO: 24725 - RNA, 1400 nt, Artificial Sequence
  SARS-CoV-2/Wuhan/WIV05/2019__EPI_ISL_402128 spike protein mRNA gc (1-15,334-528) Ferritin construct
aggagagucccgcagucggcguccagcggcucugcuuguucgugugugugucguugcaggccuuauucaagcuuaccauguucguguuccugguccuccugccccuggugagcucccagugcaaccugugccccuucggcgagguguucaacgccacccgguucgccagcgucuacgccuggaaccgcaagcggaucuccaacugcguggcggacuacagcgugcuguacaacuccgccagcuucuccacguucaagugcuacggcgucagccccaccaagcucaacgaccugugcuucaccaacguguacgccgacuccuucgugauccgcggggacgagguccggcagaucgcccccggccagaccgggaagaucgccgacuacaacuacaagcugccggacgacuucacgggcugcgugaucgcguggaacagcaacaaccucgacuccaaggucgggggcaacuacaacuaccuguaccgccuguuccgcaagagcaaccucaagcccuucgagcgggacaucuccaccgagaucuaccaggccggcagcacccccugcaacgggguggagggcuucaacugcuacuucccccugcaguccuacggguuccagccgaccaacggcgugggguaccagcccuaccggguggucgugcugagcuucgagcuccugcacgcccccgccacggugugcggccccaagggcggggguggaagcggcggggguggaagugacaucaucaagcuccugaacgagcaggucaacaaggagaugcaguccagcaaccuguacauguccaugagcuccuggugcuacacccacagccucgacggcgccgggcuguuccuguucgaccacgccgcggaggaguacgagcacgccaagaagcucaucaucuuccugaacgagaacaacgugcccgugcagcugaccuccaucagcgccccggagcacaaguucgagggccucacgcagaucuuccagaaggccuacgagcacgagcagcacaucuccgagagcaucaacaacaucguggaccacgccaucaaguccaaggaccacgcgaccuucaacuuccugcagugguacgucgccgagcagcacgaggaggaggugcuguucaaggacauccucgacaagaucgagcugaucgggaacgagaaccacggccuguaccucgccgaccaguacgugaaggggaucgccaagagccgcaaguccugaggacuagucccuguucccagagcccacuuuuuuuucuuuuuuugaaauaaaauagccugucuuucagaucuaaaaaaaaaaaaaaaaaaaaaaaaaaaaaaaaaaaaaaaaaaaaaaaaaaaaaaaaaaaaaaaaaaaaaaaaaaaaaaaaaaaaaaaaaaaaaaaaaaaa

SEQ ID NO: 24726 - RNA, 998 nt, Artificial Sequence
  SARS-CoV-2/Wuhan/WIV05/2019__EPI_ISL_402128 spike protein mRNA gc (334-528) Foldon construct
aggagagucccgcagucggcguccagcggcucugcuuguucgugugugugucguugcaggccuuauucaagcuuaccaugcccaugggcagccugcagccgcucgccacccuguaccugcucgggaugcugguggccuccguccuggcgaaccugugccccuucggcgagguguucaacgccacccgguucgccagcgucuacgccuggaaccgcaagcggaucuccaacugcguggcggacuacagcgugcuguacaacuccgccagcuucuccacguucaagugcuacggcgucagccccaccaagcucaacgaccugugcuucaccaacguguacgccgacuccuucgugauccgcggggacgagguccggcagaucgcccccggccagaccgggaagaucgccgacuacaacuacaagcugccggacgacuucacgggcugcgugaucgcguggaacagcaacaaccucgacuccaaggucgggggcaacuacaacuaccuguaccgccuguuccgcaagagcaaccucaagcccuucgagcgggacaucuccaccgagaucuaccaggccggcagcacccccugcaacgggguggagggcuucaacugcuacuucccccugcaguccuacggguuccagccgaccaacggcgugggguaccagcccuaccggguggucgugcugagcuucgagcuccugcacgcccccgccacggugugcggccccaagggcagcggcggguacauccccgaggccccgcgcgacggccaggccuacgugcggaaggacggcgaguggguccugcugagcaccuuccucugaggacuagucccuguucccagagcccacuuuuuuuucuuuuuuugaaauaaaauagccugucuuucagaucuaaaaaaaaaaaaaaaaaaaaaaaaaaaaaaaaaaaaaaaaaaaaaaaaaaaaaaaaaaaaaaaaaaaaaaaaaaaaaaaaaaaaaaaaaaaaaaaaaaaa

SEQ ID NO: 24727 - RNA, 1376 nt, Artificial Sequence
  SARS-CoV-2/Wuhan/WIV05/2019__EPI_ISL_402128 spike protein mRNA gc (1-15,334-528) LumSynth construct
aggagagucccgcagucggcguccagcggcucugcuuguucgugugugugucguugcaggccuuauucaagcuuaccauguucguguuccugguccuccugccccuggugagcucccagugcaaccugugccccuucggcgagguguucaacgccacccgguucgccagcgucuacgccuggaaccgcaagcggaucuccaacugcguggcggacuacagcgugcuguacaacuccgccagcuucuccacguucaagugcuacggcgucagccccaccaagcucaacgaccugugcuucaccaacguguacgccgacuccuucgugauccgcggggacgagguccggcagaucgcccccggccagaccgggaagaucgccgacuacaacuacaagcugccggacgacuucacgggcugcgugaucgcguggaacagcaacaaccucgacuccaaggucgggggcaacuacaacuaccuguaccgccuguuccgcaagagcaaccucaagcccuucgagcgggacaucuccaccgagaucuaccaggccggcagcacccccugcaacgggguggagggcuucaacugcuacuucccccugcaguccuacggguuccagccgaccaacggcgugggguaccagcccuaccggguggucgugcugagcuucgagcuccugcacgcccccgccacggugugcggccccaagggcggcggcggcuccggaggcggagguagcgggggacagaucuacgagggcaagcugaccgccgaggggcuccgcuucggcaucguggccagccgguucaaccacgcgcuggucgaccgccugguggagggggccaucgacgccaucgugcggcacggcgggcgcgaggaggacaucacccucguccgggugcccggcuccugggagaucccgguggccgccggcgagcuggcccgcaaggaggacaucgacgcggucaucgccaucggggugcugauccggggcgccacgccccacuucgacuacaucgccagcgagguguccaaggggcucgcggaccugagccuggagcuccgcaagcccaucaccuucggcgucaucaccgccgacacccuggagcaggccaucgagcgggccgggacgaagcacggcaacaagggcugggaggccgcgcuguccgccaucgagauggccaaccucuucaagagccugcgcugaggacuagucccuguucccagagcccacuuuuuuuucuuuuuuugaaauaaaauagccugucuuucagaucuaaaaaaaaaaaaaaaaaaaaaaaaaaaaaaaaaaaaaaaaaaaaaaaaaaaaaaaaaaaaaaaaaaaaaaaaaaaaaaaaaaaaaaaaaaaaaaaaaaaa

SEQ ID NO: 24728 - RNA, 1337 nt, Artificial Sequence
  SARS-CoV-2/Wuhan/WIV05/2019__EPI_ISL_402128 spike protein mRNA gc (334-528) LumSynth construct
aggagagucccgcagucggcguccagcggcucugcuuguucgugugugugucguugcaggccuuauucaagcuuaccaugcagaucuacgagggcaagcugaccgccgaggggcuccgcuucggcaucguggccagccgguucaaccacgcgcuggucgaccgccugguggagggggccaucgacgccaucgugcggcacggcgggcgcgaggaggacaucacccucguccgggugcccggcuccugggagaucccgguggccgccggcgagcuggcccgcaaggaggacaucgacgcggucaucgccaucggggugcugauccggggcgccacgccccacuucgacuacaucgccagcgagguguccaaggggcucgcggaccugagccuggagcuccgcaagcccaucaccuucggcgucaucaccgccgacacccuggagcaggccaucgagcgggccgggacgaagcacggcaacaagggcugggaggccgcgcuguccgccaucgagauggccaaccucuucaagagccugcgcggcgggggcgggagcggcgggggcggcuccgggggcgggaaccugugccccuucggcgagguguucaacgccacccgguucgccagcgucuacgccuggaaccgcaagcggaucuccaacugcguggcggacuacagcgugcuguacaacuccgccagcuucuccacguucaagugcuacggcgucagccccaccaagcucaacgaccugugcuucaccaacguguacgccgacuccuucgugauccgcggggacgagguccggcagaucgcccccggccagaccgggaagaucgccgacuacaacuacaagcugccggacgacuucacgggcugcgugaucgcguggaacagcaacaaccucgacuccaaggucgggggcaacuacaacuaccuguaccgccuguuccgcaagagcaaccucaagcccuucgagcgggacaucuccaccgagaucuaccaggccggcagcacccccugcaacgggguggagggcuucaacugcuacuucccccugcaguccuacggguuccagccgaccaacggcgugggguaccagcccuaccggguggucgugcugagcuucgagcuccugcacgcccccgccacggugugcggccccaagugaggacuagucccuguucccagagcccacuuuuuuuucuuuuuuugaaauaaaauagccugucuuucagaucuaaaaaaaaaaaaaaaaaaaaaaaaaaaaaaaaaaaaaaaaaaaaaaaaaaaaaaaaaaaaaaaaaaaaaaaaaaaaaaaaaaaaaaaaaaaaaaaaaaaa

SEQ ID NO: 24729 - RNA, 4070 nt, Artificial Sequence
  SARS-CoV-2/Wuhan/WIV05/2019__EPI_ISL_402128 spike protein mRNA gc (1-1273)
aggagagucccgcagucggcguccagcggcucugcuuguucgugugugugucguugcaggccuuauucaagcuuaccauguucguguuccugguccuccugccccuggugagcucccagugcgugaaccucaccacccgcacgcagcugccgcccgccuacaccaacagcuucacccggggcgucuacuaccccgacaagguguuccgcuccagcgugcugcacuccacccaggaccucuuccugcccuucuucagcaacgucacgugguuccacgccauccacguguccgggaccaacggcaccaagcgguucgacaacccggugcugcccuucaacgacggggucuacuucgcgagcaccgagaaguccaacaucauccgcggcuggaucuucgggacgacccucgacagcaagacccagucccugcugaucgugaacaacgccaccaacguggucaucaaggugugcgaguuccaguucugcaacgaccccuuccucggcguguacuaccacaagaacaacaagagcuggauggaguccgaguuccgggucuacagcuccgccaacaacugcacguucgaguacgugagccagcccuuccugauggaccuggagggcaagcaggggaacuucaagaaccuccgcgaguucguguucaagaacaucgacggcuacuucaagaucuacuccaagcacaccccgaucaaccugguccgggaccugccccagggguucagcgcccucgagccccugguggaccugcccaucggcaucaacaucacccgcuuccagacccuccuggcccugcaccgguccuaccucacgccgggggacagcagcuccggcuggaccgcgggcgccgccgccuacuacgugggguaccugcagccccgcaccuuccugcucaaguacaacgagaacggcaccaucacggacgcggucgacugcgcccuggacccccugagcgagaccaagugcacccucaaguccuucaccguggagaaggggaucuaccagacgagcaacuuccgggugcagcccaccgaguccaucguccgcuucccgaacaucaccaaccugugccccuucggcgagguguucaacgccacccgguucgccagcgucuacgccuggaaccgcaagcggaucuccaacugcguggcggacuacagcgugcuguacaacuccgccagcuucuccacguucaagugcuacggcgucagccccaccaagcucaacgaccugugcuucaccaacguguacgccgacuccuucgugauccgcggggacgagguccggcagaucgcccccggccagaccgggaagaucgccgacuacaacuacaagcugccggacgacuucacgggcugcgugaucgcguggaacagcaacaaccucgacuccaaggucgggggcaacuacaacuaccuguaccgccuguuccgcaagagcaaccucaagcccuucgagcgggacaucuccaccgagaucuaccaggccggcagcacccccugcaacgggguggagggcuucaacugcuacuucccccugcaguccuacggguuccagccgaccaacggcgugggguaccagcccuaccggguggucgugcugagcuucgagcuccugcacgcccccgccacggugugcggccccaagaaguccaccaaccuggucaagaacaagugcgugaacuucaacuucaacggccucaccgggaccggcgugcugaccgagagcaacaagaaguuccugccguuccagcaguucgggcgcgacaucgccgacacgaccgacgcgguccgcgacccccagacccuggagauccucgacaucacccccugcagcuucggcgggguguccgugaucacgccgggcaccaacaccagcaaccaggucgccgugcuguaccaggacgugaacugcaccgagguccccguggccauccacgccgaccagcugacgcccaccuggcggguguacuccaccggcagcaacgucuuccagacccgcgccgggugccucaucggcgcggagcacgugaacaacuccuacgagugcgacauccccaucggggccggcaucugcgccagcuaccagacgcagaccaacuccccgcggcgcgcccggagcguggcgucccagagcaucaucgccuacaccaugucccugggcgccgagaacagcgucgccuacuccaacaacagcaucgccauccccaccaacuucacgaucuccgugaccaccgagauccugcccgugagcaugaccaagacgagcgucgacugcaccauguacaucugcggggacuccaccgagugcagcaaccuccugcugcaguacggcuccuucugcacccagcucaaccgcgcgcugacggggaucgccguggagcaggacaagaacacccaggagguguucgcccaggucaagcagaucuacaagacgcccccgaucaaggacuucggcggguucaacuucagccagauccugcccgaccccuccaagcccagcaagcgguccuucaucgaggaccuccuguucaacaaggugacccuggccgacgccggcuucaucaagcaguacggcgacugccucggggacaucgcggcccgcgaccugaucugcgcccagaaguucaacggccugaccgugcucccgccccugcugaccgacgagaugaucgcccaguacaccagcgcccuccuggcggggaccaucacguccggcuggaccuucggggccggcgccgcccugcagauccccuucgcgaugcagauggccuaccgguucaacggcaucggggucacccagaacgugcucuacgagaaccagaagcugaucgccaaccaguucaacagcgccaucggcaagauccaggacucccugagcuccaccgccagcgcgcucgggaagcugcaggacguggucaaccagaacgcccaggcccugaacacgcucgugaagcagcuguccagcaacuucggcgccaucuccagcgugcugaacgacauccucucccgccuggacaaggucgaggccgaggugcagaucgaccggcugaucaccgggcgccuccagagccugcagaccuacgugacccagcagcugauccgggcggccgagauccgcgccagcgccaaccucgccgcgaccaagauguccgagugcguccugggccagagcaagcggguggacuucugcggcaagggguaccaccugauguccuucccccagagcgccccgcacggcguggucuuccuccacgugacguacguccccgcccaggagaagaacuucaccaccgcccccgcgaucugccacgacgggaaggcccacuucccccgcgagggcguguucguguccaacgggacccacugguucgucacgcagcggaacuucuacgagccgcagaucaucaccaccgacaacaccuucgugagcggcaacugcgacguggucaucggcaucgugaacaacacgguguacgacccccugcagcccgagcuggacuccuucaaggaggagcucgacaaguacuucaagaaccacaccagccccgacgucgaccugggggacaucuccggcaucaacgccagcguggugaacauccagaaggagaucgaccgccugaacgaggucgccaagaaccucaacgagucccugaucgaccugcaggagcucgggaaguacgagcaguacaucaaguggccgugguacaucuggcugggcuucaucgccggccugaucgcgaucgugauggugaccaucaugcucugcugcaugaccagcugcugcuccugccugaaggggugcugcagcugcggcuccugcugcaaguucgacgaggacgacagcgagcccguccugaagggggugaagcuccacuacacgugaggacuagucccuguucccagagcccacuuuuuuuucuuuuuuugaaauaaaauagccugucuuucagaucuaaaaaaaaaaaaaaaaaaaaaaaaaaaaaaaaaaaaaaaaaaaaaaaaaaaaaaaaaaaaaaaaaaaaaaaaaaaaaaaaaaaaaaaaaaaaaaaaaaaa

SEQ ID NO: 24730 - RNA, 4070 nt, Artificial Sequence
  SARS-CoV-2/Wuhan/WIV05/2019__EPI_ISL_402128 spike protein mRNA gc (1-1273)(D614G)
aggagagucccgcagucggcguccagcggcucugcuuguucgugugugugucguugcaggccuuauucaagcuuaccauguucguguuccugguccuccugccccuggugagcucccagugcgugaaccucaccacccgcacgcagcugccgcccgccuacaccaacagcuucacccggggcgucuacuaccccgacaagguguuccgcuccagcgugcugcacuccacccaggaccucuuccugcccuucuucagcaacgucacgugguuccacgccauccacguguccgggaccaacggcaccaagcgguucgacaacccggugcugcccuucaacgacggggucuacuucgcgagcaccgagaaguccaacaucauccgcggcuggaucuucgggacgacccucgacagcaagacccagucccugcugaucgugaacaacgccaccaacguggucaucaaggugugcgaguuccaguucugcaacgaccccuuccucggcguguacuaccacaagaacaacaagagcuggauggaguccgaguuccgggucuacagcuccgccaacaacugcacguucgaguacgugagccagcccuuccugauggaccuggagggcaagcaggggaacuucaagaaccuccgcgaguucguguucaagaacaucgacggcuacuucaagaucuacuccaagcacaccccgaucaaccugguccgggaccugccccagggguucagcgcccucgagccccugguggaccugcccaucggcaucaacaucacccgcuuccagacccuccuggcccugcaccgguccuaccucacgccgggggacagcagcuccggcuggaccgcgggcgccgccgccuacuacgugggguaccugcagccccgcaccuuccugcucaaguacaacgagaacggcaccaucacggacgcggucgacugcgcccuggacccccugagcgagaccaagugcacccucaaguccuucaccguggagaaggggaucuaccagacgagcaacuuccgggugcagcccaccgaguccaucguccgcuucccgaacaucaccaaccugugccccuucggcgagguguucaacgccacccgguucgccagcgucuacgccuggaaccgcaagcggaucuccaacugcguggcggacuacagcgugcuguacaacuccgccagcuucuccacguucaagugcuacggcgucagccccaccaagcucaacgaccugugcuucaccaacguguacgccgacuccuucgugauccgcggggacgagguccggcagaucgcccccggccagaccgggaagaucgccgacuacaacuacaagcugccggacgacuucacgggcugcgugaucgcguggaacagcaacaaccucgacuccaaggucgggggcaacuacaacuaccuguaccgccuguuccgcaagagcaaccucaagcccuucgagcgggacaucuccaccgagaucuaccaggccggcagcacccccugcaacgggguggagggcuucaacugcuacuucccccugcaguccuacggguuccagccgaccaacggcgugggguaccagcccuaccggguggucgugcugagcuucgagcuccugcacgcccccgccacggugugcggccccaagaaguccaccaaccuggucaagaacaagugcgugaacuucaacuucaacggccucaccgggaccggcgugcugaccgagagcaacaagaaguuccugccguuccagcaguucgggcgcgacaucgccgacacgaccgacgcgguccgcgacccccagacccuggagauccucgacaucacccccugcagcuucggcgggguguccgugaucacgccgggcaccaacaccagcaaccaggucgccgugcuguaccagggcgugaacugcaccgagguccccguggccauccacgccgaccagcugacgcccaccuggcggguguacuccaccggcagcaacgucuuccagacccgcgccgggugccucaucggcgcggagcacgugaacaacuccuacgagugcgacauccccaucggggccggcaucugcgccagcuaccagacgcagaccaacuccccgcggcgcgcccggagcguggcgucccagagcaucaucgccuacaccaugucccugggcgccgagaacagcgucgccuacuccaacaacagcaucgccauccccaccaacuucacgaucuccgugaccaccgagauccugcccgugagcaugaccaagacgagcgucgacugcaccauguacaucugcggggacuccaccgagugcagcaaccuccugcugcaguacggcuccuucugcacccagcucaaccgcgcgcugacggggaucgccguggagcaggacaagaacacccaggagguguucgcccaggucaagcagaucuacaagacgcccccgaucaaggacuucggcggguucaacuucagccagauccugcccgaccccuccaagcccagcaagcgguccuucaucgaggaccuccuguucaacaaggugacccuggccgacgccggcuucaucaagcaguacggcgacugccucggggacaucgcggcccgcgaccugaucugcgcccagaaguucaacggccugaccgugcucccgccccugcugaccgacgagaugaucgcccaguacaccagcgcccuccuggcggggaccaucacguccggcuggaccuucggggccggcgccgcccugcagauccccuucgcgaugcagauggccuaccgguucaacggcaucggggucacccagaacgugcucuacgagaaccagaagcugaucgccaaccaguucaacagcgccaucggcaagauccaggacucccugagcuccaccgccagcgcgcucgggaagcugcaggacguggucaaccagaacgcccaggcccugaacacgcucgugaagcagcuguccagcaacuucggcgccaucuccagcgugcugaacgacauccucucccgccuggacaaggucgaggccgaggugcagaucgaccggcugaucaccgggcgccuccagagccugcagaccuacgugacccagcagcugauccgggcggccgagauccgcgccagcgccaaccucgccgcgaccaagauguccgagugcguccugggccagagcaagcggguggacuucugcggcaagggguaccaccugauguccuucccccagagcgccccgcacggcguggucuuccuccacgugacguacguccccgcccaggagaagaacuucaccaccgcccccgcgaucugccacgacgggaaggcccacuucccccgcgagggcguguucguguccaacgggacccacugguucgucacgcagcggaacuucuacgagccgcagaucaucaccaccgacaacaccuucgugagcggcaacugcgacguggucaucggcaucgugaacaacacgguguacgacccccugcagcccgagcuggacuccuucaaggaggagcucgacaaguacuucaagaaccacaccagccccgacgucgaccugggggacaucuccggcaucaacgccagcguggugaacauccagaaggagaucgaccgccugaacgaggucgccaagaaccucaacgagucccugaucgaccugcaggagcucgggaaguacgagcaguacaucaaguggccgugguacaucuggcugggcuucaucgccggccugaucgcgaucgugauggugaccaucaugcucugcugcaugaccagcugcugcuccugccugaaggggugcugcagcugcggcuccugcugcaaguucgacgaggacgacagcgagcccguccugaagggggugaagcuccacuacacgugaggacuagucccuguucccagagcccacuuuuuuuucuuuuuuugaaauaaaauagccugucuuucagaucuaaaaaaaaaaaaaaaaaaaaaaaaaaaaaaaaaaaaaaaaaaaaaaaaaaaaaaaaaaaaaaaaaaaaaaaaaaaaaaaaaaaaaaaaaaaaaaaaaaaa

SEQ ID NO: 24731 - RNA, 4070 nt, Artificial Sequence
  SARS-CoV-2/Wuhan/WIV05/2019__EPI_ISL_402128 spike protein mRNA gc (1-1273)(A222V_D614G)
aggagagucccgcagucggcguccagcggcucugcuuguucgugugugugucguugcaggccuuauucaagcuuaccauguucguguuccugguccuccugccccuggugagcucccagugcgugaaccucaccacccgcacgcagcugccgcccgccuacaccaacagcuucacccggggcgucuacuaccccgacaagguguuccgcuccagcgugcugcacuccacccaggaccucuuccugcccuucuucagcaacgucacgugguuccacgccauccacguguccgggaccaacggcaccaagcgguucgacaacccggugcugcccuucaacgacggggucuacuucgcgagcaccgagaaguccaacaucauccgcggcuggaucuucgggacgacccucgacagcaagacccagucccugcugaucgugaacaacgccaccaacguggucaucaaggugugcgaguuccaguucugcaacgaccccuuccucggcguguacuaccacaagaacaacaagagcuggauggaguccgaguuccgggucuacagcuccgccaacaacugcacguucgaguacgugagccagcccuuccugauggaccuggagggcaagcaggggaacuucaagaaccuccgcgaguucguguucaagaacaucgacggcuacuucaagaucuacuccaagcacaccccgaucaaccugguccgggaccugccccagggguucagcguccucgagccccugguggaccugcccaucggcaucaacaucacccgcuuccagacccuccuggcccugcaccgguccuaccucacgccgggggacagcagcuccggcuggaccgcgggcgccgccgccuacuacgugggguaccugcagccccgcaccuuccugcucaaguacaacgagaacggcaccaucacggacgcggucgacugcgcccuggacccccugagcgagaccaagugcacccucaaguccuucaccguggagaaggggaucuaccagacgagcaacuuccgggugcagcccaccgaguccaucguccgcuucccgaacaucaccaaccugugccccuucggcgagguguucaacgccacccgguucgccagcgucuacgccuggaaccgcaagcggaucuccaacugcguggcggacuacagcgugcuguacaacuccgccagcuucuccacguucaagugcuacggcgucagccccaccaagcucaacgaccugugcuucaccaacguguacgccgacuccuucgugauccgcggggacgagguccggcagaucgcccccggccagaccgggaagaucgccgacuacaacuacaagcugccggacgacuucacgggcugcgugaucgcguggaacagcaacaaccucgacuccaaggucgggggcaacuacaacuaccuguaccgccuguuccgcaagagcaaccucaagcccuucgagcgggacaucuccaccgagaucuaccaggccggcagcacccccugcaacgggguggagggcuucaacugcuacuucccccugcaguccuacggguuccagccgaccaacggcgugggguaccagcccuaccggguggucgugcugagcuucgagcuccugcacgcccccgccacggugugcggccccaagaaguccaccaaccuggucaagaacaagugcgugaacuucaacuucaacggccucaccgggaccggcgugcugaccgagagcaacaagaaguuccugccguuccagcaguucgggcgcgacaucgccgacacgaccgacgcgguccgcgacccccagacccuggagauccucgacaucacccccugcagcuucggcgggguguccgugaucacgccgggcaccaacaccagcaaccaggucgccgugcuguaccagggcgugaacugcaccgagguccccguggccauccacgccgaccagcugacgcccaccuggcggguguacuccaccggcagcaacgucuuccagacccgcgccgggugccucaucggcgcggagcacgugaacaacuccuacgagugcgacauccccaucggggccggcaucugcgccagcuaccagacgcagaccaacuccccgcggcgcgcccggagcguggcgucccagagcaucaucgccuacaccaugucccugggcgccgagaacagcgucgccuacuccaacaacagcaucgccauccccaccaacuucacgaucuccgugaccaccgagauccugcccgugagcaugaccaagacgagcgucgacugcaccauguacaucugcggggacuccaccgagugcagcaaccuccugcugcaguacggcuccuucugcacccagcucaaccgcgcgcugacggggaucgccguggagcaggacaagaacacccaggagguguucgcccaggucaagcagaucuacaagacgcccccgaucaaggacuucggcggguucaacuucagccagauccugcccgaccccuccaagcccagcaagcgguccuucaucgaggaccuccuguucaacaaggugacccuggccgacgccggcuucaucaagcaguacggcgacugccucggggacaucgcggcccgcgaccugaucugcgcccagaaguucaacggccugaccgugcucccgccccugcugaccgacgagaugaucgcccaguacaccagcgcccuccuggcggggaccaucacguccggcuggaccuucggggccggcgccgcccugcagauccccuucgcgaugcagauggccuaccgguucaacggcaucggggucacccagaacgugcucuacgagaaccagaagcugaucgccaaccaguucaacagcgccaucggcaagauccaggacucccugagcuccaccgccagcgcgcucgggaagcugcaggacguggucaaccagaacgcccaggcccugaacacgcucgugaagcagcuguccagcaacuucggcgccaucuccagcgugcugaacgacauccucucccgccuggacaaggucgaggccgaggugcagaucgaccggcugaucaccgggcgccuccagagccugcagaccuacgugacccagcagcugauccgggcggccgagauccgcgccagcgccaaccucgccgcgaccaagauguccgagugcguccugggccagagcaagcggguggacuucugcggcaagggguaccaccugauguccuucccccagagcgccccgcacggcguggucuuccuccacgugacguacguccccgcccaggagaagaacuucaccaccgcccccgcgaucugccacgacgggaaggcccacuucccccgcgagggcguguucguguccaacgggacccacugguucgucacgcagcggaacuucuacgagccgcagaucaucaccaccgacaacaccuucgugagcggcaacugcgacguggucaucggcaucgugaacaacacgguguacgacccccugcagcccgagcuggacuccuucaaggaggagcucgacaaguacuucaagaaccacaccagccccgacgucgaccugggggacaucuccggcaucaacgccagcguggugaacauccagaaggagaucgaccgccugaacgaggucgccaagaaccucaacgagucccugaucgaccugcaggagcucgggaaguacgagcaguacaucaaguggccgugguacaucuggcugggcuucaucgccggccugaucgcgaucgugauggugaccaucaugcucugcugcaugaccagcugcugcuccugccugaaggggugcugcagcugcggcuccugcugcaaguucgacgaggacgacagcgagcccguccugaagggggugaagcuccacuacacgugaggacuagucccuguucccagagcccacuuuuuuuucuuuuuuugaaauaaaauagccugucuuucagaucuaaaaaaaaaaaaaaaaaaaaaaaaaaaaaaaaaaaaaaaaaaaaaaaaaaaaaaaaaaaaaaaaaaaaaaaaaaaaaaaaaaaaaaaaaaaaaaaaaaaa

SEQ ID NO: 24732 - RNA, 4070 nt, Artificial Sequence
  SARS-CoV-2/Wuhan/WIV05/2019__EPI_ISL_402128 spike protein mRNA gc (1-1273)(N439K_D614G)
aggagagucccgcagucggcguccagcggcucugcuuguucgugugugugucguugcaggccuuauucaagcuuaccauguucguguuccugguccuccugccccuggugagcucccagugcgugaaccucaccacccgcacgcagcugccgcccgccuacaccaacagcuucacccggggcgucuacuaccccgacaagguguuccgcuccagcgugcugcacuccacccaggaccucuuccugcccuucuucagcaacgucacgugguuccacgccauccacguguccgggaccaacggcaccaagcgguucgacaacccggugcugcccuucaacgacggggucuacuucgcgagcaccgagaaguccaacaucauccgcggcuggaucuucgggacgacccucgacagcaagacccagucccugcugaucgugaacaacgccaccaacguggucaucaaggugugcgaguuccaguucugcaacgaccccuuccucggcguguacuaccacaagaacaacaagagcuggauggaguccgaguuccgggucuacagcuccgccaacaacugcacguucgaguacgugagccagcccuuccugauggaccuggagggcaagcaggggaacuucaagaaccuccgcgaguucguguucaagaacaucgacggcuacuucaagaucuacuccaagcacaccccgaucaaccugguccgggaccugccccagggguucagcgcccucgagccccugguggaccugcccaucggcaucaacaucacccgcuuccagacccuccuggcccugcaccgguccuaccucacgccgggggacagcagcuccggcuggaccgcgggcgccgccgccuacuacgugggguaccugcagccccgcaccuuccugcucaaguacaacgagaacggcaccaucacggacgcggucgacugcgcccuggacccccugagcgagaccaagugcacccucaaguccuucaccguggagaaggggaucuaccagacgagcaacuuccgggugcagcccaccgaguccaucguccgcuucccgaacaucaccaaccugugccccuucggcgagguguucaacgccacccgguucgccagcgucuacgccuggaaccgcaagcggaucuccaacugcguggcggacuacagcgugcuguacaacuccgccagcuucuccacguucaagugcuacggcgucagccccaccaagcucaacgaccugugcuucaccaacguguacgccgacuccuucgugauccgcggggacgagguccggcagaucgcccccggccagaccgggaagaucgccgacuacaacuacaagcugccggacgacuucacgggcugcgugaucgcguggaacagcaagaaccucgacuccaaggucgggggcaacuacaacuaccuguaccgccuguuccgcaagagcaaccucaagcccuucgagcgggacaucuccaccgagaucuaccaggccggcagcacccccugcaacgggguggagggcuucaacugcuacuucccccugcaguccuacggguuccagccgaccaacggcgugggguaccagcccuaccggguggucgugcugagcuucgagcuccugcacgcccccgccacggugugcggccccaagaaguccaccaaccuggucaagaacaagugcgugaacuucaacuucaacggccucaccgggaccggcgugcugaccgagagcaacaagaaguuccugccguuccagcaguucgggcgcgacaucgccgacacgaccgacgcgguccgcgacccccagacccuggagauccucgacaucacccccugcagcuucggcgggguguccgugaucacgccgggcaccaacaccagcaaccaggucgccgugcuguaccagggcgugaacugcaccgagguccccguggccauccacgccgaccagcugacgcccaccuggcggguguacuccaccggcagcaacgucuuccagacccgcgccgggugccucaucggcgcggagcacgugaacaacuccuacgagugcgacauccccaucggggccggcaucugcgccagcuaccagacgcagaccaacuccccgcggcgcgcccggagcguggcgucccagagcaucaucgccuacaccaugucccugggcgccgagaacagcgucgccuacuccaacaacagcaucgccauccccaccaacuucacgaucuccgugaccaccgagauccugcccgugagcaugaccaagacgagcgucgacugcaccauguacaucugcggggacuccaccgagugcagcaaccuccugcugcaguacggcuccuucugcacccagcucaaccgcgcgcugacggggaucgccguggagcaggacaagaacacccaggagguguucgcccaggucaagcagaucuacaagacgcccccgaucaaggacuucggcggguucaacuucagccagauccugcccgaccccuccaagcccagcaagcgguccuucaucgaggaccuccuguucaacaaggugacccuggccgacgccggcuucaucaagcaguacggcgacugccucggggacaucgcggcccgcgaccugaucugcgcccagaaguucaacggccugaccgugcucccgccccugcugaccgacgagaugaucgcccaguacaccagcgcccuccuggcggggaccaucacguccggcuggaccuucggggccggcgccgcccugcagauccccuucgcgaugcagauggccuaccgguucaacggcaucggggucacccagaacgugcucuacgagaaccagaagcugaucgccaaccaguucaacagcgccaucggcaagauccaggacucccugagcuccaccgccagcgcgcucgggaagcugcaggacguggucaaccagaacgcccaggcccugaacacgcucgugaagcagcuguccagcaacuucggcgccaucuccagcgugcugaacgacauccucucccgccuggacaaggucgaggccgaggugcagaucgaccggcugaucaccgggcgccuccagagccugcagaccuacgugacccagcagcugauccgggcggccgagauccgcgccagcgccaaccucgccgcgaccaagauguccgagugcguccugggccagagcaagcggguggacuucugcggcaagggguaccaccugauguccuucccccagagcgccccgcacggcguggucuuccuccacgugacguacguccccgcccaggagaagaacuucaccaccgcccccgcgaucugccacgacgggaaggcccacuucccccgcgagggcguguucguguccaacgggacccacugguucgucacgcagcggaacuucuacgagccgcagaucaucaccaccgacaacaccuucgugagcggcaacugcgacguggucaucggcaucgugaacaacacgguguacgacccccugcagcccgagcuggacuccuucaaggaggagcucgacaaguacuucaagaaccacaccagccccgacgucgaccugggggacaucuccggcaucaacgccagcguggugaacauccagaaggagaucgaccgccugaacgaggucgccaagaaccucaacgagucccugaucgaccugcaggagcucgggaaguacgagcaguacaucaaguggccgugguacaucuggcugggcuucaucgccggccugaucgcgaucgugauggugaccaucaugcucugcugcaugaccagcugcugcuccugccugaaggggugcugcagcugcggcuccugcugcaaguucgacgaggacgacagcgagcccguccugaagggggugaagcuccacuacacgugaggacuagucccuguucccagagcccacuuuuuuuucuuuuuuugaaauaaaauagccugucuuucagaucuaaaaaaaaaaaaaaaaaaaaaaaaaaaaaaaaaaaaaaaaaaaaaaaaaaaaaaaaaaaaaaaaaaaaaaaaaaaaaaaaaaaaaaaaaaaaaaaaaaaa

SEQ ID NO: 24733 - RNA, 4070 nt, Artificial Sequence
  SARS-CoV-2/Wuhan/WIV05/2019__EPI_ISL_402128 spike protein mRNA gc (1-1273)(S477N_D614G)
aggagagucccgcagucggcguccagcggcucugcuuguucgugugugugucguugcaggccuuauucaagcuuaccauguucguguuccugguccuccugccccuggugagcucccagugcgugaaccucaccacccgcacgcagcugccgcccgccuacaccaacagcuucacccggggcgucuacuaccccgacaagguguuccgcuccagcgugcugcacuccacccaggaccucuuccugcccuucuucagcaacgucacgugguuccacgccauccacguguccgggaccaacggcaccaagcgguucgacaacccggugcugcccuucaacgacggggucuacuucgcgagcaccgagaaguccaacaucauccgcggcuggaucuucgggacgacccucgacagcaagacccagucccugcugaucgugaacaacgccaccaacguggucaucaaggugugcgaguuccaguucugcaacgaccccuuccucggcguguacuaccacaagaacaacaagagcuggauggaguccgaguuccgggucuacagcuccgccaacaacugcacguucgaguacgugagccagcccuuccugauggaccuggagggcaagcaggggaacuucaagaaccuccgcgaguucguguucaagaacaucgacggcuacuucaagaucuacuccaagcacaccccgaucaaccugguccgggaccugccccagggguucagcgcccucgagccccugguggaccugcccaucggcaucaacaucacccgcuuccagacccuccuggcccugcaccgguccuaccucacgccgggggacagcagcuccggcuggaccgcgggcgccgccgccuacuacgugggguaccugcagccccgcaccuuccugcucaaguacaacgagaacggcaccaucacggacgcggucgacugcgcccuggacccccugagcgagaccaagugcacccucaaguccuucaccguggagaaggggaucuaccagacgagcaacuuccgggugcagcccaccgaguccaucguccgcuucccgaacaucaccaaccugugccccuucggcgagguguucaacgccacccgguucgccagcgucuacgccuggaaccgcaagcggaucuccaacugcguggcggacuacagcgugcuguacaacuccgccagcuucuccacguucaagugcuacggcgucagccccaccaagcucaacgaccugugcuucaccaacguguacgccgacuccuucgugauccgcggggacgagguccggcagaucgcccccggccagaccgggaagaucgccgacuacaacuacaagcugccggacgacuucacgggcugcgugaucgcguggaacagcaacaaccucgacuccaaggucgggggcaacuacaacuaccuguaccgccuguuccgcaagagcaaccucaagcccuucgagcgggacaucuccaccgagaucuaccaggccggcaacacccccugcaacgggguggagggcuucaacugcuacuucccccugcaguccuacggguuccagccgaccaacggcgugggguaccagcccuaccggguggucgugcugagcuucgagcuccugcacgcccccgccacggugugcggccccaagaaguccaccaaccuggucaagaacaagugcgugaacuucaacuucaacggccucaccgggaccggcgugcugaccgagagcaacaagaaguuccugccguuccagcaguucgggcgcgacaucgccgacacgaccgacgcgguccgcgacccccagacccuggagauccucgacaucacccccugcagcuucggcgggguguccgugaucacgccgggcaccaacaccagcaaccaggucgccgugcuguaccagggcgugaacugcaccgagguccccguggccauccacgccgaccagcugacgcccaccuggcggguguacuccaccggcagcaacgucuuccagacccgcgccgggugccucaucggcgcggagcacgugaacaacuccuacgagugcgacauccccaucggggccggcaucugcgccagcuaccagacgcagaccaacuccccgcggcgcgcccggagcguggcgucccagagcaucaucgccuacaccaugucccugggcgccgagaacagcgucgccuacuccaacaacagcaucgccauccccaccaacuucacgaucuccgugaccaccgagauccugcccgugagcaugaccaagacgagcgucgacugcaccauguacaucugcggggacuccaccgagugcagcaaccuccugcugcaguacggcuccuucugcacccagcucaaccgcgcgcugacggggaucgccguggagcaggacaagaacacccaggagguguucgcccaggucaagcagaucuacaagacgcccccgaucaaggacuucggcggguucaacuucagccagauccugcccgaccccuccaagcccagcaagcgguccuucaucgaggaccuccuguucaacaaggugacccuggccgacgccggcuucaucaagcaguacggcgacugccucggggacaucgcggcccgcgaccugaucugcgcccagaaguucaacggccugaccgugcucccgccccugcugaccgacgagaugaucgcccaguacaccagcgcccuccuggcggggaccaucacguccggcuggaccuucggggccggcgccgcccugcagauccccuucgcgaugcagauggccuaccgguucaacggcaucggggucacccagaacgugcucuacgagaaccagaagcugaucgccaaccaguucaacagcgccaucggcaagauccaggacucccugagcuccaccgccagcgcgcucgggaagcugcaggacguggucaaccagaacgcccaggcccugaacacgcucgugaagcagcuguccagcaacuucggcgccaucuccagcgugcugaacgacauccucucccgccuggacaaggucgaggccgaggugcagaucgaccggcugaucaccgggcgccuccagagccugcagaccuacgugacccagcagcugauccgggcggccgagauccgcgccagcgccaaccucgccgcgaccaagauguccgagugcguccugggccagagcaagcggguggacuucugcggcaagggguaccaccugauguccuucccccagagcgccccgcacggcguggucuuccuccacgugacguacguccccgcccaggagaagaacuucaccaccgcccccgcgaucugccacgacgggaaggcccacuucccccgcgagggcguguucguguccaacgggacccacugguucgucacgcagcggaacuucuacgagccgcagaucaucaccaccgacaacaccuucgugagcggcaacugcgacguggucaucggcaucgugaacaacacgguguacgacccccugcagcccgagcuggacuccuucaaggaggagcucgacaaguacuucaagaaccacaccagccccgacgucgaccugggggacaucuccggcaucaacgccagcguggugaacauccagaaggagaucgaccgccugaacgaggucgccaagaaccucaacgagucccugaucgaccugcaggagcucgggaaguacgagcaguacaucaaguggccgugguacaucuggcugggcuucaucgccggccugaucgcgaucgugauggugaccaucaugcucugcugcaugaccagcugcugcuccugccugaaggggugcugcagcugcggcuccugcugcaaguucgacgaggacgacagcgagcccguccugaagggggugaagcuccacuacacgugaggacuagucccuguucccagagcccacuuuuuuuucuuuuuuugaaauaaaauagccugucuuucagaucuaaaaaaaaaaaaaaaaaaaaaaaaaaaaaaaaaaaaaaaaaaaaaaaaaaaaaaaaaaaaaaaaaaaaaaaaaaaaaaaaaaaaaaaaaaaaaaaaaaaa

SEQ ID NO: 24734 - RNA, 4070 nt, Artificial Sequence
  SARS-CoV-2/Wuhan/WIV05/2019__EPI_ISL_402128 spike protein mRNA gc (1-1273)(N501Y_D614G)
aggagagucccgcagucggcguccagcggcucugcuuguucgugugugugucguugcaggccuuauucaagcuuaccauguucguguuccugguccuccugccccuggugagcucccagugcgugaaccucaccacccgcacgcagcugccgcccgccuacaccaacagcuucacccggggcgucuacuaccccgacaagguguuccgcuccagcgugcugcacuccacccaggaccucuuccugcccuucuucagcaacgucacgugguuccacgccauccacguguccgggaccaacggcaccaagcgguucgacaacccggugcugcccuucaacgacggggucuacuucgcgagcaccgagaaguccaacaucauccgcggcuggaucuucgggacgacccucgacagcaagacccagucccugcugaucgugaacaacgccaccaacguggucaucaaggugugcgaguuccaguucugcaacgaccccuuccucggcguguacuaccacaagaacaacaagagcuggauggaguccgaguuccgggucuacagcuccgccaacaacugcacguucgaguacgugagccagcccuuccugauggaccuggagggcaagcaggggaacuucaagaaccuccgcgaguucguguucaagaacaucgacggcuacuucaagaucuacuccaagcacaccccgaucaaccugguccgggaccugccccagggguucagcgcccucgagccccugguggaccugcccaucggcaucaacaucacccgcuuccagacccuccuggcccugcaccgguccuaccucacgccgggggacagcagcuccggcuggaccgcgggcgccgccgccuacuacgugggguaccugcagccccgcaccuuccugcucaaguacaacgagaacggcaccaucacggacgcggucgacugcgcccuggacccccugagcgagaccaagugcacccucaaguccuucaccguggagaaggggaucuaccagacgagcaacuuccgggugcagcccaccgaguccaucguccgcuucccgaacaucaccaaccugugccccuucggcgagguguucaacgccacccgguucgccagcgucuacgccuggaaccgcaagcggaucuccaacugcguggcggacuacagcgugcuguacaacuccgccagcuucuccacguucaagugcuacggcgucagccccaccaagcucaacgaccugugcuucaccaacguguacgccgacuccuucgugauccgcggggacgagguccggcagaucgcccccggccagaccgggaagaucgccgacuacaacuacaagcugccggacgacuucacgggcugcgugaucgcguggaacagcaacaaccucgacuccaaggucgggggcaacuacaacuaccuguaccgccuguuccgcaagagcaaccucaagcccuucgagcgggacaucuccaccgagaucuaccaggccggcagcacccccugcaacgggguggagggcuucaacugcuacuucccccugcaguccuacggguuccagccgaccuacggcgugggguaccagcccuaccggguggucgugcugagcuucgagcuccugcacgcccccgccacggugugcggccccaagaaguccaccaaccuggucaagaacaagugcgugaacuucaacuucaacggccucaccgggaccggcgugcugaccgagagcaacaagaaguuccugccguuccagcaguucgggcgcgacaucgccgacacgaccgacgcgguccgcgacccccagacccuggagauccucgacaucacccccugcagcuucggcgggguguccgugaucacgccgggcaccaacaccagcaaccaggucgccgugcuguaccagggcgugaacugcaccgagguccccguggccauccacgccgaccagcugacgcccaccuggcggguguacuccaccggcagcaacgucuuccagacccgcgccgggugccucaucggcgcggagcacgugaacaacuccuacgagugcgacauccccaucggggccggcaucugcgccagcuaccagacgcagaccaacuccccgcggcgcgcccggagcguggcgucccagagcaucaucgccuacaccaugucccugggcgccgagaacagcgucgccuacuccaacaacagcaucgccauccccaccaacuucacgaucuccgugaccaccgagauccugcccgugagcaugaccaagacgagcgucgacugcaccauguacaucugcggggacuccaccgagugcagcaaccuccugcugcaguacggcuccuucugcacccagcucaaccgcgcgcugacggggaucgccguggagcaggacaagaacacccaggagguguucgcccaggucaagcagaucuacaagacgcccccgaucaaggacuucggcggguucaacuucagccagauccugcccgaccccuccaagcccagcaagcgguccuucaucgaggaccuccuguucaacaaggugacccuggccgacgccggcuucaucaagcaguacggcgacugccucggggacaucgcggcccgcgaccugaucugcgcccagaaguucaacggccugaccgugcucccgccccugcugaccgacgagaugaucgcccaguacaccagcgcccuccuggcggggaccaucacguccggcuggaccuucggggccggcgccgcccugcagauccccuucgcgaugcagauggccuaccgguucaacggcaucggggucacccagaacgugcucuacgagaaccagaagcugaucgccaaccaguucaacagcgccaucggcaagauccaggacucccugagcuccaccgccagcgcgcucgggaagcugcaggacguggucaaccagaacgcccaggcccugaacacgcucgugaagcagcuguccagcaacuucggcgccaucuccagcgugcugaacgacauccucucccgccuggacaaggucgaggccgaggugcagaucgaccggcugaucaccgggcgccuccagagccugcagaccuacgugacccagcagcugauccgggcggccgagauccgcgccagcgccaaccucgccgcgaccaagauguccgagugcguccugggccagagcaagcggguggacuucugcggcaagggguaccaccugauguccuucccccagagcgccccgcacggcguggucuuccuccacgugacguacguccccgcccaggagaagaacuucaccaccgcccccgcgaucugccacgacgggaaggcccacuucccccgcgagggcguguucguguccaacgggacccacugguucgucacgcagcggaacuucuacgagccgcagaucaucaccaccgacaacaccuucgugagcggcaacugcgacguggucaucggcaucgugaacaacacgguguacgacccccugcagcccgagcuggacuccuucaaggaggagcucgacaaguacuucaagaaccacaccagccccgacgucgaccugggggacaucuccggcaucaacgccagcguggugaacauccagaaggagaucgaccgccugaacgaggucgccaagaaccucaacgagucccugaucgaccugcaggagcucgggaaguacgagcaguacaucaaguggccgugguacaucuggcugggcuucaucgccggccugaucgcgaucgugauggugaccaucaugcucugcugcaugaccagcugcugcuccugccugaaggggugcugcagcugcggcuccugcugcaaguucgacgaggacgacagcgagcccguccugaagggggugaagcuccacuacacgugaggacuagucccuguucccagagcccacuuuuuuuucuuuuuuugaaauaaaauagccugucuuucagaucuaaaaaaaaaaaaaaaaaaaaaaaaaaaaaaaaaaaaaaaaaaaaaaaaaaaaaaaaaaaaaaaaaaaaaaaaaaaaaaaaaaaaaaaaaaaaaaaaaaaa

SEQ ID NO: 24735 - RNA, 4064 nt, Artificial Sequence
  SARS-CoV-2/Wuhan/WIV05/2019__EPI_ISL_402128 spike protein mRNA gc (1-1273)(H69del_V70del_D614G)
aggagagucccgcagucggcguccagcggcucugcuuguucgugugugugucguugcaggccuuauucaagcuuaccauguucguguuccugguccuccugccccuggugagcucccagugcgugaaccucaccacccgcacgcagcugccgcccgccuacaccaacagcuucacccggggcgucuacuaccccgacaagguguuccgcuccagcgugcugcacuccacccaggaccucuuccugcccuucuucagcaacgucacgugguuccacgccaucuccgggaccaacggcaccaagcgguucgacaacccggugcugcccuucaacgacggggucuacuucgcgagcaccgagaaguccaacaucauccgcggcuggaucuucgggacgacccucgacagcaagacccagucccugcugaucgugaacaacgccaccaacguggucaucaaggugugcgaguuccaguucugcaacgaccccuuccucggcguguacuaccacaagaacaacaagagcuggauggaguccgaguuccgggucuacagcuccgccaacaacugcacguucgaguacgugagccagcccuuccugauggaccuggagggcaagcaggggaacuucaagaaccuccgcgaguucguguucaagaacaucgacggcuacuucaagaucuacuccaagcacaccccgaucaaccugguccgggaccugccccagggguucagcgcccucgagccccugguggaccugcccaucggcaucaacaucacccgcuuccagacccuccuggcccugcaccgguccuaccucacgccgggggacagcagcuccggcuggaccgcgggcgccgccgccuacuacgugggguaccugcagccccgcaccuuccugcucaaguacaacgagaacggcaccaucacggacgcggucgacugcgcccuggacccccugagcgagaccaagugcacccucaaguccuucaccguggagaaggggaucuaccagacgagcaacuuccgggugcagcccaccgaguccaucguccgcuucccgaacaucaccaaccugugccccuucggcgagguguucaacgccacccgguucgccagcgucuacgccuggaaccgcaagcggaucuccaacugcguggcggacuacagcgugcuguacaacuccgccagcuucuccacguucaagugcuacggcgucagccccaccaagcucaacgaccugugcuucaccaacguguacgccgacuccuucgugauccgcggggacgagguccggcagaucgcccccggccagaccgggaagaucgccgacuacaacuacaagcugccggacgacuucacgggcugcgugaucgcguggaacagcaacaaccucgacuccaaggucgggggcaacuacaacuaccuguaccgccuguuccgcaagagcaaccucaagcccuucgagcgggacaucuccaccgagaucuaccaggccggcagcacccccugcaacgggguggagggcuucaacugcuacuucccccugcaguccuacggguuccagccgaccaacggcgugggguaccagcccuaccggguggucgugcugagcuucgagcuccugcacgcccccgccacggugugcggccccaagaaguccaccaaccuggucaagaacaagugcgugaacuucaacuucaacggccucaccgggaccggcgugcugaccgagagcaacaagaaguuccugccguuccagcaguucgggcgcgacaucgccgacacgaccgacgcgguccgcgacccccagacccuggagauccucgacaucacccccugcagcuucggcgggguguccgugaucacgccgggcaccaacaccagcaaccaggucgccgugcuguaccagggcgugaacugcaccgagguccccguggccauccacgccgaccagcugacgcccaccuggcggguguacuccaccggcagcaacgucuuccagacccgcgccgggugccucaucggcgcggagcacgugaacaacuccuacgagugcgacauccccaucggggccggcaucugcgccagcuaccagacgcagaccaacuccccgcggcgcgcccggagcguggcgucccagagcaucaucgccuacaccaugucccugggcgccgagaacagcgucgccuacuccaacaacagcaucgccauccccaccaacuucacgaucuccgugaccaccgagauccugcccgugagcaugaccaagacgagcgucgacugcaccauguacaucugcggggacuccaccgagugcagcaaccuccugcugcaguacggcuccuucugcacccagcucaaccgcgcgcugacggggaucgccguggagcaggacaagaacacccaggagguguucgcccaggucaagcagaucuacaagacgcccccgaucaaggacuucggcggguucaacuucagccagauccugcccgaccccuccaagcccagcaagcgguccuucaucgaggaccuccuguucaacaaggugacccuggccgacgccggcuucaucaagcaguacggcgacugccucggggacaucgcggcccgcgaccugaucugcgcccagaaguucaacggccugaccgugcucccgccccugcugaccgacgagaugaucgcccaguacaccagcgcccuccuggcggggaccaucacguccggcuggaccuucggggccggcgccgcccugcagauccccuucgcgaugcagauggccuaccgguucaacggcaucggggucacccagaacgugcucuacgagaaccagaagcugaucgccaaccaguucaacagcgccaucggcaagauccaggacucccugagcuccaccgccagcgcgcucgggaagcugcaggacguggucaaccagaacgcccaggcccugaacacgcucgugaagcagcuguccagcaacuucggcgccaucuccagcgugcugaacgacauccucucccgccuggacaaggucgaggccgaggugcagaucgaccggcugaucaccgggcgccuccagagccugcagaccuacgugacccagcagcugauccgggcggccgagauccgcgccagcgccaaccucgccgcgaccaagauguccgagugcguccugggccagagcaagcggguggacuucugcggcaagggguaccaccugauguccuucccccagagcgccccgcacggcguggucuuccuccacgugacguacguccccgcccaggagaagaacuucaccaccgcccccgcgaucugccacgacgggaaggcccacuucccccgcgagggcguguucguguccaacgggacccacugguucgucacgcagcggaacuucuacgagccgcagaucaucaccaccgacaacaccuucgugagcggcaacugcgacguggucaucggcaucgugaacaacacgguguacgacccccugcagcccgagcuggacuccuucaaggaggagcucgacaaguacuucaagaaccacaccagccccgacgucgaccugggggacaucuccggcaucaacgccagcguggugaacauccagaaggagaucgaccgccugaacgaggucgccaagaaccucaacgagucccugaucgaccugcaggagcucgggaaguacgagcaguacaucaaguggccgugguacaucuggcugggcuucaucgccggccugaucgcgaucgugauggugaccaucaugcucugcugcaugaccagcugcugcuccugccugaaggggugcugcagcugcggcuccugcugcaaguucgacgaggacgacagcgagcccguccugaagggggugaagcuccacuacacgugaggacuagucccuguucccagagcccacuuuuuuuucuuuuuuugaaauaaaauagccugucuuucagaucuaaaaaaaaaaaaaaaaaaaaaaaaaaaaaaaaaaaaaaaaaaaaaaaaaaaaaaaaaaaaaaaaaaaaaaaaaaaaaaaaaaaaaaaaaaaaaaaaaaaa

SEQ ID NO: 24736 - RNA, 4070 nt, Artificial Sequence
  SARS-CoV-2/Wuhan/WIV05/2019__EPI_ISL_402128 spike protein mRNA gc (1-1273)(Y453F_D614G)
aggagagucccgcagucggcguccagcggcucugcuuguucgugugugugucguugcaggccuuauucaagcuuaccauguucguguuccugguccuccugccccuggugagcucccagugcgugaaccucaccacccgcacgcagcugccgcccgccuacaccaacagcuucacccggggcgucuacuaccccgacaagguguuccgcuccagcgugcugcacuccacccaggaccucuuccugcccuucuucagcaacgucacgugguuccacgccauccacguguccgggaccaacggcaccaagcgguucgacaacccggugcugcccuucaacgacggggucuacuucgcgagcaccgagaaguccaacaucauccgcggcuggaucuucgggacgacccucgacagcaagacccagucccugcugaucgugaacaacgccaccaacguggucaucaaggugugcgaguuccaguucugcaacgaccccuuccucggcguguacuaccacaagaacaacaagagcuggauggaguccgaguuccgggucuacagcuccgccaacaacugcacguucgaguacgugagccagcccuuccugauggaccuggagggcaagcaggggaacuucaagaaccuccgcgaguucguguucaagaacaucgacggcuacuucaagaucuacuccaagcacaccccgaucaaccugguccgggaccugccccagggguucagcgcccucgagccccugguggaccugcccaucggcaucaacaucacccgcuuccagacccuccuggcccugcaccgguccuaccucacgccgggggacagcagcuccggcuggaccgcgggcgccgccgccuacuacgugggguaccugcagccccgcaccuuccugcucaaguacaacgagaacggcaccaucacggacgcggucgacugcgcccuggacccccugagcgagaccaagugcacccucaaguccuucaccguggagaaggggaucuaccagacgagcaacuuccgggugcagcccaccgaguccaucguccgcuucccgaacaucaccaaccugugccccuucggcgagguguucaacgccacccgguucgccagcgucuacgccuggaaccgcaagcggaucuccaacugcguggcggacuacagcgugcuguacaacuccgccagcuucuccacguucaagugcuacggcgucagccccaccaagcucaacgaccugugcuucaccaacguguacgccgacuccuucgugauccgcggggacgagguccggcagaucgcccccggccagaccgggaagaucgccgacuacaacuacaagcugccggacgacuucacgggcugcgugaucgcguggaacagcaacaaccucgacuccaaggucgggggcaacuacaacuaccuguuccgccuguuccgcaagagcaaccucaagcccuucgagcgggacaucuccaccgagaucuaccaggccggcagcacccccugcaacgggguggagggcuucaacugcuacuucccccugcaguccuacggguuccagccgaccaacggcgugggguaccagcccuaccggguggucgugcugagcuucgagcuccugcacgcccccgccacggugugcggccccaagaaguccaccaaccuggucaagaacaagugcgugaacuucaacuucaacggccucaccgggaccggcgugcugaccgagagcaacaagaaguuccugccguuccagcaguucgggcgcgacaucgccgacacgaccgacgcgguccgcgacccccagacccuggagauccucgacaucacccccugcagcuucggcgggguguccgugaucacgccgggcaccaacaccagcaaccaggucgccgugcuguaccagggcgugaacugcaccgagguccccguggccauccacgccgaccagcugacgcccaccuggcggguguacuccaccggcagcaacgucuuccagacccgcgccgggugccucaucggcgcggagcacgugaacaacuccuacgagugcgacauccccaucggggccggcaucugcgccagcuaccagacgcagaccaacuccccgcggcgcgcccggagcguggcgucccagagcaucaucgccuacaccaugucccugggcgccgagaacagcgucgccuacuccaacaacagcaucgccauccccaccaacuucacgaucuccgugaccaccgagauccugcccgugagcaugaccaagacgagcgucgacugcaccauguacaucugcggggacuccaccgagugcagcaaccuccugcugcaguacggcuccuucugcacccagcucaaccgcgcgcugacggggaucgccguggagcaggacaagaacacccaggagguguucgcccaggucaagcagaucuacaagacgcccccgaucaaggacuucggcggguucaacuucagccagauccugcccgaccccuccaagcccagcaagcgguccuucaucgaggaccuccuguucaacaaggugacccuggccgacgccggcuucaucaagcaguacggcgacugccucggggacaucgcggcccgcgaccugaucugcgcccagaaguucaacggccugaccgugcucccgccccugcugaccgacgagaugaucgcccaguacaccagcgcccuccuggcggggaccaucacguccggcuggaccuucggggccggcgccgcccugcagauccccuucgcgaugcagauggccuaccgguucaacggcaucggggucacccagaacgugcucuacgagaaccagaagcugaucgccaaccaguucaacagcgccaucggcaagauccaggacucccugagcuccaccgccagcgcgcucgggaagcugcaggacguggucaaccagaacgcccaggcccugaacacgcucgugaagcagcuguccagcaacuucggcgccaucuccagcgugcugaacgacauccucucccgccuggacaaggucgaggccgaggugcagaucgaccggcugaucaccgggcgccuccagagccugcagaccuacgugacccagcagcugauccgggcggccgagauccgcgccagcgccaaccucgccgcgaccaagauguccgagugcguccugggccagagcaagcggguggacuucugcggcaagggguaccaccugauguccuucccccagagcgccccgcacggcguggucuuccuccacgugacguacguccccgcccaggagaagaacuucaccaccgcccccgcgaucugccacgacgggaaggcccacuucccccgcgagggcguguucguguccaacgggacccacugguucgucacgcagcggaacuucuacgagccgcagaucaucaccaccgacaacaccuucgugagcggcaacugcgacguggucaucggcaucgugaacaacacgguguacgacccccugcagcccgagcuggacuccuucaaggaggagcucgacaaguacuucaagaaccacaccagccccgacgucgaccugggggacaucuccggcaucaacgccagcguggugaacauccagaaggagaucgaccgccugaacgaggucgccaagaaccucaacgagucccugaucgaccugcaggagcucgggaaguacgagcaguacaucaaguggccgugguacaucuggcugggcuucaucgccggccugaucgcgaucgugauggugaccaucaugcucugcugcaugaccagcugcugcuccugccugaaggggugcugcagcugcggcuccugcugcaaguucgacgaggacgacagcgagcccguccugaagggggugaagcuccacuacacgugaggacuagucccuguucccagagcccacuuuuuuuucuuuuuuugaaauaaaauagccugucuuucagaucuaaaaaaaaaaaaaaaaaaaaaaaaaaaaaaaaaaaaaaaaaaaaaaaaaaaaaaaaaaaaaaaaaaaaaaaaaaaaaaaaaaaaaaaaaaaaaaaaaaaa

SEQ ID NO: 24737 - RNA, 4070 nt, Artificial Sequence
  SARS-CoV-2/Wuhan/WIV05/2019__EPI_ISL_402128 spike protein mRNA gc (1-1273)(D614G_I692V)
aggagagucccgcagucggcguccagcggcucugcuuguucgugugugugucguugcaggccuuauucaagcuuaccauguucguguuccugguccuccugccccuggugagcucccagugcgugaaccucaccacccgcacgcagcugccgcccgccuacaccaacagcuucacccggggcgucuacuaccccgacaagguguuccgcuccagcgugcugcacuccacccaggaccucuuccugcccuucuucagcaacgucacgugguuccacgccauccacguguccgggaccaacggcaccaagcgguucgacaacccggugcugcccuucaacgacggggucuacuucgcgagcaccgagaaguccaacaucauccgcggcuggaucuucgggacgacccucgacagcaagacccagucccugcugaucgugaacaacgccaccaacguggucaucaaggugugcgaguuccaguucugcaacgaccccuuccucggcguguacuaccacaagaacaacaagagcuggauggaguccgaguuccgggucuacagcuccgccaacaacugcacguucgaguacgugagccagcccuuccugauggaccuggagggcaagcaggggaacuucaagaaccuccgcgaguucguguucaagaacaucgacggcuacuucaagaucuacuccaagcacaccccgaucaaccugguccgggaccugccccagggguucagcgcccucgagccccugguggaccugcccaucggcaucaacaucacccgcuuccagacccuccuggcccugcaccgguccuaccucacgccgggggacagcagcuccggcuggaccgcgggcgccgccgccuacuacgugggguaccugcagccccgcaccuuccugcucaaguacaacgagaacggcaccaucacggacgcggucgacugcgcccuggacccccugagcgagaccaagugcacccucaaguccuucaccguggagaaggggaucuaccagacgagcaacuuccgggugcagcccaccgaguccaucguccgcuucccgaacaucaccaaccugugccccuucggcgagguguucaacgccacccgguucgccagcgucuacgccuggaaccgcaagcggaucuccaacugcguggcggacuacagcgugcuguacaacuccgccagcuucuccacguucaagugcuacggcgucagccccaccaagcucaacgaccugugcuucaccaacguguacgccgacuccuucgugauccgcggggacgagguccggcagaucgcccccggccagaccgggaagaucgccgacuacaacuacaagcugccggacgacuucacgggcugcgugaucgcguggaacagcaacaaccucgacuccaaggucgggggcaacuacaacuaccuguaccgccuguuccgcaagagcaaccucaagcccuucgagcgggacaucuccaccgagaucuaccaggccggcagcacccccugcaacgggguggagggcuucaacugcuacuucccccugcaguccuacggguuccagccgaccaacggcgugggguaccagcccuaccggguggucgugcugagcuucgagcuccugcacgcccccgccacggugugcggccccaagaaguccaccaaccuggucaagaacaagugcgugaacuucaacuucaacggccucaccgggaccggcgugcugaccgagagcaacaagaaguuccugccguuccagcaguucgggcgcgacaucgccgacacgaccgacgcgguccgcgacccccagacccuggagauccucgacaucacccccugcagcuucggcgggguguccgugaucacgccgggcaccaacaccagcaaccaggucgccgugcuguaccagggcgugaacugcaccgagguccccguggccauccacgccgaccagcugacgcccaccuggcggguguacuccaccggcagcaacgucuuccagacccgcgccgggugccucaucggcgcggagcacgugaacaacuccuacgagugcgacauccccaucggggccggcaucugcgccagcuaccagacgcagaccaacuccccgcggcgcgcccggagcguggcgucccagagcgucaucgccuacaccaugucccugggcgccgagaacagcgucgccuacuccaacaacagcaucgccauccccaccaacuucacgaucuccgugaccaccgagauccugcccgugagcaugaccaagacgagcgucgacugcaccauguacaucugcggggacuccaccgagugcagcaaccuccugcugcaguacggcuccuucugcacccagcucaaccgcgcgcugacggggaucgccguggagcaggacaagaacacccaggagguguucgcccaggucaagcagaucuacaagacgcccccgaucaaggacuucggcggguucaacuucagccagauccugcccgaccccuccaagcccagcaagcgguccuucaucgaggaccuccuguucaacaaggugacccuggccgacgccggcuucaucaagcaguacggcgacugccucggggacaucgcggcccgcgaccugaucugcgcccagaaguucaacggccugaccgugcucccgccccugcugaccgacgagaugaucgcccaguacaccagcgcccuccuggcggggaccaucacguccggcuggaccuucggggccggcgccgcccugcagauccccuucgcgaugcagauggccuaccgguucaacggcaucggggucacccagaacgugcucuacgagaaccagaagcugaucgccaaccaguucaacagcgccaucggcaagauccaggacucccugagcuccaccgccagcgcgcucgggaagcugcaggacguggucaaccagaacgcccaggcccugaacacgcucgugaagcagcuguccagcaacuucggcgccaucuccagcgugcugaacgacauccucucccgccuggacaaggucgaggccgaggugcagaucgaccggcugaucaccgggcgccuccagagccugcagaccuacgugacccagcagcugauccgggcggccgagauccgcgccagcgccaaccucgccgcgaccaagauguccgagugcguccugggccagagcaagcggguggacuucugcggcaagggguaccaccugauguccuucccccagagcgccccgcacggcguggucuuccuccacgugacguacguccccgcccaggagaagaacuucaccaccgcccccgcgaucugccacgacgggaaggcccacuucccccgcgagggcguguucguguccaacgggacccacugguucgucacgcagcggaacuucuacgagccgcagaucaucaccaccgacaacaccuucgugagcggcaacugcgacguggucaucggcaucgugaacaacacgguguacgacccccugcagcccgagcuggacuccuucaaggaggagcucgacaaguacuucaagaaccacaccagccccgacgucgaccugggggacaucuccggcaucaacgccagcguggugaacauccagaaggagaucgaccgccugaacgaggucgccaagaaccucaacgagucccugaucgaccugcaggagcucgggaaguacgagcaguacaucaaguggccgugguacaucuggcugggcuucaucgccggccugaucgcgaucgugauggugaccaucaugcucugcugcaugaccagcugcugcuccugccugaaggggugcugcagcugcggcuccugcugcaaguucgacgaggacgacagcgagcccguccugaagggggugaagcuccacuacacgugaggacuagucccuguucccagagcccacuuuuuuuucuuuuuuugaaauaaaauagccugucuuucagaucuaaaaaaaaaaaaaaaaaaaaaaaaaaaaaaaaaaaaaaaaaaaaaaaaaaaaaaaaaaaaaaaaaaaaaaaaaaaaaaaaaaaaaaaaaaaaaaaaaaaa

SEQ ID NO: 24738 - RNA, 4070 nt, Artificial Sequence
  SARS-CoV-2/Wuhan/WIV05/2019__EPI_ISL_402128 spike protein mRNA gc (1-1273)(D614G_M1229I)
aggagagucccgcagucggcguccagcggcucugcuuguucgugugugugucguugcaggccuuauucaagcuuaccauguucguguuccugguccuccugccccuggugagcucccagugcgugaaccucaccacccgcacgcagcugccgcccgccuacaccaacagcuucacccggggcgucuacuaccccgacaagguguuccgcuccagcgugcugcacuccacccaggaccucuuccugcccuucuucagcaacgucacgugguuccacgccauccacguguccgggaccaacggcaccaagcgguucgacaacccggugcugcccuucaacgacggggucuacuucgcgagcaccgagaaguccaacaucauccgcggcuggaucuucgggacgacccucgacagcaagacccagucccugcugaucgugaacaacgccaccaacguggucaucaaggugugcgaguuccaguucugcaacgaccccuuccucggcguguacuaccacaagaacaacaagagcuggauggaguccgaguuccgggucuacagcuccgccaacaacugcacguucgaguacgugagccagcccuuccugauggaccuggagggcaagcaggggaacuucaagaaccuccgcgaguucguguucaagaacaucgacggcuacuucaagaucuacuccaagcacaccccgaucaaccugguccgggaccugccccagggguucagcgcccucgagccccugguggaccugcccaucggcaucaacaucacccgcuuccagacccuccuggcccugcaccgguccuaccucacgccgggggacagcagcuccggcuggaccgcgggcgccgccgccuacuacgugggguaccugcagccccgcaccuuccugcucaaguacaacgagaacggcaccaucacggacgcggucgacugcgcccuggacccccugagcgagaccaagugcacccucaaguccuucaccguggagaaggggaucuaccagacgagcaacuuccgggugcagcccaccgaguccaucguccgcuucccgaacaucaccaaccugugccccuucggcgagguguucaacgccacccgguucgccagcgucuacgccuggaaccgcaagcggaucuccaacugcguggcggacuacagcgugcuguacaacuccgccagcuucuccacguucaagugcuacggcgucagccccaccaagcucaacgaccugugcuucaccaacguguacgccgacuccuucgugauccgcggggacgagguccggcagaucgcccccggccagaccgggaagaucgccgacuacaacuacaagcugccggacgacuucacgggcugcgugaucgcguggaacagcaacaaccucgacuccaaggucgggggcaacuacaacuaccuguaccgccuguuccgcaagagcaaccucaagcccuucgagcgggacaucuccaccgagaucuaccaggccggcagcacccccugcaacgggguggagggcuucaacugcuacuucccccugcaguccuacggguuccagccgaccaacggcgugggguaccagcccuaccggguggucgugcugagcuucgagcuccugcacgcccccgccacggugugcggccccaagaaguccaccaaccuggucaagaacaagugcgugaacuucaacuucaacggccucaccgggaccggcgugcugaccgagagcaacaagaaguuccugccguuccagcaguucgggcgcgacaucgccgacacgaccgacgcgguccgcgacccccagacccuggagauccucgacaucacccccugcagcuucggcgggguguccgugaucacgccgggcaccaacaccagcaaccaggucgccgugcuguaccagggcgugaacugcaccgagguccccguggccauccacgccgaccagcugacgcccaccuggcggguguacuccaccggcagcaacgucuuccagacccgcgccgggugccucaucggcgcggagcacgugaacaacuccuacgagugcgacauccccaucggggccggcaucugcgccagcuaccagacgcagaccaacuccccgcggcgcgcccggagcguggcgucccagagcaucaucgccuacaccaugucccugggcgccgagaacagcgucgccuacuccaacaacagcaucgccauccccaccaacuucacgaucuccgugaccaccgagauccugcccgugagcaugaccaagacgagcgucgacugcaccauguacaucugcggggacuccaccgagugcagcaaccuccugcugcaguacggcuccuucugcacccagcucaaccgcgcgcugacggggaucgccguggagcaggacaagaacacccaggagguguucgcccaggucaagcagaucuacaagacgcccccgaucaaggacuucggcggguucaacuucagccagauccugcccgaccccuccaagcccagcaagcgguccuucaucgaggaccuccuguucaacaaggugacccuggccgacgccggcuucaucaagcaguacggcgacugccucggggacaucgcggcccgcgaccugaucugcgcccagaaguucaacggccugaccgugcucccgccccugcugaccgacgagaugaucgcccaguacaccagcgcccuccuggcggggaccaucacguccggcuggaccuucggggccggcgccgcccugcagauccccuucgcgaugcagauggccuaccgguucaacggcaucggggucacccagaacgugcucuacgagaaccagaagcugaucgccaaccaguucaacagcgccaucggcaagauccaggacucccugagcuccaccgccagcgcgcucgggaagcugcaggacguggucaaccagaacgcccaggcccugaacacgcucgugaagcagcuguccagcaacuucggcgccaucuccagcgugcugaacgacauccucucccgccuggacaaggucgaggccgaggugcagaucgaccggcugaucaccgggcgccuccagagccugcagaccuacgugacccagcagcugauccgggcggccgagauccgcgccagcgccaaccucgccgcgaccaagauguccgagugcguccugggccagagcaagcggguggacuucugcggcaagggguaccaccugauguccuucccccagagcgccccgcacggcguggucuuccuccacgugacguacguccccgcccaggagaagaacuucaccaccgcccccgcgaucugccacgacgggaaggcccacuucccccgcgagggcguguucguguccaacgggacccacugguucgucacgcagcggaacuucuacgagccgcagaucaucaccaccgacaacaccuucgugagcggcaacugcgacguggucaucggcaucgugaacaacacgguguacgacccccugcagcccgagcuggacuccuucaaggaggagcucgacaaguacuucaagaaccacaccagccccgacgucgaccugggggacaucuccggcaucaacgccagcguggugaacauccagaaggagaucgaccgccugaacgaggucgccaagaaccucaacgagucccugaucgaccugcaggagcucgggaaguacgagcaguacaucaaguggccgugguacaucuggcugggcuucaucgccggccugaucgcgaucgugaucgugaccaucaugcucugcugcaugaccagcugcugcuccugccugaaggggugcugcagcugcggcuccugcugcaaguucgacgaggacgacagcgagcccguccugaagggggugaagcuccacuacacgugaggacuagucccuguucccagagcccacuuuuuuuucuuuuuuugaaauaaaauagccugucuuucagaucuaaaaaaaaaaaaaaaaaaaaaaaaaaaaaaaaaaaaaaaaaaaaaaaaaaaaaaaaaaaaaaaaaaaaaaaaaaaaaaaaaaaaaaaaaaaaaaaaaaaa

SEQ ID NO: 24739 - RNA, 4064 nt, Artificial Sequence
  SARS-CoV-2/Wuhan/WIV05/2019__EPI_ISL_402128 spike protein mRNA gc (1-1273)(H69del_V70del_A222V_Y453F_S477N_D614G_I692V)
aggagagucccgcagucggcguccagcggcucugcuuguucgugugugugucguugcaggccuuauucaagcuuaccauguucguguuccugguccuccugccccuggugagcucccagugcgugaaccucaccacccgcacgcagcugccgcccgccuacaccaacagcuucacccggggcgucuacuaccccgacaagguguuccgcuccagcgugcugcacuccacccaggaccucuuccugcccuucuucagcaacgucacgugguuccacgccaucuccgggaccaacggcaccaagcgguucgacaacccggugcugcccuucaacgacggggucuacuucgcgagcaccgagaaguccaacaucauccgcggcuggaucuucgggacgacccucgacagcaagacccagucccugcugaucgugaacaacgccaccaacguggucaucaaggugugcgaguuccaguucugcaacgaccccuuccucggcguguacuaccacaagaacaacaagagcuggauggaguccgaguuccgggucuacagcuccgccaacaacugcacguucgaguacgugagccagcccuuccugauggaccuggagggcaagcaggggaacuucaagaaccuccgcgaguucguguucaagaacaucgacggcuacuucaagaucuacuccaagcacaccccgaucaaccugguccgggaccugccccagggguucagcguccucgagccccugguggaccugcccaucggcaucaacaucacccgcuuccagacccuccuggcccugcaccgguccuaccucacgccgggggacagcagcuccggcuggaccgcgggcgccgccgccuacuacgugggguaccugcagccccgcaccuuccugcucaaguacaacgagaacggcaccaucacggacgcggucgacugcgcccuggacccccugagcgagaccaagugcacccucaaguccuucaccguggagaaggggaucuaccagacgagcaacuuccgggugcagcccaccgaguccaucguccgcuucccgaacaucaccaaccugugccccuucggcgagguguucaacgccacccgguucgccagcgucuacgccuggaaccgcaagcggaucuccaacugcguggcggacuacagcgugcuguacaacuccgccagcuucuccacguucaagugcuacggcgucagccccaccaagcucaacgaccugugcuucaccaacguguacgccgacuccuucgugauccgcggggacgagguccggcagaucgcccccggccagaccgggaagaucgccgacuacaacuacaagcugccggacgacuucacgggcugcgugaucgcguggaacagcaacaaccucgacuccaaggucgggggcaacuacaacuaccuguuccgccuguuccgcaagagcaaccucaagcccuucgagcgggacaucuccaccgagaucuaccaggccggcaacacccccugcaacgggguggagggcuucaacugcuacuucccccugcaguccuacggguuccagccgaccaacggcgugggguaccagcccuaccggguggucgugcugagcuucgagcuccugcacgcccccgccacggugugcggccccaagaaguccaccaaccuggucaagaacaagugcgugaacuucaacuucaacggccucaccgggaccggcgugcugaccgagagcaacaagaaguuccugccguuccagcaguucgggcgcgacaucgccgacacgaccgacgcgguccgcgacccccagacccuggagauccucgacaucacccccugcagcuucggcgggguguccgugaucacgccgggcaccaacaccagcaaccaggucgccgugcuguaccagggcgugaacugcaccgagguccccguggccauccacgccgaccagcugacgcccaccuggcggguguacuccaccggcagcaacgucuuccagacccgcgccgggugccucaucggcgcggagcacgugaacaacuccuacgagugcgacauccccaucggggccggcaucugcgccagcuaccagacgcagaccaacuccccgcggcgcgcccggagcguggcgucccagagcgucaucgccuacaccaugucccugggcgccgagaacagcgucgccuacuccaacaacagcaucgccauccccaccaacuucacgaucuccgugaccaccgagauccugcccgugagcaugaccaagacgagcgucgacugcaccauguacaucugcggggacuccaccgagugcagcaaccuccugcugcaguacggcuccuucugcacccagcucaaccgcgcgcugacggggaucgccguggagcaggacaagaacacccaggagguguucgcccaggucaagcagaucuacaagacgcccccgaucaaggacuucggcggguucaacuucagccagauccugcccgaccccuccaagcccagcaagcgguccuucaucgaggaccuccuguucaacaaggugacccuggccgacgccggcuucaucaagcaguacggcgacugccucggggacaucgcggcccgcgaccugaucugcgcccagaaguucaacggccugaccgugcucccgccccugcugaccgacgagaugaucgcccaguacaccagcgcccuccuggcggggaccaucacguccggcuggaccuucggggccggcgccgcccugcagauccccuucgcgaugcagauggccuaccgguucaacggcaucggggucacccagaacgugcucuacgagaaccagaagcugaucgccaaccaguucaacagcgccaucggcaagauccaggacucccugagcuccaccgccagcgcgcucgggaagcugcaggacguggucaaccagaacgcccaggcccugaacacgcucgugaagcagcuguccagcaacuucggcgccaucuccagcgugcugaacgacauccucucccgccuggacaaggucgaggccgaggugcagaucgaccggcugaucaccgggcgccuccagagccugcagaccuacgugacccagcagcugauccgggcggccgagauccgcgccagcgccaaccucgccgcgaccaagauguccgagugcguccugggccagagcaagcggguggacuucugcggcaagggguaccaccugauguccuucccccagagcgccccgcacggcguggucuuccuccacgugacguacguccccgcccaggagaagaacuucaccaccgcccccgcgaucugccacgacgggaaggcccacuucccccgcgagggcguguucguguccaacgggacccacugguucgucacgcagcggaacuucuacgagccgcagaucaucaccaccgacaacaccuucgugagcggcaacugcgacguggucaucggcaucgugaacaacacgguguacgacccccugcagcccgagcuggacuccuucaaggaggagcucgacaaguacuucaagaaccacaccagccccgacgucgaccugggggacaucuccggcaucaacgccagcguggugaacauccagaaggagaucgaccgccugaacgaggucgccaagaaccucaacgagucccugaucgaccugcaggagcucgggaaguacgagcaguacaucaaguggccgugguacaucuggcugggcuucaucgccggccugaucgcgaucgugauggugaccaucaugcucugcugcaugaccagcugcugcuccugccugaaggggugcugcagcugcggcuccugcugcaaguucgacgaggacgacagcgagcccguccugaagggggugaagcuccacuacacgugaggacuagucccuguucccagagcccacuuuuuuuucuuuuuuugaaauaaaauagccugucuuucagaucuaaaaaaaaaaaaaaaaaaaaaaaaaaaaaaaaaaaaaaaaaaaaaaaaaaaaaaaaaaaaaaaaaaaaaaaaaaaaaaaaaaaaaaaaaaaaaaaaaaaa

SEQ ID NO: 24740 - RNA, 4064 nt, Artificial Sequence
  SARS-CoV-2/Wuhan/WIV05/2019__EPI_ISL_402128 spike protein mRNA gc (1-1273)(H69del_V70del_Y453F_D614G_I692V_M1229I)
aggagagucccgcagucggcguccagcggcucugcuuguucgugugugugucguugcaggccuuauucaagcuuaccauguucguguuccugguccuccugccccuggugagcucccagugcgugaaccucaccacccgcacgcagcugccgcccgccuacaccaacagcuucacccggggcgucuacuaccccgacaagguguuccgcuccagcgugcugcacuccacccaggaccucuuccugcccuucuucagcaacgucacgugguuccacgccaucuccgggaccaacggcaccaagcgguucgacaacccggugcugcccuucaacgacggggucuacuucgcgagcaccgagaaguccaacaucauccgcggcuggaucuucgggacgacccucgacagcaagacccagucccugcugaucgugaacaacgccaccaacguggucaucaaggugugcgaguuccaguucugcaacgaccccuuccucggcguguacuaccacaagaacaacaagagcuggauggaguccgaguuccgggucuacagcuccgccaacaacugcacguucgaguacgugagccagcccuuccugauggaccuggagggcaagcaggggaacuucaagaaccuccgcgaguucguguucaagaacaucgacggcuacuucaagaucuacuccaagcacaccccgaucaaccugguccgggaccugccccagggguucagcgcccucgagccccugguggaccugcccaucggcaucaacaucacccgcuuccagacccuccuggcccugcaccgguccuaccucacgccgggggacagcagcuccggcuggaccgcgggcgccgccgccuacuacgugggguaccugcagccccgcaccuuccugcucaaguacaacgagaacggcaccaucacggacgcggucgacugcgcccuggacccccugagcgagaccaagugcacccucaaguccuucaccguggagaaggggaucuaccagacgagcaacuuccgggugcagcccaccgaguccaucguccgcuucccgaacaucaccaaccugugccccuucggcgagguguucaacgccacccgguucgccagcgucuacgccuggaaccgcaagcggaucuccaacugcguggcggacuacagcgugcuguacaacuccgccagcuucuccacguucaagugcuacggcgucagccccaccaagcucaacgaccugugcuucaccaacguguacgccgacuccuucgugauccgcggggacgagguccggcagaucgcccccggccagaccgggaagaucgccgacuacaacuacaagcugccggacgacuucacgggcugcgugaucgcguggaacagcaacaaccucgacuccaaggucgggggcaacuacaacuaccuguuccgccuguuccgcaagagcaaccucaagcccuucgagcgggacaucuccaccgagaucuaccaggccggcagcacccccugcaacgggguggagggcuucaacugcuacuucccccugcaguccuacggguuccagccgaccaacggcgugggguaccagcccuaccggguggucgugcugagcuucgagcuccugcacgcccccgccacggugugcggccccaagaaguccaccaaccuggucaagaacaagugcgugaacuucaacuucaacggccucaccgggaccggcgugcugaccgagagcaacaagaaguuccugccguuccagcaguucgggcgcgacaucgccgacacgaccgacgcgguccgcgacccccagacccuggagauccucgacaucacccccugcagcuucggcgggguguccgugaucacgccgggcaccaacaccagcaaccaggucgccgugcuguaccagggcgugaacugcaccgagguccccguggccauccacgccgaccagcugacgcccaccuggcggguguacuccaccggcagcaacgucuuccagacccgcgccgggugccucaucggcgcggagcacgugaacaacuccuacgagugcgacauccccaucggggccggcaucugcgccagcuaccagacgcagaccaacuccccgcggcgcgcccggagcguggcgucccagagcgugaucgccuacaccaugucccugggcgccgagaacagcgucgccuacuccaacaacagcaucgccauccccaccaacuucacgaucuccgugaccaccgagauccugcccgugagcaugaccaagacgagcgucgacugcaccauguacaucugcggggacuccaccgagugcagcaaccuccugcugcaguacggcuccuucugcacccagcucaaccgcgcgcugacggggaucgccguggagcaggacaagaacacccaggagguguucgcccaggucaagcagaucuacaagacgcccccgaucaaggacuucggcggguucaacuucagccagauccugcccgaccccuccaagcccagcaagcgguccuucaucgaggaccuccuguucaacaaggugacccuggccgacgccggcuucaucaagcaguacggcgacugccucggggacaucgcggcccgcgaccugaucugcgcccagaaguucaacggccugaccgugcucccgccccugcugaccgacgagaugaucgcccaguacaccagcgcccuccuggcggggaccaucacguccggcuggaccuucggggccggcgccgcccugcagauccccuucgcgaugcagauggccuaccgguucaacggcaucggggucacccagaacgugcucuacgagaaccagaagcugaucgccaaccaguucaacagcgccaucggcaagauccaggacucccugagcuccaccgccagcgcgcucgggaagcugcaggacguggucaaccagaacgcccaggcccugaacacgcucgugaagcagcuguccagcaacuucggcgccaucuccagcgugcugaacgacauccucucccgccuggacaaggucgaggccgaggugcagaucgaccggcugaucaccgggcgccuccagagccugcagaccuacgugacccagcagcugauccgggcggccgagauccgcgccagcgccaaccucgccgcgaccaagauguccgagugcguccugggccagagcaagcggguggacuucugcggcaagggguaccaccugauguccuucccccagagcgccccgcacggcguggucuuccuccacgugacguacguccccgcccaggagaagaacuucaccaccgcccccgcgaucugccacgacgggaaggcccacuucccccgcgagggcguguucguguccaacgggacccacugguucgucacgcagcggaacuucuacgagccgcagaucaucaccaccgacaacaccuucgugagcggcaacugcgacguggucaucggcaucgugaacaacacgguguacgacccccugcagcccgagcuggacuccuucaaggaggagcucgacaaguacuucaagaaccacaccagccccgacgucgaccugggggacaucuccggcaucaacgccagcguggugaacauccagaaggagaucgaccgccugaacgaggucgccaagaaccucaacgagucccugaucgaccugcaggagcucgggaaguacgagcaguacaucaaguggccgugguacaucuggcugggcuucaucgccggccugaucgcgaucgugaucgugaccaucaugcucugcugcaugaccagcugcugcuccugccugaaggggugcugcagcugcggcuccugcugcaaguucgacgaggacgacagcgagcccguccugaagggggugaagcuccacuacacgugaggacuagucccuguucccagagcccacuuuuuuuucuuuuuuugaaauaaaauagccugucuuucagaucuaaaaaaaaaaaaaaaaaaaaaaaaaaaaaaaaaaaaaaaaaaaaaaaaaaaaaaaaaaaaaaaaaaaaaaaaaaaaaaaaaaaaaaaaaaaaaaaaaaaa

SEQ ID NO: 24741 - RNA, 4061 nt, Artificial Sequence
  SARS-CoV-2/Wuhan/WIV05/2019__EPI_ISL_402128 spike protein mRNA gc (1-1273)(H69del_V70del_Y144del_N501Y_A570D_D614G_P681H_T716I_S982 A_D1118H)
aggagagucccgcagucggcguccagcggcucugcuuguucgugugugugucguugcaggccuuauucaagcuuaccauguucguguuccugguccuccugccccuggugagcucccagugcgugaaccucaccacccgcacgcagcugccgcccgccuacaccaacagcuucacccggggcgucuacuaccccgacaagguguuccgcuccagcgugcugcacuccacccaggaccucuuccugcccuucuucagcaacgucacgugguuccacgccaucuccgggaccaacggcaccaagcgguucgacaacccggugcugcccuucaacgacggggucuacuucgcgagcaccgagaaguccaacaucauccgcggcuggaucuucgggacgacccucgacagcaagacccagucccugcugaucgugaacaacgccaccaacguggucaucaaggugugcgaguuccaguucugcaacgaccccuuccucggcguguaccacaagaacaacaagagcuggauggaguccgaguuccgggucuacagcuccgccaacaacugcacguucgaguacgugagccagcccuuccugauggaccuggagggcaagcaggggaacuucaagaaccuccgcgaguucguguucaagaacaucgacggcuacuucaagaucuacuccaagcacaccccgaucaaccugguccgggaccugccccagggguucagcgcccucgagccccugguggaccugcccaucggcaucaacaucacccgcuuccagacccuccuggcccugcaccgguccuaccucacgccgggggacagcagcuccggcuggaccgcgggcgccgccgccuacuacgugggguaccugcagccccgcaccuuccugcucaaguacaacgagaacggcaccaucacggacgcggucgacugcgcccuggacccccugagcgagaccaagugcacccucaaguccuucaccguggagaaggggaucuaccagacgagcaacuuccgggugcagcccaccgaguccaucguccgcuucccgaacaucaccaaccugugccccuucggcgagguguucaacgccacccgguucgccagcgucuacgccuggaaccgcaagcggaucuccaacugcguggcggacuacagcgugcuguacaacuccgccagcuucuccacguucaagugcuacggcgucagccccaccaagcucaacgaccugugcuucaccaacguguacgccgacuccuucgugauccgcggggacgagguccggcagaucgcccccggccagaccgggaagaucgccgacuacaacuacaagcugccggacgacuucacgggcugcgugaucgcguggaacagcaacaaccucgacuccaaggucgggggcaacuacaacuaccuguaccgccuguuccgcaagagcaaccucaagcccuucgagcgggacaucuccaccgagaucuaccaggccggcagcacccccugcaacgggguggagggcuucaacugcuacuucccccugcaguccuacggguuccagccgaccuacggcgugggguaccagcccuaccggguggucgugcugagcuucgagcuccugcacgcccccgccacggugugcggccccaagaaguccaccaaccuggucaagaacaagugcgugaacuucaacuucaacggccucaccgggaccggcgugcugaccgagagcaacaagaaguuccugccguuccagcaguucgggcgcgacaucgacgacacgaccgacgcgguccgcgacccccagacccuggagauccucgacaucacccccugcagcuucggcgggguguccgugaucacgccgggcaccaacaccagcaaccaggucgccgugcuguaccagggcgugaacugcaccgagguccccguggccauccacgccgaccagcugacgcccaccuggcggguguacuccaccggcagcaacgucuuccagacccgcgccgggugccucaucggcgcggagcacgugaacaacuccuacgagugcgacauccccaucggggccggcaucugcgccagcuaccagacgcagaccaacucccaccggcgcgcccggagcguggcgucccagagcaucaucgccuacaccaugucccugggcgccgagaacagcgucgccuacuccaacaacagcaucgccauccccaucaacuucacgaucuccgugaccaccgagauccugcccgugagcaugaccaagacgagcgucgacugcaccauguacaucugcggggacuccaccgagugcagcaaccuccugcugcaguacggcuccuucugcacccagcucaaccgcgcgcugacggggaucgccguggagcaggacaagaacacccaggagguguucgcccaggucaagcagaucuacaagacgcccccgaucaaggacuucggcggguucaacuucagccagauccugcccgaccccuccaagcccagcaagcgguccuucaucgaggaccuccuguucaacaaggugacccuggccgacgccggcuucaucaagcaguacggcgacugccucggggacaucgcggcccgcgaccugaucugcgcccagaaguucaacggccugaccgugcucccgccccugcugaccgacgagaugaucgcccaguacaccagcgcccuccuggcggggaccaucacguccggcuggaccuucggggccggcgccgcccugcagauccccuucgcgaugcagauggccuaccgguucaacggcaucggggucacccagaacgugcucuacgagaaccagaagcugaucgccaaccaguucaacagcgccaucggcaagauccaggacucccugagcuccaccgccagcgcgcucgggaagcugcaggacguggucaaccagaacgcccaggcccugaacacgcucgugaagcagcuguccagcaacuucggcgccaucuccagcgugcugaacgacauccucgcccgccuggacaaggucgaggccgaggugcagaucgaccggcugaucaccgggcgccuccagagccugcagaccuacgugacccagcagcugauccgggcggccgagauccgcgccagcgccaaccucgccgcgaccaagauguccgagugcguccugggccagagcaagcggguggacuucugcggcaagggguaccaccugauguccuucccccagagcgccccgcacggcguggucuuccuccacgugacguacguccccgcccaggagaagaacuucaccaccgcccccgcgaucugccacgacgggaaggcccacuucccccgcgagggcguguucguguccaacgggacccacugguucgucacgcagcggaacuucuacgagccgcagaucaucaccacccacaacaccuucgugagcggcaacugcgacguggucaucggcaucgugaacaacacgguguacgacccccugcagcccgagcuggacuccuucaaggaggagcucgacaaguacuucaagaaccacaccagccccgacgucgaccugggggacaucuccggcaucaacgccagcguggugaacauccagaaggagaucgaccgccugaacgaggucgccaagaaccucaacgagucccugaucgaccugcaggagcucgggaaguacgagcaguacaucaaguggccgugguacaucuggcugggcuucaucgccggccugaucgcgaucgugauggugaccaucaugcucugcugcaugaccagcugcugcuccugccugaaggggugcugcagcugcggcuccugcugcaaguucgacgaggacgacagcgagcccguccugaagggggugaagcuccacuacacgugaggacuagucccuguucccagagcccacuuuuuuuucuuuuuuugaaauaaaauagccugucuuucagaucuaaaaaaaaaaaaaaaaaaaaaaaaaaaaaaaaaaaaaaaaaaaaaaaaaaaaaaaaaaaaaaaaaaaaaaaaaaaaaaaaaaaaaaaaaaaaaaaaaaaa

SEQ ID NO: 24742 - RNA, 4070 nt, Artificial Sequence
  SARS-CoV-2/Wuhan/WIV05/2019__EPI_ISL_402128 spike protein mRNA gc (1-1273)(K417N_E484K_N501Y_D614G)
aggagagucccgcagucggcguccagcggcucugcuuguucgugugugugucguugcaggccuuauucaagcuuaccauguucguguuccugguccuccugccccuggugagcucccagugcgugaaccucaccacccgcacgcagcugccgcccgccuacaccaacagcuucacccggggcgucuacuaccccgacaagguguuccgcuccagcgugcugcacuccacccaggaccucuuccugcccuucuucagcaacgucacgugguuccacgccauccacguguccgggaccaacggcaccaagcgguucgacaacccggugcugcccuucaacgacggggucuacuucgcgagcaccgagaaguccaacaucauccgcggcuggaucuucgggacgacccucgacagcaagacccagucccugcugaucgugaacaacgccaccaacguggucaucaaggugugcgaguuccaguucugcaacgaccccuuccucggcguguacuaccacaagaacaacaagagcuggauggaguccgaguuccgggucuacagcuccgccaacaacugcacguucgaguacgugagccagcccuuccugauggaccuggagggcaagcaggggaacuucaagaaccuccgcgaguucguguucaagaacaucgacggcuacuucaagaucuacuccaagcacaccccgaucaaccugguccgggaccugccccagggguucagcgcccucgagccccugguggaccugcccaucggcaucaacaucacccgcuuccagacccuccuggcccugcaccgguccuaccucacgccgggggacagcagcuccggcuggaccgcgggcgccgccgccuacuacgugggguaccugcagccccgcaccuuccugcucaaguacaacgagaacggcaccaucacggacgcggucgacugcgcccuggacccccugagcgagaccaagugcacccucaaguccuucaccguggagaaggggaucuaccagacgagcaacuuccgggugcagcccaccgaguccaucguccgcuucccgaacaucaccaaccugugccccuucggcgagguguucaacgccacccgguucgccagcgucuacgccuggaaccgcaagcggaucuccaacugcguggcggacuacagcgugcuguacaacuccgccagcuucuccacguucaagugcuacggcgucagccccaccaagcucaacgaccugugcuucaccaacguguacgccgacuccuucgugauccgcggggacgagguccggcagaucgcccccggccagaccgggaacaucgccgacuacaacuacaagcugccggacgacuucacgggcugcgugaucgcguggaacagcaacaaccucgacuccaaggucgggggcaacuacaacuaccuguaccgccuguuccgcaagagcaaccucaagcccuucgagcgggacaucuccaccgagaucuaccaggccggcagcacccccugcaacggggugaagggcuucaacugcuacuucccccugcaguccuacggguuccagccgaccuacggcgugggguaccagcccuaccggguggucgugcugagcuucgagcuccugcacgcccccgccacggugugcggccccaagaaguccaccaaccuggucaagaacaagugcgugaacuucaacuucaacggccucaccgggaccggcgugcugaccgagagcaacaagaaguuccugccguuccagcaguucgggcgcgacaucgccgacacgaccgacgcgguccgcgacccccagacccuggagauccucgacaucacccccugcagcuucggcgggguguccgugaucacgccgggcaccaacaccagcaaccaggucgccgugcuguaccagggcgugaacugcaccgagguccccguggccauccacgccgaccagcugacgcccaccuggcggguguacuccaccggcagcaacgucuuccagacccgcgccgggugccucaucggcgcggagcacgugaacaacuccuacgagugcgacauccccaucggggccggcaucugcgccagcuaccagacgcagaccaacuccccgcggcgcgcccggagcguggcgucccagagcaucaucgccuacaccaugucccugggcgccgagaacagcgucgccuacuccaacaacagcaucgccauccccaccaacuucacgaucuccgugaccaccgagauccugcccgugagcaugaccaagacgagcgucgacugcaccauguacaucugcggggacuccaccgagugcagcaaccuccugcugcaguacggcuccuucugcacccagcucaaccgcgcgcugacggggaucgccguggagcaggacaagaacacccaggagguguucgcccaggucaagcagaucuacaagacgcccccgaucaaggacuucggcggguucaacuucagccagauccugcccgaccccuccaagcccagcaagcgguccuucaucgaggaccuccuguucaacaaggugacccuggccgacgccggcuucaucaagcaguacggcgacugccucggggacaucgcggcccgcgaccugaucugcgcccagaaguucaacggccugaccgugcucccgccccugcugaccgacgagaugaucgcccaguacaccagcgcccuccuggcggggaccaucacguccggcuggaccuucggggccggcgccgcccugcagauccccuucgcgaugcagauggccuaccgguucaacggcaucggggucacccagaacgugcucuacgagaaccagaagcugaucgccaaccaguucaacagcgccaucggcaagauccaggacucccugagcuccaccgccagcgcgcucgggaagcugcaggacguggucaaccagaacgcccaggcccugaacacgcucgugaagcagcuguccagcaacuucggcgccaucuccagcgugcugaacgacauccucucccgccuggacaaggucgaggccgaggugcagaucgaccggcugaucaccgggcgccuccagagccugcagaccuacgugacccagcagcugauccgggcggccgagauccgcgccagcgccaaccucgccgcgaccaagauguccgagugcguccugggccagagcaagcggguggacuucugcggcaagggguaccaccugauguccuucccccagagcgccccgcacggcguggucuuccuccacgugacguacguccccgcccaggagaagaacuucaccaccgcccccgcgaucugccacgacgggaaggcccacuucccccgcgagggcguguucguguccaacgggacccacugguucgucacgcagcggaacuucuacgagccgcagaucaucaccaccgacaacaccuucgugagcggcaacugcgacguggucaucggcaucgugaacaacacgguguacgacccccugcagcccgagcuggacuccuucaaggaggagcucgacaaguacuucaagaaccacaccagccccgacgucgaccugggggacaucuccggcaucaacgccagcguggugaacauccagaaggagaucgaccgccugaacgaggucgccaagaaccucaacgagucccugaucgaccugcaggagcucgggaaguacgagcaguacaucaaguggccgugguacaucuggcugggcuucaucgccggccugaucgcgaucgugauggugaccaucaugcucugcugcaugaccagcugcugcuccugccugaaggggugcugcagcugcggcuccugcugcaaguucgacgaggacgacagcgagcccguccugaagggggugaagcuccacuacacgugaggacuagucccuguucccagagcccacuuuuuuuucuuuuuuugaaauaaaauagccugucuuucagaucuaaaaaaaaaaaaaaaaaaaaaaaaaaaaaaaaaaaaaaaaaaaaaaaaaaaaaaaaaaaaaaaaaaaaaaaaaaaaaaaaaaaaaaaaaaaaaaaaaaaa

SEQ ID NO: 24743 - RNA, 4061 nt, Artificial Sequence
  SARS-CoV-2/Wuhan/WIV05/2019__EPI_ISL_402128 spike protein mRNA gc (1-1273)(L18F_D80A_D215G_L242del_A243del_L244del_R246I_K417N_E484 K_N501Y_D614G_A701V)
aggagagucccgcagucggcguccagcggcucugcuuguucgugugugugucguugcaggccuuauucaagcuuaccauguucguguuccugguccuccugccccuggugagcucccagugcgugaacuucaccacccgcacgcagcugccgcccgccuacaccaacagcuucacccggggcgucuacuaccccgacaagguguuccgcuccagcgugcugcacuccacccaggaccucuuccugcccuucuucagcaacgucacgugguuccacgccauccacguguccgggaccaacggcaccaagcgguucgccaacccggugcugcccuucaacgacggggucuacuucgcgagcaccgagaaguccaacaucauccgcggcuggaucuucgggacgacccucgacagcaagacccagucccugcugaucgugaacaacgccaccaacguggucaucaaggugugcgaguuccaguucugcaacgaccccuuccucggcguguacuaccacaagaacaacaagagcuggauggaguccgaguuccgggucuacagcuccgccaacaacugcacguucgaguacgugagccagcccuuccugauggaccuggagggcaagcaggggaacuucaagaaccuccgcgaguucguguucaagaacaucgacggcuacuucaagaucuacuccaagcacaccccgaucaaccugguccggggccugccccagggguucagcgcccucgagccccugguggaccugcccaucggcaucaacaucacccgcuuccagacccuccacaucuccuaccucacgccgggggacagcagcuccggcuggaccgcgggcgccgccgccuacuacgugggguaccugcagccccgcaccuuccugcucaaguacaacgagaacggcaccaucacggacgcggucgacugcgcccuggacccccugagcgagaccaagugcacccucaaguccuucaccguggagaaggggaucuaccagacgagcaacuuccgggugcagcccaccgaguccaucguccgcuucccgaacaucaccaaccugugccccuucggcgagguguucaacgccacccgguucgccagcgucuacgccuggaaccgcaagcggaucuccaacugcguggcggacuacagcgugcuguacaacuccgccagcuucuccacguucaagugcuacggcgucagccccaccaagcucaacgaccugugcuucaccaacguguacgccgacuccuucgugauccgcggggacgagguccggcagaucgcccccggccagaccgggaacaucgccgacuacaacuacaagcugccggacgacuucacgggcugcgugaucgcguggaacagcaacaaccucgacuccaaggucgggggcaacuacaacuaccuguaccgccuguuccgcaagagcaaccucaagcccuucgagcgggacaucuccaccgagaucuaccaggccggcagcacccccugcaacggggugaagggcuucaacugcuacuucccccugcaguccuacggguuccagccgaccuacggcgugggguaccagcccuaccggguggucgugcugagcuucgagcuccugcacgcccccgccacggugugcggccccaagaaguccaccaaccuggucaagaacaagugcgugaacuucaacuucaacggccucaccgggaccggcgugcugaccgagagcaacaagaaguuccugccguuccagcaguucgggcgcgacaucgccgacacgaccgacgcgguccgcgacccccagacccuggagauccucgacaucacccccugcagcuucggcgggguguccgugaucacgccgggcaccaacaccagcaaccaggucgccgugcuguaccagggcgugaacugcaccgagguccccguggccauccacgccgaccagcugacgcccaccuggcggguguacuccaccggcagcaacgucuuccagacccgcgccgggugccucaucggcgcggagcacgugaacaacuccuacgagugcgacauccccaucggggccggcaucugcgccagcuaccagacgcagaccaacuccccgcggcgcgcccggagcguggcgucccagagcaucaucgccuacaccaugucccugggcguggagaacagcgucgccuacuccaacaacagcaucgccauccccaccaacuucacgaucuccgugaccaccgagauccugcccgugagcaugaccaagacgagcgucgacugcaccauguacaucugcggggacuccaccgagugcagcaaccuccugcugcaguacggcuccuucugcacccagcucaaccgcgcgcugacggggaucgccguggagcaggacaagaacacccaggagguguucgcccaggucaagcagaucuacaagacgcccccgaucaaggacuucggcggguucaacuucagccagauccugcccgaccccuccaagcccagcaagcgguccuucaucgaggaccuccuguucaacaaggugacccuggccgacgccggcuucaucaagcaguacggcgacugccucggggacaucgcggcccgcgaccugaucugcgcccagaaguucaacggccugaccgugcucccgccccugcugaccgacgagaugaucgcccaguacaccagcgcccuccuggcggggaccaucacguccggcuggaccuucggggccggcgccgcccugcagauccccuucgcgaugcagauggccuaccgguucaacggcaucggggucacccagaacgugcucuacgagaaccagaagcugaucgccaaccaguucaacagcgccaucggcaagauccaggacucccugagcuccaccgccagcgcgcucgggaagcugcaggacguggucaaccagaacgcccaggcccugaacacgcucgugaagcagcuguccagcaacuucggcgccaucuccagcgugcugaacgacauccucucccgccuggacaaggucgaggccgaggugcagaucgaccggcugaucaccgggcgccuccagagccugcagaccuacgugacccagcagcugauccgggcggccgagauccgcgccagcgccaaccucgccgcgaccaagauguccgagugcguccugggccagagcaagcggguggacuucugcggcaagggguaccaccugauguccuucccccagagcgccccgcacggcguggucuuccuccacgugacguacguccccgcccaggagaagaacuucaccaccgcccccgcgaucugccacgacgggaaggcccacuucccccgcgagggcguguucguguccaacgggacccacugguucgucacgcagcggaacuucuacgagccgcagaucaucaccaccgacaacaccuucgugagcggcaacugcgacguggucaucggcaucgugaacaacacgguguacgacccccugcagcccgagcuggacuccuucaaggaggagcucgacaaguacuucaagaaccacaccagccccgacgucgaccugggggacaucuccggcaucaacgccagcguggugaacauccagaaggagaucgaccgccugaacgaggucgccaagaaccucaacgagucccugaucgaccugcaggagcucgggaaguacgagcaguacaucaaguggccgugguacaucuggcugggcuucaucgccggccugaucgcgaucgugauggugaccaucaugcucugcugcaugaccagcugcugcuccugccugaaggggugcugcagcugcggcuccugcugcaaguucgacgaggacgacagcgagcccguccugaagggggugaagcuccacuacacgugaggacuagucccuguucccagagcccacuuuuuuuucuuuuuuugaaauaaaauagccugucuuucagaucuaaaaaaaaaaaaaaaaaaaaaaaaaaaaaaaaaaaaaaaaaaaaaaaaaaaaaaaaaaaaaaaaaaaaaaaaaaaaaaaaaaaaaaaaaaaaaaaaaaaa

SEQ ID NO: 24744 - RNA, 4070 nt, Artificial Sequence
  SARS-CoV-2/Wuhan/WIV05/2019__EPI_ISL_402128 spike protein mRNA gc (1-1273)(E484K_D614G)
aggagagucccgcagucggcguccagcggcucugcuuguucgugugugugucguugcaggccuuauucaagcuuaccauguucguguuccugguccuccugccccuggugagcucccagugcgugaaccucaccacccgcacgcagcugccgcccgccuacaccaacagcuucacccggggcgucuacuaccccgacaagguguuccgcuccagcgugcugcacuccacccaggaccucuuccugcccuucuucagcaacgucacgugguuccacgccauccacguguccgggaccaacggcaccaagcgguucgacaacccggugcugcccuucaacgacggggucuacuucgcgagcaccgagaaguccaacaucauccgcggcuggaucuucgggacgacccucgacagcaagacccagucccugcugaucgugaacaacgccaccaacguggucaucaaggugugcgaguuccaguucugcaacgaccccuuccucggcguguacuaccacaagaacaacaagagcuggauggaguccgaguuccgggucuacagcuccgccaacaacugcacguucgaguacgugagccagcccuuccugauggaccuggagggcaagcaggggaacuucaagaaccuccgcgaguucguguucaagaacaucgacggcuacuucaagaucuacuccaagcacaccccgaucaaccugguccgggaccugccccagggguucagcgcccucgagccccugguggaccugcccaucggcaucaacaucacccgcuuccagacccuccuggcccugcaccgguccuaccucacgccgggggacagcagcuccggcuggaccgcgggcgccgccgccuacuacgugggguaccugcagccccgcaccuuccugcucaaguacaacgagaacggcaccaucacggacgcggucgacugcgcccuggacccccugagcgagaccaagugcacccucaaguccuucaccguggagaaggggaucuaccagacgagcaacuuccgggugcagcccaccgaguccaucguccgcuucccgaacaucaccaaccugugccccuucggcgagguguucaacgccacccgguucgccagcgucuacgccuggaaccgcaagcggaucuccaacugcguggcggacuacagcgugcuguacaacuccgccagcuucuccacguucaagugcuacggcgucagccccaccaagcucaacgaccugugcuucaccaacguguacgccgacuccuucgugauccgcggggacgagguccggcagaucgcccccggccagaccgggaagaucgccgacuacaacuacaagcugccggacgacuucacgggcugcgugaucgcguggaacagcaacaaccucgacuccaaggucgggggcaacuacaacuaccuguaccgccuguuccgcaagagcaaccucaagcccuucgagcgggacaucuccaccgagaucuaccaggccggcagcacccccugcaacggggugaagggcuucaacugcuacuucccccugcaguccuacggguuccagccgaccaacggcgugggguaccagcccuaccggguggucgugcugagcuucgagcuccugcacgcccccgccacggugugcggccccaagaaguccaccaaccuggucaagaacaagugcgugaacuucaacuucaacggccucaccgggaccggcgugcugaccgagagcaacaagaaguuccugccguuccagcaguucgggcgcgacaucgccgacacgaccgacgcgguccgcgacccccagacccuggagauccucgacaucacccccugcagcuucggcgggguguccgugaucacgccgggcaccaacaccagcaaccaggucgccgugcuguaccagggcgugaacugcaccgagguccccguggccauccacgccgaccagcugacgcccaccuggcggguguacuccaccggcagcaacgucuuccagacccgcgccgggugccucaucggcgcggagcacgugaacaacuccuacgagugcgacauccccaucggggccggcaucugcgccagcuaccagacgcagaccaacuccccgcggcgcgcccggagcguggcgucccagagcaucaucgccuacaccaugucccugggcgccgagaacagcgucgccuacuccaacaacagcaucgccauccccaccaacuucacgaucuccgugaccaccgagauccugcccgugagcaugaccaagacgagcgucgacugcaccauguacaucugcggggacuccaccgagugcagcaaccuccugcugcaguacggcuccuucugcacccagcucaaccgcgcgcugacggggaucgccguggagcaggacaagaacacccaggagguguucgcccaggucaagcagaucuacaagacgcccccgaucaaggacuucggcggguucaacuucagccagauccugcccgaccccuccaagcccagcaagcgguccuucaucgaggaccuccuguucaacaaggugacccuggccgacgccggcuucaucaagcaguacggcgacugccucggggacaucgcggcccgcgaccugaucugcgcccagaaguucaacggccugaccgugcucccgccccugcugaccgacgagaugaucgcccaguacaccagcgcccuccuggcggggaccaucacguccggcuggaccuucggggccggcgccgcccugcagauccccuucgcgaugcagauggccuaccgguucaacggcaucggggucacccagaacgugcucuacgagaaccagaagcugaucgccaaccaguucaacagcgccaucggcaagauccaggacucccugagcuccaccgccagcgcgcucgggaagcugcaggacguggucaaccagaacgcccaggcccugaacacgcucgugaagcagcuguccagcaacuucggcgccaucuccagcgugcugaacgacauccucucccgccuggacaaggucgaggccgaggugcagaucgaccggcugaucaccgggcgccuccagagccugcagaccuacgugacccagcagcugauccgggcggccgagauccgcgccagcgccaaccucgccgcgaccaagauguccgagugcguccugggccagagcaagcggguggacuucugcggcaagggguaccaccugauguccuucccccagagcgccccgcacggcguggucuuccuccacgugacguacguccccgcccaggagaagaacuucaccaccgcccccgcgaucugccacgacgggaaggcccacuucccccgcgagggcguguucguguccaacgggacccacugguucgucacgcagcggaacuucuacgagccgcagaucaucaccaccgacaacaccuucgugagcggcaacugcgacguggucaucggcaucgugaacaacacgguguacgacccccugcagcccgagcuggacuccuucaaggaggagcucgacaaguacuucaagaaccacaccagccccgacgucgaccugggggacaucuccggcaucaacgccagcguggugaacauccagaaggagaucgaccgccugaacgaggucgccaagaaccucaacgagucccugaucgaccugcaggagcucgggaaguacgagcaguacaucaaguggccgugguacaucuggcugggcuucaucgccggccugaucgcgaucgugauggugaccaucaugcucugcugcaugaccagcugcugcuccugccugaaggggugcugcagcugcggcuccugcugcaaguucgacgaggacgacagcgagcccguccugaagggggugaagcuccacuacacgugaggacuagucccuguucccagagcccacuuuuuuuucuuuuuuugaaauaaaauagccugucuuucagaucuaaaaaaaaaaaaaaaaaaaaaaaaaaaaaaaaaaaaaaaaaaaaaaaaaaaaaaaaaaaaaaaaaaaaaaaaaaaaaaaaaaaaaaaaaaaaaaaaaaaa

SEQ ID NO: 24745 - RNA, 4070 nt, Artificial Sequence
  SARS-CoV-2/Wuhan/WIV05/2019__EPI_ISL_402128 spike protein mRNA gc (1-1273)(L18F_T20N_P26S_D138Y_R190S_K417T_E484K_N501Y_D614G_H655Y _T1027I)
aggagagucccgcagucggcguccagcggcucugcuuguucgugugugugucguugcaggccuuauucaagcuuaccauguucguguuccugguccuccugccccuggugagcucccagugcgugaacuucaccaaccgcacgcagcugccgagcgccuacaccaacagcuucacccggggcgucuacuaccccgacaagguguuccgcuccagcgugcugcacuccacccaggaccucuuccugcccuucuucagcaacgucacgugguuccacgccauccacguguccgggaccaacggcaccaagcgguucgacaacccggugcugcccuucaacgacggggucuacuucgcgagcaccgagaaguccaacaucauccgcggcuggaucuucgggacgacccucgacagcaagacccagucccugcugaucgugaacaacgccaccaacguggucaucaaggugugcgaguuccaguucugcaacuaccccuuccucggcguguacuaccacaagaacaacaagagcuggauggaguccgaguuccgggucuacagcuccgccaacaacugcacguucgaguacgugagccagcccuuccugauggaccuggagggcaagcaggggaacuucaagaaccucagcgaguucguguucaagaacaucgacggcuacuucaagaucuacuccaagcacaccccgaucaaccugguccgggaccugccccagggguucagcgcccucgagccccugguggaccugcccaucggcaucaacaucacccgcuuccagacccuccuggcccugcaccgguccuaccucacgccgggggacagcagcuccggcuggaccgcgggcgccgccgccuacuacgugggguaccugcagccccgcaccuuccugcucaaguacaacgagaacggcaccaucacggacgcggucgacugcgcccuggacccccugagcgagaccaagugcacccucaaguccuucaccguggagaaggggaucuaccagacgagcaacuuccgggugcagcccaccgaguccaucguccgcuucccgaacaucaccaaccugugccccuucggcgagguguucaacgccacccgguucgccagcgucuacgccuggaaccgcaagcggaucuccaacugcguggcggacuacagcgugcuguacaacuccgccagcuucuccacguucaagugcuacggcgucagccccaccaagcucaacgaccugugcuucaccaacguguacgccgacuccuucgugauccgcggggacgagguccggcagaucgcccccggccagaccgggaccaucgccgacuacaacuacaagcugccggacgacuucacgggcugcgugaucgcguggaacagcaacaaccucgacuccaaggucgggggcaacuacaacuaccuguaccgccuguuccgcaagagcaaccucaagcccuucgagcgggacaucuccaccgagaucuaccaggccggcagcacccccugcaacggggugaagggcuucaacugcuacuucccccugcaguccuacggguuccagccgaccuacggcgugggguaccagcccuaccggguggucgugcugagcuucgagcuccugcacgcccccgccacggugugcggccccaagaaguccaccaaccuggucaagaacaagugcgugaacuucaacuucaacggccucaccgggaccggcgugcugaccgagagcaacaagaaguuccugccguuccagcaguucgggcgcgacaucgccgacacgaccgacgcgguccgcgacccccagacccuggagauccucgacaucacccccugcagcuucggcgggguguccgugaucacgccgggcaccaacaccagcaaccaggucgccgugcuguaccagggcgugaacugcaccgagguccccguggccauccacgccgaccagcugacgcccaccuggcggguguacuccaccggcagcaacgucuuccagacccgcgccgggugccucaucggcgcggaguacgugaacaacuccuacgagugcgacauccccaucggggccggcaucugcgccagcuaccagacgcagaccaacuccccgcggcgcgcccggagcguggcgucccagagcaucaucgccuacaccaugucccugggcgccgagaacagcgucgccuacuccaacaacagcaucgccauccccaccaacuucacgaucuccgugaccaccgagauccugcccgugagcaugaccaagacgagcgucgacugcaccauguacaucugcggggacuccaccgagugcagcaaccuccugcugcaguacggcuccuucugcacccagcucaaccgcgcgcugacggggaucgccguggagcaggacaagaacacccaggagguguucgcccaggucaagcagaucuacaagacgcccccgaucaaggacuucggcggguucaacuucagccagauccugcccgaccccuccaagcccagcaagcgguccuucaucgaggaccuccuguucaacaaggugacccuggccgacgccggcuucaucaagcaguacggcgacugccucggggacaucgcggcccgcgaccugaucugcgcccagaaguucaacggccugaccgugcucccgccccugcugaccgacgagaugaucgcccaguacaccagcgcccuccuggcggggaccaucacguccggcuggaccuucggggccggcgccgcccugcagauccccuucgcgaugcagauggccuaccgguucaacggcaucggggucacccagaacgugcucuacgagaaccagaagcugaucgccaaccaguucaacagcgccaucggcaagauccaggacucccugagcuccaccgccagcgcgcucgggaagcugcaggacguggucaaccagaacgcccaggcccugaacacgcucgugaagcagcuguccagcaacuucggcgccaucuccagcgugcugaacgacauccucucccgccuggacaaggucgaggccgaggugcagaucgaccggcugaucaccgggcgccuccagagccugcagaccuacgugacccagcagcugauccgggcggccgagauccgcgccagcgccaaccucgccgcgaucaagauguccgagugcguccugggccagagcaagcggguggacuucugcggcaagggguaccaccugauguccuucccccagagcgccccgcacggcguggucuuccuccacgugacguacguccccgcccaggagaagaacuucaccaccgcccccgcgaucugccacgacgggaaggcccacuucccccgcgagggcguguucguguccaacgggacccacugguucgucacgcagcggaacuucuacgagccgcagaucaucaccaccgacaacaccuucgugagcggcaacugcgacguggucaucggcaucgugaacaacacgguguacgacccccugcagcccgagcuggacuccuucaaggaggagcucgacaaguacuucaagaaccacaccagccccgacgucgaccugggggacaucuccggcaucaacgccagcguggugaacauccagaaggagaucgaccgccugaacgaggucgccaagaaccucaacgagucccugaucgaccugcaggagcucgggaaguacgagcaguacaucaaguggccgugguacaucuggcugggcuucaucgccggccugaucgcgaucgugauggugaccaucaugcucugcugcaugaccagcugcugcuccugccugaaggggugcugcagcugcggcuccugcugcaaguucgacgaggacgacagcgagcccguccugaagggggugaagcuccacuacacgugaggacuagucccuguucccagagcccacuuuuuuuucuuuuuuugaaauaaaauagccugucuuucagaucuaaaaaaaaaaaaaaaaaaaaaaaaaaaaaaaaaaaaaaaaaaaaaaaaaaaaaaaaaaaaaaaaaaaaaaaaaaaaaaaaaaaaaaaaaaaaaaaaaaaa

SEQ ID NO: 24746 - RNA, 4070 nt, Artificial Sequence
  SARS-CoV-2/Wuhan/WIV05/2019__EPI_ISL_402128 spike protein mRNA gc (1-1273)(S13I_W152C_L452R_D614G)
aggagagucccgcagucggcguccagcggcucugcuuguucgugugugugucguugcaggccuuauucaagcuuaccauguucguguuccugguccuccugccccuggugagcauccagugcgugaaccucaccacccgcacgcagcugccgcccgccuacaccaacagcuucacccggggcgucuacuaccccgacaagguguuccgcuccagcgugcugcacuccacccaggaccucuuccugcccuucuucagcaacgucacgugguuccacgccauccacguguccgggaccaacggcaccaagcgguucgacaacccggugcugcccuucaacgacggggucuacuucgcgagcaccgagaaguccaacaucauccgcggcuggaucuucgggacgacccucgacagcaagacccagucccugcugaucgugaacaacgccaccaacguggucaucaaggugugcgaguuccaguucugcaacgaccccuuccucggcguguacuaccacaagaacaacaagagcugcauggaguccgaguuccgggucuacagcuccgccaacaacugcacguucgaguacgugagccagcccuuccugauggaccuggagggcaagcaggggaacuucaagaaccuccgcgaguucguguucaagaacaucgacggcuacuucaagaucuacuccaagcacaccccgaucaaccugguccgggaccugccccagggguucagcgcccucgagccccugguggaccugcccaucggcaucaacaucacccgcuuccagacccuccuggcccugcaccgguccuaccucacgccgggggacagcagcuccggcuggaccgcgggcgccgccgccuacuacgugggguaccugcagccccgcaccuuccugcucaaguacaacgagaacggcaccaucacggacgcggucgacugcgcccuggacccccugagcgagaccaagugcacccucaaguccuucaccguggagaaggggaucuaccagacgagcaacuuccgggugcagcccaccgaguccaucguccgcuucccgaacaucaccaaccugugccccuucggcgagguguucaacgccacccgguucgccagcgucuacgccuggaaccgcaagcggaucuccaacugcguggcggacuacagcgugcuguacaacuccgccagcuucuccacguucaagugcuacggcgucagccccaccaagcucaacgaccugugcuucaccaacguguacgccgacuccuucgugauccgcggggacgagguccggcagaucgcccccggccagaccgggaagaucgccgacuacaacuacaagcugccggacgacuucacgggcugcgugaucgcguggaacagcaacaaccucgacuccaaggucgggggcaacuacaacuaccgcuaccgccuguuccgcaagagcaaccucaagcccuucgagcgggacaucuccaccgagaucuaccaggccggcagcacccccugcaacgggguggagggcuucaacugcuacuucccccugcaguccuacggguuccagccgaccaacggcgugggguaccagcccuaccggguggucgugcugagcuucgagcuccugcacgcccccgccacggugugcggccccaagaaguccaccaaccuggucaagaacaagugcgugaacuucaacuucaacggccucaccgggaccggcgugcugaccgagagcaacaagaaguuccugccguuccagcaguucgggcgcgacaucgccgacacgaccgacgcgguccgcgacccccagacccuggagauccucgacaucacccccugcagcuucggcgggguguccgugaucacgccgggcaccaacaccagcaaccaggucgccgugcuguaccagggcgugaacugcaccgagguccccguggccauccacgccgaccagcugacgcccaccuggcggguguacuccaccggcagcaacgucuuccagacccgcgccgggugccucaucggcgcggagcacgugaacaacuccuacgagugcgacauccccaucggggccggcaucugcgccagcuaccagacgcagaccaacuccccgcggcgcgcccggagcguggcgucccagagcaucaucgccuacaccaugucccugggcgccgagaacagcgucgccuacuccaacaacagcaucgccauccccaccaacuucacgaucuccgugaccaccgagauccugcccgugagcaugaccaagacgagcgucgacugcaccauguacaucugcggggacuccaccgagugcagcaaccuccugcugcaguacggcuccuucugcacccagcucaaccgcgcgcugacggggaucgccguggagcaggacaagaacacccaggagguguucgcccaggucaagcagaucuacaagacgcccccgaucaaggacuucggcggguucaacuucagccagauccugcccgaccccuccaagcccagcaagcgguccuucaucgaggaccuccuguucaacaaggugacccuggccgacgccggcuucaucaagcaguacggcgacugccucggggacaucgcggcccgcgaccugaucugcgcccagaaguucaacggccugaccgugcucccgccccugcugaccgacgagaugaucgcccaguacaccagcgcccuccuggcggggaccaucacguccggcuggaccuucggggccggcgccgcccugcagauccccuucgcgaugcagauggccuaccgguucaacggcaucggggucacccagaacgugcucuacgagaaccagaagcugaucgccaaccaguucaacagcgccaucggcaagauccaggacucccugagcuccaccgccagcgcgcucgggaagcugcaggacguggucaaccagaacgcccaggcccugaacacgcucgugaagcagcuguccagcaacuucggcgccaucuccagcgugcugaacgacauccucucccgccuggacaaggucgaggccgaggugcagaucgaccggcugaucaccgggcgccuccagagccugcagaccuacgugacccagcagcugauccgggcggccgagauccgcgccagcgccaaccucgccgcgaccaagauguccgagugcguccugggccagagcaagcggguggacuucugcggcaagggguaccaccugauguccuucccccagagcgccccgcacggcguggucuuccuccacgugacguacguccccgcccaggagaagaacuucaccaccgcccccgcgaucugccacgacgggaaggcccacuucccccgcgagggcguguucguguccaacgggacccacugguucgucacgcagcggaacuucuacgagccgcagaucaucaccaccgacaacaccuucgugagcggcaacugcgacguggucaucggcaucgugaacaacacgguguacgacccccugcagcccgagcuggacuccuucaaggaggagcucgacaaguacuucaagaaccacaccagccccgacgucgaccugggggacaucuccggcaucaacgccagcguggugaacauccagaaggagaucgaccgccugaacgaggucgccaagaaccucaacgagucccugaucgaccugcaggagcucgggaaguacgagcaguacaucaaguggccgugguacaucuggcugggcuucaucgccggccugaucgcgaucgugauggugaccaucaugcucugcugcaugaccagcugcugcuccugccugaaggggugcugcagcugcggcuccugcugcaaguucgacgaggacgacagcgagcccguccugaagggggugaagcuccacuacacgugaggacuagucccuguucccagagcccacuuuuuuuucuuuuuuugaaauaaaauagccugucuuucagaucuaaaaaaaaaaaaaaaaaaaaaaaaaaaaaaaaaaaaaaaaaaaaaaaaaaaaaaaaaaaaaaaaaaaaaaaaaaaaaaaaaaaaaaaaaaaaaaaaaaaa

SEQ ID NO: 24747 - RNA, 4070 nt, Artificial Sequence; identical to SEQ ID NO: 24729
  SARS-CoV-2/Wuhan/WIV05/2019__EPI_ISL_402128 spike protein mRNA gc (1-1273)

SEQ ID NO: 24748 - RNA, 4070 nt, Artificial Sequence
  SARS-CoV-2/Wuhan/WIV05/2019__EPI_ISL_402128 spike protein mRNA gc (1-1273)(D614G)
aggagagucccgcagucggcguccagcggcucugcuuguucgugugugugucguugcaggccuuauucaagcuuaccauguucguguuccugguccuccugccccuggugagcucccagugcgugaaccucaccacccgcacgcagcugccgcccgccuacaccaacagcuucacccggggcgucuacuaccccgacaagguguuccgcuccagcgugcugcacuccacccaggaccucuuccugcccuucuucagcaacgucacgugguuccacgccauccacguguccgggaccaacggcaccaagcgguucgacaacccggugcugcccuucaacgacggggucuacuucgcgagcaccgagaaguccaacaucauccgcggcuggaucuucgggacgacccucgacagcaagacccagucccugcugaucgugaacaacgccaccaacguggucaucaaggugugcgaguuccaguucugcaacgaccccuuccucggcguguacuaccacaagaacaacaagagcuggauggaguccgaguuccgggucuacagcuccgccaacaacugcacguucgaguacgugagccagcccuuccugauggaccuggagggcaagcaggggaacuucaagaaccuccgcgaguucguguucaagaacaucgacggcuacuucaagaucuacuccaagcacaccccgaucaaccugguccgggaccugccccagggguucagcgcccucgagccccugguggaccugcccaucggcaucaacaucacccgcuuccagacccuccuggcccugcaccgguccuaccucacgccgggggacagcagcuccggcuggaccgcgggcgccgccgccuacuacgugggguaccugcagccccgcaccuuccugcucaaguacaacgagaacggcaccaucacggacgcggucgacugcgcccuggacccccugagcgagaccaagugcacccucaaguccuucaccguggagaaggggaucuaccagacgagcaacuuccgggugcagcccaccgaguccaucguccgcuucccgaacaucaccaaccugugccccuucggcgagguguucaacgccacccgguucgccagcgucuacgccuggaaccgcaagcggaucuccaacugcguggcggacuacagcgugcuguacaacuccgccagcuucuccacguucaagugcuacggcgucagccccaccaagcucaacgaccugugcuucaccaacguguacgccgacuccuucgugauccgcggggacgagguccggcagaucgcccccggccagaccgggaagaucgccgacuacaacuacaagcugccggacgacuucacgggcugcgugaucgcguggaacagcaacaaccucgacuccaaggucgggggcaacuacaacuaccuguaccgccuguuccgcaagagcaaccucaagcccuucgagcgggacaucuccaccgagaucuaccaggccggcagcacccccugcaacgggguggagggcuucaacugcuacuucccccugcaguccuacggguuccagccgaccaacggcgugggguaccagcccuaccggguggucgugcugagcuucgagcuccugcacgcccccgccacggugugcggccccaagaaguccaccaaccuggucaagaacaagugcgugaacuucaacuucaacggccucaccgggaccggcgugcugaccgagagcaacaagaaguuccugccguuccagcaguucgggcgcgacaucgccgacacgaccgacgcgguccgcgacccccagacccuggagauccucgacaucacccccugcagcuucggcgggguguccgugaucacgccgggcaccaacaccagcaaccaggucgccgugcuguaccagggcgugaacugcaccgagguccccguggccauccacgccgaccagcugacgcccaccuggcggguguacuccaccgggagcaacgucuuccagacccgcgccggcugccucaucggggcggagcacgugaacaacuccuacgagugcgacauccccaucggcgccggcaucugcgccagcuaccagacgcagaccaacuccccgcggcgcgcccggagcguggcgucccagagcaucaucgccuacaccaugucccugggggccgagaacagcgucgccuacuccaacaacagcaucgccauccccaccaacuucacgaucuccgugaccaccgagauccugcccgugagcaugaccaagacgagcgucgacugcaccauguacaucugcggcgacuccaccgagugcagcaaccuccugcugcaguacggguccuucugcacccagcucaaccgcgcgcugacgggcaucgccguggagcaggacaagaacacccaggagguguucgcccaggucaagcagaucuacaagacgcccccgaucaaggacuucgggggcuucaacuucagccagauccugcccgaccccuccaagcccagcaagcgguccuucaucgaggaccuccuguucaacaaggugacccuggccgacgccggcuucaucaagcaguacggggacugccucggcgacaucgcggcccgcgaccugaucugcgcccagaaguucaacgggcugaccgugcucccgccccugcugaccgacgagaugaucgcccaguacaccagcgcccuccuggcgggcaccaucacguccggguggaccuucggcgccggcgccgcccugcagauccccuucgcgaugcagauggccuaccgguucaacgggaucggcgucacccagaacgugcucuacgagaaccagaagcugaucgccaaccaguucaacagcgccaucgggaagauccaggacucccugagcuccaccgccagcgcgcucggcaagcugcaggacguggucaaccagaacgcccaggcccugaacacgcucgugaagcagcuguccagcaacuucggggccaucuccagcgugcugaacgacauccucucccgccuggacaaggucgaggccgaggugcagaucgaccggcugaucaccggccgccuccagagccugcagaccuacgugacccagcagcugauccgggcggccgagauccgcgccagcgccaaccucgccgcgaccaagauguccgagugcguccugggccagagcaagcggguggacuucugcgggaagggcuaccaccugauguccuucccccagagcgccccgcacgggguggucuuccuccacgugacguacguccccgcccaggagaagaacuucaccaccgcccccgcgaucugccacgacggcaaggcccacuucccccgcgaggggguguucguguccaacggcacccacugguucgucacgcagcggaacuucuacgagccgcagaucaucaccaccgacaacaccuucgugagcggcaacugcgacguggucaucgggaucgugaacaacacgguguacgacccccugcagcccgagcuggacuccuucaaggaggagcucgacaaguacuucaagaaccacaccagccccgacgucgaccugggcgacaucuccgggaucaacgccagcguggugaacauccagaaggagaucgaccgccugaacgaggucgccaagaaccucaacgagucccugaucgaccugcaggagcucggcaaguacgagcaguacaucaaguggccgugguacaucuggcugggcuucaucgccgggcugaucgcgaucgugauggugaccaucaugcucugcugcaugaccagcugcugcuccugccugaagggcugcugcagcugcggguccugcugcaaguucgacgaggacgacagcgagcccguccugaagggcgugaagcuccacuacacgugaggacuagucccuguucccagagcccacuuuuuuuucuuuuuuugaaauaaaauagccugucuuucagaucuaaaaaaaaaaaaaaaaaaaaaaaaaaaaaaaaaaaaaaaaaaaaaaaaaaaaaaaaaaaaaaaaaaaaaaaaaaaaaaaaaaaaaaaaaaaaaaaaaaaa

SEQ ID NO: 24749 - RNA, 4070 nt, Artificial Sequence
  SARS-CoV-2/Wuhan/WIV05/2019__EPI_ISL_402128 spike protein mRNA gc (1-1273)(A222V_D614G)
aggagagucccgcagucggcguccagcggcucugcuuguucgugugugugucguugcaggccuuauucaagcuuaccauguucguguuccugguccuccugccccuggugagcucccagugcgugaaccucaccacccgcacgcagcugccgcccgccuacaccaacagcuucacccggggcgucuacuaccccgacaagguguuccgcuccagcgugcugcacuccacccaggaccucuuccugcccuucuucagcaacgucacgugguuccacgccauccacguguccgggaccaacggcaccaagcgguucgacaacccggugcugcccuucaacgacggggucuacuucgcgagcaccgagaaguccaacaucauccgcggcuggaucuucgggacgacccucgacagcaagacccagucccugcugaucgugaacaacgccaccaacguggucaucaaggugugcgaguuccaguucugcaacgaccccuuccucggcguguacuaccacaagaacaacaagagcuggauggaguccgaguuccgggucuacagcuccgccaacaacugcacguucgaguacgugagccagcccuuccugauggaccuggagggcaagcaggggaacuucaagaaccuccgcgaguucguguucaagaacaucgacggcuacuucaagaucuacuccaagcacaccccgaucaaccugguccgggaccugccccagggguucagcgugcucgagccccugguggaccugcccaucggcaucaacaucacccgcuuccagacccuccuggcccugcaccgguccuaccucacgccgggggacagcagcuccggcuggaccgccggcgcggccgccuacuacgucggguaccugcagccccgcaccuuccugcucaaguacaacgagaacggcaccaucacggacgccguggacugcgcgcuggacccccugagcgagaccaagugcacccucaaguccuucaccguggagaaggggaucuaccagacgagcaacuuccggguccagcccaccgaguccaucgugcgcuucccgaacaucaccaaccugugccccuucggcgaggucuucaacgccacccgguucgccagcguguacgccuggaaccgcaagcggaucuccaacugcguggccgacuacagcguccuguacaacuccgcgagcuucuccacguucaagugcuacggcgugagccccaccaagcucaacgaccugugcuucaccaacguguacgccgacuccuucgucauccgcggggacgaggugcggcagaucgcccccggccagaccgggaagaucgccgacuacaacuacaagcugccggacgacuucacgggcugcgugaucgccuggaacagcaacaaccucgacuccaaggucgggggcaacuacaacuaccuguaccgccuguuccgcaagagcaaccucaagcccuucgagcgggacaucuccaccgagaucuaccaggcgggcagcacccccugcaacgggguggagggcuucaacugcuacuucccccugcaguccuacggguuccagccgaccaacggcgugggguaccagcccuaccgggucguggugcugagcuucgagcuccugcacgcccccgccacggucugcggccccaagaaguccaccaaccuggugaagaacaagugcgugaacuucaacuucaacggccucaccgggaccggcguccugaccgagagcaacaagaaguuccugccguuccagcaguucgggcgcgacaucgccgacacgaccgacgccgugcgcgacccccagacccuggagauccucgacaucacccccugcagcuucggcgggguguccgucaucacgccgggcaccaacaccagcaaccagguggcggugcuguaccagggcgucaacugcaccgaggugcccguggccauccacgccgaccagcugacgcccaccuggcgggucuacuccaccgggagcaacguguuccagacccgcgccggcugccucaucggggccgagcacgugaacaacuccuacgagugcgacauccccaucggcgcgggcaucugcgccagcuaccagacgcagaccaacuccccgcggcgcgcccggagcgucgccucccagagcaucaucgcguacaccaugucccugggggccgagaacagcguggccuacuccaacaacagcaucgccauccccaccaacuucacgaucuccgugaccaccgagauccugcccgucagcaugaccaagacgagcguggacugcaccauguacaucugcggcgacuccaccgagugcagcaaccuccugcugcaguacggguccuucugcacccagcucaaccgcgcccugacgggcaucgcgguggagcaggacaagaacacccaggaggucuucgcccaggugaagcagaucuacaagacgcccccgaucaaggacuucgggggcuucaacuucagccagauccugcccgaccccuccaagcccagcaagcgguccuucaucgaggaccuccuguucaacaaggugacccuggccgacgccggcuucaucaagcaguacggggacugccucggcgacaucgccgcgcgcgaccugaucugcgcccagaaguucaacgggcugaccguccucccgccccugcugaccgacgagaugaucgcccaguacaccagcgcccuccuggccggcaccaucacguccggguggaccuucggcgcgggcgccgcccugcagauccccuucgccaugcagauggcguaccgguucaacgggaucggcgugacccagaacgugcucuacgagaaccagaagcugaucgccaaccaguucaacagcgccaucgggaagauccaggacucccugagcuccaccgccagcgcccucggcaagcugcaggacgucgugaaccagaacgcgcaggcccugaacacgcucgugaagcagcuguccagcaacuucggggccaucuccagcguccugaacgacauccucucccgccuggacaagguggaggccgaggugcagaucgaccggcugaucaccggccgccuccagagccugcagaccuacgucacccagcagcugauccgggccgcggagauccgcgccagcgccaaccucgccgccaccaagauguccgagugcgugcugggccagagcaagcggguggacuucugcgggaagggcuaccaccugauguccuucccccagagcgcgccgcacggggucguguuccuccacgucacguacgugcccgcccaggagaagaacuucaccaccgcccccgccaucugccacgacggcaaggcgcacuucccccgcgaggggguguucgucuccaacggcacccacugguucgugacgcagcggaacuucuacgagccgcagaucaucaccaccgacaacaccuucgugagcggcaacugcgacgucgugaucgggaucgugaacaacacggucuacgacccccugcagcccgagcuggacuccuucaaggaggagcucgacaaguacuucaagaaccacaccagccccgacguggaccugggcgacaucuccgggaucaacgccagcguggucaacauccagaaggagaucgaccgccugaacgagguggccaagaaccucaacgagucccugaucgaccugcaggagcucggcaaguacgagcaguacaucaaguggccgugguacaucuggcugggcuucaucgccgggcugaucgccaucgugauggucaccaucaugcucugcugcaugaccagcugcugcuccugccugaagggcugcugcagcugcggguccugcugcaaguucgacgaggacgacagcgagcccgugcugaagggcgugaagcuccacuacacgugaggacuagucccuguucccagagcccacuuuuuuuucuuuuuuugaaauaaaauagccugucuuucagaucuaaaaaaaaaaaaaaaaaaaaaaaaaaaaaaaaaaaaaaaaaaaaaaaaaaaaaaaaaaaaaaaaaaaaaaaaaaaaaaaaaaaaaaaaaaaaaaaaaaaa

SEQ ID NO: 24750 - RNA, 4070 nt, Artificial Sequence
  SARS-CoV-2/Wuhan/WIV05/2019__EPI_ISL_402128 spike protein mRNA gc (1-1273)(N439K_D614G)
aggagagucccgcagucggcguccagcggcucugcuuguucgugugugugucguugcaggccuuauucaagcuuaccauguucguguuccugguccuccugccccuggugagcucccagugcgugaaccucaccacccgcacgcagcugccgcccgccuacaccaacagcuucacccggggcgucuacuaccccgacaagguguuccgcuccagcgugcugcacuccacccaggaccucuuccugcccuucuucagcaacgucacgugguuccacgccauccacguguccgggaccaacggcaccaagcgguucgacaacccggugcugcccuucaacgacggggucuacuucgcgagcaccgagaaguccaacaucauccgcggcuggaucuucgggacgacccucgacagcaagacccagucccugcugaucgugaacaacgccaccaacguggucaucaaggugugcgaguuccaguucugcaacgaccccuuccucggcguguacuaccacaagaacaacaagagcuggauggaguccgaguuccgggucuacagcuccgccaacaacugcacguucgaguacgugagccagcccuuccugauggaccuggagggcaagcaggggaacuucaagaaccuccgcgaguucguguucaagaacaucgacggcuacuucaagaucuacuccaagcacaccccgaucaaccugguccgggaccugccccagggguucagcgcccucgagccccugguggaccugcccaucggcaucaacaucacccgcuuccagacccuccuggcccugcaccgguccuaccucacgccgggggacagcagcuccggcuggaccgcgggcgccgccgccuacuacgugggguaccugcagccccgcaccuuccugcucaaguacaacgagaacggcaccaucacggacgcggucgacugcgcccuggacccccugagcgagaccaagugcacccucaaguccuucaccguggagaaggggaucuaccagacgagcaacuuccgggugcagcccaccgaguccaucguccgcuucccgaacaucaccaaccugugccccuucggcgagguguucaacgccacccgguucgccagcgucuacgccuggaaccgcaagcggaucuccaacugcguggcggacuacagcgugcuguacaacuccgccagcuucuccacguucaagugcuacggcgucagccccaccaagcucaacgaccugugcuucaccaacguguacgccgacuccuucgugauccgcggggacgagguccggcagaucgcccccggccagaccgggaagaucgccgacuacaacuacaagcugccggacgacuucacgggcugcgugaucgcguggaacagcaagaaccucgacuccaaggucgggggcaacuacaacuaccuguaccgccuguuccgcaagagcaaccucaagcccuucgagcgggacaucuccaccgagaucuaccaggccggcagcacccccugcaacgggguggagggcuucaacugcuacuucccccugcaguccuacggguuccagccgaccaacggcgugggguaccagcccuaccggguggucgugcugagcuucgagcuccugcacgcccccgccacggugugcggccccaagaaguccaccaaccuggucaagaacaagugcgugaacuucaacuucaacggccucaccgggaccggcgugcugaccgagagcaacaagaaguuccugccguuccagcaguucgggcgcgacaucgccgacacgaccgacgcgguccgcgacccccagacccuggagauccucgacaucacccccugcagcuucggcgggguguccgugaucacgccgggcaccaacaccagcaaccaggucgccgugcuguaccagggcgugaacugcaccgagguccccguggccauccacgccgaccagcugacgcccaccuggcggguguacuccaccgggagcaacgucuuccagacccgcgccggcugccucaucggggcggagcacgugaacaacuccuacgagugcgacauccccaucggcgccggcaucugcgccagcuaccagacgcagaccaacuccccgcggcgcgcccggagcguggcgucccagagcaucaucgccuacaccaugucccugggggccgagaacagcgucgccuacuccaacaacagcaucgccauccccaccaacuucacgaucuccgugaccaccgagauccugcccgugagcaugaccaagacgagcgucgacugcaccauguacaucugcggcgacuccaccgagugcagcaaccuccugcugcaguacggguccuucugcacccagcucaaccgcgcgcugacgggcaucgccguggagcaggacaagaacacccaggagguguucgcccaggucaagcagaucuacaagacgcccccgaucaaggacuucgggggcuucaacuucagccagauccugcccgaccccuccaagcccagcaagcgguccuucaucgaggaccuccuguucaacaaggugacccuggccgacgccggcuucaucaagcaguacggggacugccucggcgacaucgcggcccgcgaccugaucugcgcccagaaguucaacgggcugaccgugcucccgccccugcugaccgacgagaugaucgcccaguacaccagcgcccuccuggcgggcaccaucacguccggguggaccuucggcgccggcgccgcccugcagauccccuucgcgaugcagauggccuaccgguucaacgggaucggcgucacccagaacgugcucuacgagaaccagaagcugaucgccaaccaguucaacagcgccaucgggaagauccaggacucccugagcuccaccgccagcgcgcucggcaagcugcaggacguggucaaccagaacgcccaggcccugaacacgcucgugaagcagcuguccagcaacuucggggccaucuccagcgugcugaacgacauccucucccgccuggacaaggucgaggccgaggugcagaucgaccggcugaucaccggccgccuccagagccugcagaccuacgugacccagcagcugauccgggcggccgagauccgcgccagcgccaaccucgccgcgaccaagauguccgagugcguccugggccagagcaagcggguggacuucugcgggaagggcuaccaccugauguccuucccccagagcgccccgcacgggguggucuuccuccacgugacguacguccccgcccaggagaagaacuucaccaccgcccccgcgaucugccacgacggcaaggcccacuucccccgcgaggggguguucguguccaacggcacccacugguucgucacgcagcggaacuucuacgagccgcagaucaucaccaccgacaacaccuucgugagcggcaacugcgacguggucaucgggaucgugaacaacacgguguacgacccccugcagcccgagcuggacuccuucaaggaggagcucgacaaguacuucaagaaccacaccagccccgacgucgaccugggcgacaucuccgggaucaacgccagcguggugaacauccagaaggagaucgaccgccugaacgaggucgccaagaaccucaacgagucccugaucgaccugcaggagcucggcaaguacgagcaguacaucaaguggccgugguacaucuggcugggcuucaucgccgggcugaucgcgaucgugauggugaccaucaugcucugcugcaugaccagcugcugcuccugccugaagggcugcugcagcugcggguccugcugcaaguucgacgaggacgacagcgagcccguccugaagggcgugaagcuccacuacacgugaggacuagucccuguucccagagcccacuuuuuuuucuuuuuuugaaauaaaauagccugucuuucagaucuaaaaaaaaaaaaaaaaaaaaaaaaaaaaaaaaaaaaaaaaaaaaaaaaaaaaaaaaaaaaaaaaaaaaaaaaaaaaaaaaaaaaaaaaaaaaaaaaaaaa

SEQ ID NO: 24751 - RNA, 4070 nt, Artificial Sequence
  SARS-CoV-2/Wuhan/WIV05/2019__EPI_ISL_402128 spike protein mRNA gc (1-1273)(S477N_D614G)
aggagagucccgcagucggcguccagcggcucugcuuguucgugugugugucguugcaggccuuauucaagcuuaccauguucguguuccugguccuccugccccuggugagcucccagugcgugaaccucaccacccgcacgcagcugccgcccgccuacaccaacagcuucacccggggcgucuacuaccccgacaagguguuccgcuccagcgugcugcacuccacccaggaccucuuccugcccuucuucagcaacgucacgugguuccacgccauccacguguccgggaccaacggcaccaagcgguucgacaacccggugcugcccuucaacgacggggucuacuucgcgagcaccgagaaguccaacaucauccgcggcuggaucuucgggacgacccucgacagcaagacccagucccugcugaucgugaacaacgccaccaacguggucaucaaggugugcgaguuccaguucugcaacgaccccuuccucggcguguacuaccacaagaacaacaagagcuggauggaguccgaguuccgggucuacagcuccgccaacaacugcacguucgaguacgugagccagcccuuccugauggaccuggagggcaagcaggggaacuucaagaaccuccgcgaguucguguucaagaacaucgacggcuacuucaagaucuacuccaagcacaccccgaucaaccugguccgggaccugccccagggguucagcgcccucgagccccugguggaccugcccaucggcaucaacaucacccgcuuccagacccuccuggcccugcaccgguccuaccucacgccgggggacagcagcuccggcuggaccgcgggcgccgccgccuacuacgugggguaccugcagccccgcaccuuccugcucaaguacaacgagaacggcaccaucacggacgcggucgacugcgcccuggacccccugagcgagaccaagugcacccucaaguccuucaccguggagaaggggaucuaccagacgagcaacuuccgggugcagcccaccgaguccaucguccgcuucccgaacaucaccaaccugugccccuucggcgagguguucaacgccacccgguucgccagcgucuacgccuggaaccgcaagcggaucuccaacugcguggcggacuacagcgugcuguacaacuccgccagcuucuccacguucaagugcuacggcgucagccccaccaagcucaacgaccugugcuucaccaacguguacgccgacuccuucgugauccgcggggacgagguccggcagaucgcccccggccagaccgggaagaucgccgacuacaacuacaagcugccggacgacuucacgggcugcgugaucgcguggaacagcaacaaccucgacuccaaggucgggggcaacuacaacuaccuguaccgccuguuccgcaagagcaaccucaagcccuucgagcgggacaucuccaccgagaucuaccaggccggcaacacccccugcaacgggguggagggcuucaacugcuacuucccccugcagagcuacggguuccagccgaccaacggcgugggguaccagcccuaccggguggucgugcuguccuucgagcuccugcacgcccccgccacggugugcggccccaagaaguccaccaaccuggucaagaacaagugcgugaacuucaacuucaacggccucaccgggaccggcgugcugaccgagagcaacaagaaguuccugccguuccagcaguucgggcgcgacaucgccgacacgaccgacgcgguccgcgacccccagacccuggagauccucgacaucacccccugcagcuucggcggggugagcgugaucacgccgggcaccaacaccuccaaccaggucgccgugcuguaccagggcgugaacugcaccgagguccccguggccauccacgccgaccagcugacgcccaccuggcggguguacagcaccggguccaacgucuuccagacccgcgccggcugccucaucggggcggagcacgugaacaacagcuacgagugcgacauccccaucggcgccggcaucugcgccuccuaccagacgcagaccaacagcccgcggcgcgcccgguccguggcgagccaguccaucaucgccuacaccaugagccugggggccgagaacuccgucgccuacagcaacaacuccaucgccauccccaccaacuucacgaucagcgugaccaccgagauccugcccguguccaugaccaagacgagcgucgacugcaccauguacaucugcggcgacagcaccgagugcuccaaccuccugcugcaguacgggagcuucugcacccagcucaaccgcgcgcugacgggcaucgccguggagcaggacaagaacacccaggagguguucgcccaggucaagcagaucuacaagacgcccccgaucaaggacuucgggggcuucaacuucucccagauccugcccgaccccagcaagcccuccaagcggagcuucaucgaggaccuccuguucaacaaggugacccuggccgacgccggcuucaucaagcaguacggggacugccucggcgacaucgcggcccgcgaccugaucugcgcccagaaguucaacgggcugaccgugcucccgccccugcugaccgacgagaugaucgcccaguacaccuccgcccuccuggcgggcaccaucacgagcggguggaccuucggcgccggcgccgcccugcagauccccuucgcgaugcagauggccuaccgguucaacgggaucggcgucacccagaacgugcucuacgagaaccagaagcugaucgccaaccaguucaacuccgccaucgggaagauccaggacagccuguccagcaccgccuccgcgcucggcaagcugcaggacguggucaaccagaacgcccaggcccugaacacgcucgugaagcagcugagcuccaacuucggggccaucagcuccgugcugaacgacauccucagccgccuggacaaggucgaggccgaggugcagaucgaccggcugaucaccggccgccuccagucccugcagaccuacgugacccagcagcugauccgggcggccgagauccgcgccagcgccaaccucgccgcgaccaagaugagcgagugcguccugggccaguccaagcggguggacuucugcgggaagggcuaccaccugaugagcuucccccaguccgccccgcacgggguggucuuccuccacgugacguacguccccgcccaggagaagaacuucaccaccgcccccgcgaucugccacgacggcaaggcccacuucccccgcgaggggguguucgugagcaacggcacccacugguucgucacgcagcggaacuucuacgagccgcagaucaucaccaccgacaacaccuucguguccggcaacugcgacguggucaucgggaucgugaacaacacgguguacgacccccugcagcccgagcuggacagcuucaaggaggagcucgacaaguacuucaagaaccacaccucccccgacgucgaccugggcgacaucagcgggaucaacgccuccguggugaacauccagaaggagaucgaccgccugaacgaggucgccaagaaccucaacgagagccugaucgaccugcaggagcucggcaaguacgagcaguacaucaaguggccgugguacaucuggcugggcuucaucgccgggcugaucgcgaucgugauggugaccaucaugcucugcugcaugaccuccugcugcagcugccugaagggcugcugcuccugcgggagcugcugcaaguucgacgaggacgacuccgagcccguccugaagggcgugaagcuccacuacacgugaggacuagucccuguucccagagcccacuuuuuuuucuuuuuuugaaauaaaauagccugucuuucagaucuaaaaaaaaaaaaaaaaaaaaaaaaaaaaaaaaaaaaaaaaaaaaaaaaaaaaaaaaaaaaaaaaaaaaaaaaaaaaaaaaaaaaaaaaaaaaaaaaaaaa

SEQ ID NO: 24752 - RNA, 4070 nt, Artificial Sequence
  SARS-CoV-2/Wuhan/WIV05/2019__EPI_ISL_402128 spike protein mRNA gc (1-1273)(N501Y_D614G)
aggagagucccgcagucggcguccagcggcucugcuuguucgugugugugucguugcaggccuuauucaagcuuaccauguucguguuccugguccuccugccccuggugagcucccagugcgugaaccucaccacccgcacgcagcugccgcccgccuacaccaacagcuucacccggggcgucuacuaccccgacaagguguuccgcuccagcgugcugcacuccacccaggaccucuuccugcccuucuucagcaacgucacgugguuccacgccauccacguguccgggaccaacggcaccaagcgguucgacaacccggugcugcccuucaacgacggggucuacuucgcgagcaccgagaaguccaacaucauccgcggcuggaucuucgggacgacccucgacagcaagacccagucccugcugaucgugaacaacgccaccaacguggucaucaaggugugcgaguuccaguucugcaacgaccccuuccucggcguguacuaccacaagaacaacaagagcuggauggaguccgaguuccgggucuacagcuccgccaacaacugcacguucgaguacgugagccagcccuuccugauggaccuggagggcaagcaggggaacuucaagaaccuccgcgaguucguguucaagaacaucgacggcuacuucaagaucuacuccaagcacaccccgaucaaccugguccgggaccugccccagggguucagcgcccucgagccccugguggaccugcccaucggcaucaacaucacccgcuuccagacccuccuggcccugcaccgguccuaccucacgccgggggacagcagcuccggcuggaccgcgggcgccgccgccuacuacgugggguaccugcagccccgcaccuuccugcucaaguacaacgagaacggcaccaucacggacgcggucgacugcgcccuggacccccugagcgagaccaagugcacccucaaguccuucaccguggagaaggggaucuaccagacgagcaacuuccgggugcagcccaccgaguccaucguccgcuucccgaacaucaccaaccugugccccuucggcgagguguucaacgccacccgguucgccagcgucuacgccuggaaccgcaagcggaucuccaacugcguggcggacuacagcgugcuguacaacuccgccagcuucuccacguucaagugcuacggcgucagccccaccaagcucaacgaccugugcuucaccaacguguacgccgacuccuucgugauccgcggggacgagguccggcagaucgcccccggccagaccgggaagaucgccgacuacaacuacaagcugccggacgacuucacgggcugcgugaucgcguggaacagcaacaaccucgacuccaaggucgggggcaacuacaacuaccuguaccgccuguuccgcaagagcaaccucaagcccuucgagcgggacaucuccaccgagaucuaccaggccggcagcacccccugcaacgggguggagggcuucaacugcuacuucccccugcaguccuacggguuccagccgaccuacggcgugggguaccagcccuaccggguggucgugcugagcuucgagcuccugcacgcccccgccacggugugcggccccaagaaguccaccaaccuggucaagaacaagugcgugaacuucaacuucaacggccucaccgggaccggcgugcugaccgagagcaacaagaaguuccugccguuccagcaguucgggcgcgacaucgccgacacgaccgacgcgguccgcgacccccagacccuggagauccucgacaucacccccugcagcuucggcgggguguccgugaucacgccgggcaccaacaccagcaaccaggucgccgugcuguaccagggcgugaacugcaccgagguccccguggccauccacgccgaccagcugacgcccaccuggcggguguacuccaccgggagcaacgucuuccagacccgcgccggcugccucaucggggcggagcacgugaacaacuccuacgagugcgacauccccaucggcgccggcaucugcgccagcuaccagacgcagaccaacuccccgcggcgcgcccggagcguggcgucccagagcaucaucgccuacaccaugucccugggggccgagaacagcgucgccuacuccaacaacagcaucgccauccccaccaacuucacgaucuccgugaccaccgagauccugcccgugagcaugaccaagacgagcgucgacugcaccauguacaucugcggcgacuccaccgagugcagcaaccuccugcugcaguacggguccuucugcacccagcucaaccgcgcgcugacgggcaucgccguggagcaggacaagaacacccaggagguguucgcccaggucaagcagaucuacaagacgcccccgaucaaggacuucgggggcuucaacuucagccagauccugcccgaccccuccaagcccagcaagcgguccuucaucgaggaccuccuguucaacaaggugacccuggccgacgccggcuucaucaagcaguacggggacugccucggcgacaucgcggcccgcgaccugaucugcgcccagaaguucaacgggcugaccgugcucccgccccugcugaccgacgagaugaucgcccaguacaccagcgcccuccuggcgggcaccaucacguccggguggaccuucggcgccggcgccgcccugcagauccccuucgcgaugcagauggccuaccgguucaacgggaucggcgucacccagaacgugcucuacgagaaccagaagcugaucgccaaccaguucaacagcgccaucgggaagauccaggacucccugagcuccaccgccagcgcgcucggcaagcugcaggacguggucaaccagaacgcccaggcccugaacacgcucgugaagcagcuguccagcaacuucggggccaucuccagcgugcugaacgacauccucucccgccuggacaaggucgaggccgaggugcagaucgaccggcugaucaccggccgccuccagagccugcagaccuacgugacccagcagcugauccgggcggccgagauccgcgccagcgccaaccucgccgcgaccaagauguccgagugcguccugggccagagcaagcggguggacuucugcgggaagggcuaccaccugauguccuucccccagagcgccccgcacgggguggucuuccuccacgugacguacguccccgcccaggagaagaacuucaccaccgcccccgcgaucugccacgacggcaaggcccacuucccccgcgaggggguguucguguccaacggcacccacugguucgucacgcagcggaacuucuacgagccgcagaucaucaccaccgacaacaccuucgugagcggcaacugcgacguggucaucgggaucgugaacaacacgguguacgacccccugcagcccgagcuggacuccuucaaggaggagcucgacaaguacuucaagaaccacaccagccccgacgucgaccugggcgacaucuccgggaucaacgccagcguggugaacauccagaaggagaucgaccgccugaacgaggucgccaagaaccucaacgagucccugaucgaccugcaggagcucggcaaguacgagcaguacaucaaguggccgugguacaucuggcugggcuucaucgccgggcugaucgcgaucgugauggugaccaucaugcucugcugcaugaccagcugcugcuccugccugaagggcugcugcagcugcggguccugcugcaaguucgacgaggacgacagcgagcccguccugaagggcgugaagcuccacuacacgugaggacuagucccuguucccagagcccacuuuuuuuucuuuuuuugaaauaaaauagccugucuuucagaucuaaaaaaaaaaaaaaaaaaaaaaaaaaaaaaaaaaaaaaaaaaaaaaaaaaaaaaaaaaaaaaaaaaaaaaaaaaaaaaaaaaaaaaaaaaaaaaaaaaaa

SEQ ID NO: 24753 - RNA, 4064 nt, Artificial Sequence
  SARS-CoV-2/Wuhan/WIV05/2019__EPI_ISL_402128 spike protein mRNA gc (1-1273)(H69del_V70del_D614G)
aggagagucccgcagucggcguccagcggcucugcuuguucgugugugugucguugcaggccuuauucaagcuuaccauguucguguuccugguccuccugccccuggugagcucccagugcgugaaccucaccacccgcacgcagcugccgcccgccuacaccaacagcuucacccggggcgucuacuaccccgacaagguguuccgcuccagcgugcugcacuccacccaggaccucuuccugcccuucuucagcaacgucacgugguuccacgccaucuccgggaccaacggcaccaagcgguucgacaacccggugcugcccuucaacgacgggguguacuucgcgagcaccgagaaguccaacaucauccgcggcuggaucuucgggacgacccucgacagcaagacccagucccugcugaucgucaacaacgccaccaacguggugaucaaggucugcgaguuccaguucugcaacgaccccuuccucggcguguacuaccacaagaacaacaagagcuggauggaguccgaguuccggguguacagcuccgccaacaacugcacguucgaguacgucagccagcccuuccugauggaccuggagggcaagcaggggaacuucaagaaccuccgcgaguucguguucaagaacaucgacggcuacuucaagaucuacuccaagcacaccccgaucaaccuggugcgggaccugccccagggguucagcgcccucgagccccuggucgaccugcccaucggcaucaacaucacccgcuuccagacccuccuggcccugcaccgguccuaccucacgccgggggacagcagcuccggcuggaccgcgggcgccgccgccuacuacgugggguaccugcagccccgcaccuuccugcucaaguacaacgagaacggcaccaucacggacgcgguggacugcgcccuggacccccugagcgagaccaagugcacccucaaguccuucaccgucgagaaggggaucuaccagacgagcaacuuccgggugcagcccaccgaguccaucgugcgcuucccgaacaucaccaaccugugccccuucggcgaggucuucaacgccacccgguucgccagcguguacgccuggaaccgcaagcggaucuccaacugcgucgcggacuacagcgugcuguacaacuccgccagcuucuccacguucaagugcuacggcgugagccccaccaagcucaacgaccugugcuucaccaacgucuacgccgacuccuucgugauccgcggggacgaggugcggcagaucgcccccggccagaccgggaagaucgccgacuacaacuacaagcugccggacgacuucacgggcugcgucaucgcguggaacagcaacaaccucgacuccaaggucgggggcaacuacaacuaccuguaccgccuguuccgcaagagcaaccucaagcccuucgagcgggacaucuccaccgagaucuaccaggccggcagcacccccugcaacgggguggagggcuucaacugcuacuucccccugcaguccuacggguuccagccgaccaacggcgugggguaccagcccuaccggguggugguccugagcuucgagcuccugcacgcccccgccacggugugcggccccaagaaguccaccaaccuggugaagaacaagugcgucaacuucaacuucaacggccucaccgggaccggcgugcugaccgagagcaacaagaaguuccugccguuccagcaguucgggcgcgacaucgccgacacgaccgacgcggugcgcgacccccagacccuggagauccucgacaucacccccugcagcuucggcggggucuccgugaucacgccgggcaccaacaccagcaaccagguggccguccuguaccagggcgugaacugcaccgaggugcccgucgccauccacgccgaccagcugacgcccaccuggcggguguacuccaccgggagcaacguguuccagacccgcgccggcugccucaucggggcggagcacgucaacaacuccuacgagugcgacauccccaucggcgccggcaucugcgccagcuaccagacgcagaccaacuccccgcggcgcgcccggagcguggcgucccagagcaucaucgccuacaccaugucccugggggccgagaacagcguggccuacuccaacaacagcaucgccauccccaccaacuucacgaucuccgucaccaccgagauccugcccgugagcaugaccaagacgagcguggacugcaccauguacaucugcggcgacuccaccgagugcagcaaccuccugcugcaguacggguccuucugcacccagcucaaccgcgcgcugacgggcaucgccgucgagcaggacaagaacacccaggagguguucgcccaggugaagcagaucuacaagacgcccccgaucaaggacuucgggggcuucaacuucagccagauccugcccgaccccuccaagcccagcaagcgguccuucaucgaggaccuccuguucaacaaggucacccuggccgacgccggcuucaucaagcaguacggggacugccucggcgacaucgcggcccgcgaccugaucugcgcccagaaguucaacgggcugaccgugcucccgccccugcugaccgacgagaugaucgcccaguacaccagcgcccuccuggcgggcaccaucacguccggguggaccuucggcgccggcgccgcccugcagauccccuucgcgaugcagauggccuaccgguucaacgggaucggcgugacccagaacguccucuacgagaaccagaagcugaucgccaaccaguucaacagcgccaucgggaagauccaggacucccugagcuccaccgccagcgcgcucggcaagcugcaggacguggugaaccagaacgcccaggcccugaacacgcucgucaagcagcuguccagcaacuucggggccaucuccagcgugcugaacgacauccucucccgccuggacaagguggaggccgagguccagaucgaccggcugaucaccggccgccuccagagccugcagaccuacgugacccagcagcugauccgggcggccgagauccgcgccagcgccaaccucgccgcgaccaagauguccgagugcgugcugggccagagcaagcgggucgacuucugcgggaagggcuaccaccugauguccuucccccagagcgccccgcacggggugguguuccuccacgucacguacgugcccgcccaggagaagaacuucaccaccgcccccgcgaucugccacgacggcaaggcccacuucccccgcgagggggucuucguguccaacggcacccacugguucgugacgcagcggaacuucuacgagccgcagaucaucaccaccgacaacaccuucgucagcggcaacugcgacguggugaucgggaucgucaacaacacgguguacgacccccugcagcccgagcuggacuccuucaaggaggagcucgacaaguacuucaagaaccacaccagccccgacguggaccugggcgacaucuccgggaucaacgccagcgucgugaacauccagaaggagaucgaccgccugaacgagguggccaagaaccucaacgagucccugaucgaccugcaggagcucggcaaguacgagcaguacaucaaguggccgugguacaucuggcugggcuucaucgccgggcugaucgcgaucgucauggugaccaucaugcucugcugcaugaccagcugcugcuccugccugaagggcugcugcagcugcggguccugcugcaaguucgacgaggacgacagcgagcccgugcugaagggcgucaagcuccacuacacgugaggacuagucccuguucccagagcccacuuuuuuuucuuuuuuugaaauaaaauagccugucuuucagaucuaaaaaaaaaaaaaaaaaaaaaaaaaaaaaaaaaaaaaaaaaaaaaaaaaaaaaaaaaaaaaaaaaaaaaaaaaaaaaaaaaaaaaaaaaaaaaaaaaaaa

SEQ ID NO: 24754 - RNA, 4070 nt, Artificial Sequence
  SARS-CoV-2/Wuhan/WIV05/2019__EPI_ISL_402128 spike protein mRNA gc (1-1273)(Y453F_D614G)
aggagagucccgcagucggcguccagcggcucugcuuguucgugugugugucguugcaggccuuauucaagcuuaccauguucguguuccugguccuccugccccuggugagcucccagugcgugaaccucaccacccgcacgcagcugccgcccgccuacaccaacagcuucacccggggcgucuacuaccccgacaagguguuccgcuccagcgugcugcacuccacccaggaccucuuccugcccuucuucagcaacgucacgugguuccacgccauccacguguccgggaccaacggcaccaagcgguucgacaacccggugcugcccuucaacgacggggucuacuucgcgagcaccgagaaguccaacaucauccgcggcuggaucuucgggacgacccucgacagcaagacccagucccugcugaucgugaacaacgccaccaacguggucaucaaggugugcgaguuccaguucugcaacgaccccuuccucggcguguacuaccacaagaacaacaagagcuggauggaguccgaguuccgggucuacagcuccgccaacaacugcacguucgaguacgugagccagcccuuccugauggaccuggagggcaagcaggggaacuucaagaaccuccgcgaguucguguucaagaacaucgacggcuacuucaagaucuacuccaagcacaccccgaucaaccugguccgggaccugccccagggguucagcgcccucgagccccugguggaccugcccaucggcaucaacaucacccgcuuccagacccuccuggcccugcaccgguccuaccucacgccgggggacagcagcuccggcuggaccgcgggcgccgccgccuacuacgugggguaccugcagccccgcaccuuccugcucaaguacaacgagaacggcaccaucacggacgcggucgacugcgcccuggacccccugagcgagaccaagugcacccucaaguccuucaccguggagaaggggaucuaccagacgagcaacuuccgggugcagcccaccgaguccaucguccgcuucccgaacaucaccaaccugugccccuucggcgagguguucaacgccacccgguucgccagcgucuacgccuggaaccgcaagcggaucuccaacugcguggcggacuacagcgugcuguacaacuccgccagcuucuccacguucaagugcuacggcgucagccccaccaagcucaacgaccugugcuucaccaacguguacgccgacuccuucgugauccgcggggacgagguccggcagaucgcccccggccagaccgggaagaucgccgacuacaacuacaagcugccggacgacuucacgggcugcgugaucgcguggaacagcaacaaccucgacuccaaggucgggggcaacuacaacuaccuguuccgccuguuccgcaagagcaaccucaagcccuucgagcgggacaucuccaccgagaucuaccaggccggcagcacccccugcaacgggguggagggcuucaacugcuacuucccccugcaguccuacggguuccagccgaccaacggcgugggguaccagcccuaccggguggucgugcugagcuucgagcuccugcacgcccccgccacggugugcggccccaagaaguccaccaaccuggucaagaacaagugcgugaacuucaacuucaacggccucaccgggaccggcgugcugaccgagagcaacaagaaguuccugccguuccagcaguucgggcgcgacaucgccgacacgaccgacgcgguccgcgacccccagacccuggagauccucgacaucacccccugcagcuucggcgggguguccgugaucacgccgggcaccaacaccagcaaccaggucgccgugcuguaccagggcgugaacugcaccgagguccccguggccauccacgccgaccagcugacgcccaccuggcggguguacuccaccgggagcaacgucuuccagacccgcgccggcugccucaucggggcggagcacgugaacaacuccuacgagugcgacauccccaucggcgccggcaucugcgccagcuaccagacgcagaccaacuccccgcggcgcgcccggagcguggcgucccagagcaucaucgccuacaccaugucccugggggccgagaacagcgucgccuacuccaacaacagcaucgccauccccaccaacuucacgaucuccgugaccaccgagauccugcccgugagcaugaccaagacgagcgucgacugcaccauguacaucugcggcgacuccaccgagugcagcaaccuccugcugcaguacggguccuucugcacccagcucaaccgcgcgcugacgggcaucgccguggagcaggacaagaacacccaggagguguucgcccaggucaagcagaucuacaagacgcccccgaucaaggacuucgggggcuucaacuucagccagauccugcccgaccccuccaagcccagcaagcgguccuucaucgaggaccuccuguucaacaaggugacccuggccgacgccggcuucaucaagcaguacggggacugccucggcgacaucgcggcccgcgaccugaucugcgcccagaaguucaacgggcugaccgugcucccgccccugcugaccgacgagaugaucgcccaguacaccagcgcccuccuggcgggcaccaucacguccggguggaccuucggcgccggcgccgcccugcagauccccuucgcgaugcagauggccuaccgguucaacgggaucggcgucacccagaacgugcucuacgagaaccagaagcugaucgccaaccaguucaacagcgccaucgggaagauccaggacucccugagcuccaccgccagcgcgcucggcaagcugcaggacguggucaaccagaacgcccaggcccugaacacgcucgugaagcagcuguccagcaacuucggggccaucuccagcgugcugaacgacauccucucccgccuggacaaggucgaggccgaggugcagaucgaccggcugaucaccggccgccuccagagccugcagaccuacgugacccagcagcugauccgggcggccgagauccgcgccagcgccaaccucgccgcgaccaagauguccgagugcguccugggccagagcaagcggguggacuucugcgggaagggcuaccaccugauguccuucccccagagcgccccgcacgggguggucuuccuccacgugacguacguccccgcccaggagaagaacuucaccaccgcccccgcgaucugccacgacggcaaggcccacuucccccgcgaggggguguucguguccaacggcacccacugguucgucacgcagcggaacuucuacgagccgcagaucaucaccaccgacaacaccuucgugagcggcaacugcgacguggucaucgggaucgugaacaacacgguguacgacccccugcagcccgagcuggacuccuucaaggaggagcucgacaaguacuucaagaaccacaccagccccgacgucgaccugggcgacaucuccgggaucaacgccagcguggugaacauccagaaggagaucgaccgccugaacgaggucgccaagaaccucaacgagucccugaucgaccugcaggagcucggcaaguacgagcaguacaucaaguggccgugguacaucuggcugggcuucaucgccgggcugaucgcgaucgugauggugaccaucaugcucugcugcaugaccagcugcugcuccugccugaagggcugcugcagcugcggguccugcugcaaguucgacgaggacgacagcgagcccguccugaagggcgugaagcuccacuacacgugaggacuagucccuguucccagagcccacuuuuuuuucuuuuuuugaaauaaaauagccugucuuucagaucuaaaaaaaaaaaaaaaaaaaaaaaaaaaaaaaaaaaaaaaaaaaaaaaaaaaaaaaaaaaaaaaaaaaaaaaaaaaaaaaaaaaaaaaaaaaaaaaaaaaa

SEQ ID NO: 24755 - RNA, 4070 nt, Artificial Sequence
  SARS-CoV-2/Wuhan/WIV05/2019__EPI_ISL_402128 spike protein mRNA gc (1-1273)(D614G_I692V)
aggagagucccgcagucggcguccagcggcucugcuuguucgugugugugucguugcaggccuuauucaagcuuaccauguucguguuccugguccuccugccccuggugagcucccagugcgugaaccucaccacccgcacgcagcugccgcccgccuacaccaacagcuucacccggggcgucuacuaccccgacaagguguuccgcuccagcgugcugcacuccacccaggaccucuuccugcccuucuucagcaacgucacgugguuccacgccauccacguguccgggaccaacggcaccaagcgguucgacaacccggugcugcccuucaacgacggggucuacuucgcgagcaccgagaaguccaacaucauccgcggcuggaucuucgggacgacccucgacagcaagacccagucccugcugaucgugaacaacgccaccaacguggucaucaaggugugcgaguuccaguucugcaacgaccccuuccucggcguguacuaccacaagaacaacaagagcuggauggaguccgaguuccgggucuacagcuccgccaacaacugcacguucgaguacgugagccagcccuuccugauggaccuggagggcaagcaggggaacuucaagaaccuccgcgaguucguguucaagaacaucgacggcuacuucaagaucuacuccaagcacaccccgaucaaccugguccgggaccugccccagggguucagcgcccucgagccccugguggaccugcccaucggcaucaacaucacccgcuuccagacccuccuggcccugcaccgguccuaccucacgccgggggacagcagcuccggcuggaccgcgggcgccgccgccuacuacgugggguaccugcagccccgcaccuuccugcucaaguacaacgagaacggcaccaucacggacgcggucgacugcgcccuggacccccugagcgagaccaagugcacccucaaguccuucaccguggagaaggggaucuaccagacgagcaacuuccgggugcagcccaccgaguccaucguccgcuucccgaacaucaccaaccugugccccuucggcgagguguucaacgccacccgguucgccagcgucuacgccuggaaccgcaagcggaucuccaacugcguggcggacuacagcgugcuguacaacuccgccagcuucuccacguucaagugcuacggcgucagccccaccaagcucaacgaccugugcuucaccaacguguacgccgacuccuucgugauccgcggggacgagguccggcagaucgcccccggccagaccgggaagaucgccgacuacaacuacaagcugccggacgacuucacgggcugcgugaucgcguggaacagcaacaaccucgacuccaaggucgggggcaacuacaacuaccuguaccgccuguuccgcaagagcaaccucaagcccuucgagcgggacaucuccaccgagaucuaccaggccggcagcacccccugcaacgggguggagggcuucaacugcuacuucccccugcaguccuacggguuccagccgaccaacggcgugggguaccagcccuaccggguggucgugcugagcuucgagcuccugcacgcccccgccacggugugcggccccaagaaguccaccaaccuggucaagaacaagugcgugaacuucaacuucaacggccucaccgggaccggcgugcugaccgagagcaacaagaaguuccugccguuccagcaguucgggcgcgacaucgccgacacgaccgacgcgguccgcgacccccagacccuggagauccucgacaucacccccugcagcuucggcgggguguccgugaucacgccgggcaccaacaccagcaaccaggucgccgugcuguaccagggcgugaacugcaccgagguccccguggccauccacgccgaccagcugacgcccaccuggcggguguacuccaccgggagcaacgucuuccagacccgcgccggcugccucaucggggcggagcacgugaacaacuccuacgagugcgacauccccaucggcgccggcaucugcgccagcuaccagacgcagaccaacuccccgcggcgcgcccggagcguggcgucccagagcgucaucgccuacaccaugucccugggggccgagaacagcguggccuacuccaacaacagcaucgccauccccaccaacuucacgaucuccgugaccaccgagauccugcccgucagcaugaccaagacgagcguggacugcaccauguacaucugcggcgacuccaccgagugcagcaaccuccugcugcaguacggguccuucugcacccagcucaaccgcgcgcugacgggcaucgccguggagcaggacaagaacacccaggaggucuucgcccaggugaagcagaucuacaagacgcccccgaucaaggacuucgggggcuucaacuucagccagauccugcccgaccccuccaagcccagcaagcgguccuucaucgaggaccuccuguucaacaaggugacccuggccgacgccggcuucaucaagcaguacggggacugccucggcgacaucgcggcccgcgaccugaucugcgcccagaaguucaacgggcugaccguccucccgccccugcugaccgacgagaugaucgcccaguacaccagcgcccuccuggcgggcaccaucacguccggguggaccuucggcgccggcgccgcccugcagauccccuucgcgaugcagauggccuaccgguucaacgggaucggcgugacccagaacgugcucuacgagaaccagaagcugaucgccaaccaguucaacagcgccaucgggaagauccaggacucccugagcuccaccgccagcgcgcucggcaagcugcaggacgucgugaaccagaacgcccaggcccugaacacgcucgugaagcagcuguccagcaacuucggggccaucuccagcguccugaacgacauccucucccgccuggacaagguggaggccgaggugcagaucgaccggcugaucaccggccgccuccagagccugcagaccuacgucacccagcagcugauccgggcggccgagauccgcgccagcgccaaccucgccgcgaccaagauguccgagugcgugcugggccagagcaagcggguggacuucugcgggaagggcuaccaccugauguccuucccccagagcgccccgcacggggucguguuccuccacgucacguacgugcccgcccaggagaagaacuucaccaccgcccccgcgaucugccacgacggcaaggcccacuucccccgcgaggggguguucgucuccaacggcacccacugguucgugacgcagcggaacuucuacgagccgcagaucaucaccaccgacaacaccuucgugagcggcaacugcgacgucgugaucgggaucgugaacaacacggucuacgacccccugcagcccgagcuggacuccuucaaggaggagcucgacaaguacuucaagaaccacaccagccccgacguggaccugggcgacaucuccgggaucaacgccagcguggucaacauccagaaggagaucgaccgccugaacgagguggccaagaaccucaacgagucccugaucgaccugcaggagcucggcaaguacgagcaguacaucaaguggccgugguacaucuggcugggcuucaucgccgggcugaucgcgaucgugauggucaccaucaugcucugcugcaugaccagcugcugcuccugccugaagggcugcugcagcugcggguccugcugcaaguucgacgaggacgacagcgagcccgugcugaagggcgugaagcuccacuacacgugaggacuagucccuguucccagagcccacuuuuuuuucuuuuuuugaaauaaaauagccugucuuucagaucuaaaaaaaaaaaaaaaaaaaaaaaaaaaaaaaaaaaaaaaaaaaaaaaaaaaaaaaaaaaaaaaaaaaaaaaaaaaaaaaaaaaaaaaaaaaaaaaaaaaa

SEQ ID NO: 24756 - RNA, 4070 nt, Artificial Sequence
  SARS-CoV-2/Wuhan/WIV05/2019__EPI_ISL_402128 spike protein mRNA gc (1-1273)(D614G_M1229I)
aggagagucccgcagucggcguccagcggcucugcuuguucgugugugugucguugcaggccuuauucaagcuuaccauguucguguuccugguccuccugccccuggugagcucccagugcgugaaccucaccacccgcacgcagcugccgcccgccuacaccaacagcuucacccggggcgucuacuaccccgacaagguguuccgcuccagcgugcugcacuccacccaggaccucuuccugcccuucuucagcaacgucacgugguuccacgccauccacguguccgggaccaacggcaccaagcgguucgacaacccggugcugcccuucaacgacggggucuacuucgcgagcaccgagaaguccaacaucauccgcggcuggaucuucgggacgacccucgacagcaagacccagucccugcugaucgugaacaacgccaccaacguggucaucaaggugugcgaguuccaguucugcaacgaccccuuccucggcguguacuaccacaagaacaacaagagcuggauggaguccgaguuccgggucuacagcuccgccaacaacugcacguucgaguacgugagccagcccuuccugauggaccuggagggcaagcaggggaacuucaagaaccuccgcgaguucguguucaagaacaucgacggcuacuucaagaucuacuccaagcacaccccgaucaaccugguccgggaccugccccagggguucagcgcccucgagccccugguggaccugcccaucggcaucaacaucacccgcuuccagacccuccuggcccugcaccgguccuaccucacgccgggggacagcagcuccggcuggaccgcgggcgccgccgccuacuacgugggguaccugcagccccgcaccuuccugcucaaguacaacgagaacggcaccaucacggacgcggucgacugcgcccuggacccccugagcgagaccaagugcacccucaaguccuucaccguggagaaggggaucuaccagacgagcaacuuccgggugcagcccaccgaguccaucguccgcuucccgaacaucaccaaccugugccccuucggcgagguguucaacgccacccgguucgccagcgucuacgccuggaaccgcaagcggaucuccaacugcguggcggacuacagcgugcuguacaacuccgccagcuucuccacguucaagugcuacggcgucagccccaccaagcucaacgaccugugcuucaccaacguguacgccgacuccuucgugauccgcggggacgagguccggcagaucgcccccggccagaccgggaagaucgccgacuacaacuacaagcugccggacgacuucacgggcugcgugaucgcguggaacagcaacaaccucgacuccaaggucgggggcaacuacaacuaccuguaccgccuguuccgcaagagcaaccucaagcccuucgagcgggacaucuccaccgagaucuaccaggccggcagcacccccugcaacgggguggagggcuucaacugcuacuucccccugcaguccuacggguuccagccgaccaacggcgugggguaccagcccuaccggguggucgugcugagcuucgagcuccugcacgcccccgccacggugugcggccccaagaaguccaccaaccuggucaagaacaagugcgugaacuucaacuucaacggccucaccgggaccggcgugcugaccgagagcaacaagaaguuccugccguuccagcaguucgggcgcgacaucgccgacacgaccgacgcgguccgcgacccccagacccuggagauccucgacaucacccccugcagcuucggcgggguguccgugaucacgccgggcaccaacaccagcaaccaggucgccgugcuguaccagggcgugaacugcaccgagguccccguggccauccacgccgaccagcugacgcccaccuggcggguguacuccaccgggagcaacgucuuccagacccgcgccggcugccucaucggggcggagcacgugaacaacuccuacgagugcgacauccccaucggcgccggcaucugcgccagcuaccagacgcagaccaacuccccgcggcgcgcccggagcguggcgucccagagcaucaucgccuacaccaugucccugggggccgagaacagcgucgccuacuccaacaacagcaucgccauccccaccaacuucacgaucuccgugaccaccgagauccugcccgugagcaugaccaagacgagcgucgacugcaccauguacaucugcggcgacuccaccgagugcagcaaccuccugcugcaguacggguccuucugcacccagcucaaccgcgcgcugacgggcaucgccguggagcaggacaagaacacccaggagguguucgcccaggucaagcagaucuacaagacgcccccgaucaaggacuucgggggcuucaacuucagccagauccugcccgaccccuccaagcccagcaagcgguccuucaucgaggaccuccuguucaacaaggugacccuggccgacgccggcuucaucaagcaguacggggacugccucggcgacaucgcggcccgcgaccugaucugcgcccagaaguucaacgggcugaccgugcucccgccccugcugaccgacgagaugaucgcccaguacaccagcgcccuccuggcgggcaccaucacguccggguggaccuucggcgccggcgccgcccugcagauccccuucgcgaugcagauggccuaccgguucaacgggaucggcgucacccagaacgugcucuacgagaaccagaagcugaucgccaaccaguucaacagcgccaucgggaagauccaggacucccugagcuccaccgccagcgcgcucggcaagcugcaggacguggucaaccagaacgcccaggcccugaacacgcucgugaagcagcuguccagcaacuucggggccaucuccagcgugcugaacgacauccucucccgccuggacaaggucgaggccgaggugcagaucgaccggcugaucaccggccgccuccagagccugcagaccuacgugacccagcagcugauccgggcggccgagauccgcgccagcgccaaccucgccgcgaccaagauguccgagugcguccugggccagagcaagcggguggacuucugcgggaagggcuaccaccugauguccuucccccagagcgccccgcacgggguggucuuccuccacgugacguacguccccgcccaggagaagaacuucaccaccgcccccgcgaucugccacgacggcaaggcccacuucccccgcgaggggguguucguguccaacggcacccacugguucgucacgcagcggaacuucuacgagccgcagaucaucaccaccgacaacaccuucgugagcggcaacugcgacguggucaucgggaucgugaacaacacgguguacgacccccugcagcccgagcuggacuccuucaaggaggagcucgacaaguacuucaagaaccacaccagccccgacgucgaccugggcgacaucuccgggaucaacgccagcguggugaacauccagaaggagaucgaccgccugaacgaggucgccaagaaccucaacgagucccugaucgaccugcaggagcucggcaaguacgagcaguacaucaaguggccgugguacaucuggcugggcuucaucgccgggcugaucgcgaucgugaucgugaccaucaugcucugcugcaugaccagcugcugcuccugccugaagggcugcugcagcugcggguccugcugcaaguucgacgaggacgacagcgagcccguccugaagggcgugaagcuccacuacacgugaggacuagucccuguucccagagcccacuuuuuuuucuuuuuuugaaauaaaauagccugucuuucagaucuaaaaaaaaaaaaaaaaaaaaaaaaaaaaaaaaaaaaaaaaaaaaaaaaaaaaaaaaaaaaaaaaaaaaaaaaaaaaaaaaaaaaaaaaaaaaaaaaaaaa

SEQ ID NO: 24757 - RNA, 4064 nt, Artificial Sequence
  SARS-CoV-2/Wuhan/WIV05/2019__EPI_ISL_402128 spike protein mRNA gc (1-1273)(H69del_V70del_A222V_Y453F_S477N_D614G_I692V)
aggagagucccgcagucggcguccagcggcucugcuuguucgugugugugucguugcaggccuuauucaagcuuaccauguucguguuccugguccuccugccccuggugagcucccagugcgugaaccucaccacccgcacgcagcugccgcccgccuacaccaacagcuucacccggggcgucuacuaccccgacaagguguuccgcuccagcgugcugcacuccacccaggaccucuuccugcccuucuucagcaacgucacgugguuccacgccaucuccgggaccaacggcaccaagcgguucgacaacccggugcugcccuucaacgacgggguguacuucgcgagcaccgagaaguccaacaucauccgcggcuggaucuucgggacgacccucgacagcaagacccagucccugcugaucgucaacaacgccaccaacguggugaucaaggucugcgaguuccaguucugcaacgaccccuuccucggcguguacuaccacaagaacaacaagagcuggauggaguccgaguuccggguguacagcuccgccaacaacugcacguucgaguacgucagccagcccuuccugauggaccuggagggcaagcaggggaacuucaagaaccuccgcgaguucguguucaagaacaucgacggcuacuucaagaucuacuccaagcacaccccgaucaaccuggugcgggaccugccccagggguucagcguccucgagccccugguggaccugcccaucggcaucaacaucacccgcuuccagacccuccuggcccugcaccgguccuaccucacgccgggggacagcagcuccggcuggaccgccggcgcggccgccuacuacgugggguaccugcagccccgcaccuuccugcucaaguacaacgagaacggcaccaucacggacgccgucgacugcgcgcuggacccccugagcgagaccaagugcacccucaaguccuucaccguggagaaggggaucuaccagacgagcaacuuccgggugcagcccaccgaguccaucguccgcuucccgaacaucaccaaccugugccccuucggcgagguguucaacgccacccgguucgccagcgucuacgccuggaaccgcaagcggaucuccaacugcguggccgacuacagcgugcuguacaacuccgcgagcuucuccacguucaagugcuacggcgucagccccaccaagcucaacgaccugugcuucaccaacguguacgccgacuccuucgugauccgcggggacgagguccggcagaucgcccccggccagaccgggaagaucgccgacuacaacuacaagcugccggacgacuucacgggcugcgugaucgccuggaacagcaacaaccucgacuccaaggucgggggcaacuacaacuaccuguuccgccuguuccgcaagagcaaccucaagcccuucgagcgggacaucuccaccgagaucuaccaggcgggcaacacccccugcaacgggguggagggcuucaacugcuacuucccccugcagagcuacggguuccagccgaccaacggcgugggguaccagcccuaccggguggucgugcuguccuucgagcuccugcacgcccccgccacggugugcggccccaagaaguccaccaaccuggucaagaacaagugcgugaacuucaacuucaacggccucaccgggaccggcgugcugaccgagagcaacaagaaguuccugccguuccagcaguucgggcgcgacaucgccgacacgaccgacgccguccgcgacccccagacccuggagauccucgacaucacccccugcagcuucggcggggugagcgugaucacgccgggcaccaacaccuccaaccaggucgcggugcuguaccagggcgugaacugcaccgagguccccguggccauccacgccgaccagcugacgcccaccuggcggguguacagcaccggguccaacgucuuccagacccgcgccggcugccucaucggggccgagcacgugaacaacagcuacgagugcgacauccccaucggcgcgggcaucugcgccuccuaccagacgcagaccaacagcccgcggcgcgcccgguccguggccagccaguccgucaucgcguacaccaugagccugggggccgagaacuccguggccuacagcaacaacuccaucgccauccccaccaacuucacgaucagcgugaccaccgagauccugcccgucuccaugaccaagacgagcguggacugcaccauguacaucugcggcgacagcaccgagugcuccaaccuccugcugcaguacgggagcuucugcacccagcucaaccgcgcccugacgggcaucgcgguggagcaggacaagaacacccaggaggucuucgcccaggugaagcagaucuacaagacgcccccgaucaaggacuucgggggcuucaacuucucccagauccugcccgaccccagcaagcccuccaagcggagcuucaucgaggaccuccuguucaacaaggugacccuggccgacgccggcuucaucaagcaguacggggacugccucggcgacaucgccgcgcgcgaccugaucugcgcccagaaguucaacgggcugaccguccucccgccccugcugaccgacgagaugaucgcccaguacaccuccgcccuccuggccggcaccaucacgagcggguggaccuucggcgcgggcgccgcccugcagauccccuucgccaugcagauggcguaccgguucaacgggaucggcgugacccagaacgugcucuacgagaaccagaagcugaucgccaaccaguucaacuccgccaucgggaagauccaggacagccuguccagcaccgccuccgcccucggcaagcugcaggacgucgugaaccagaacgcgcaggcccugaacacgcucgugaagcagcugagcuccaacuucggggccaucagcuccguccugaacgacauccucagccgccuggacaagguggaggccgaggugcagaucgaccggcugaucaccggccgccuccagucccugcagaccuacgucacccagcagcugauccgggccgcggagauccgcgccagcgccaaccucgccgccaccaagaugagcgagugcgugcugggccaguccaagcggguggacuucugcgggaagggcuaccaccugaugagcuucccccaguccgcgccgcacggggucguguuccuccacgucacguacgugcccgcccaggagaagaacuucaccaccgcccccgccaucugccacgacggcaaggcgcacuucccccgcgaggggguguucgucagcaacggcacccacugguucgugacgcagcggaacuucuacgagccgcagaucaucaccaccgacaacaccuucguguccggcaacugcgacgucgugaucgggaucgugaacaacacggucuacgacccccugcagcccgagcuggacagcuucaaggaggagcucgacaaguacuucaagaaccacaccucccccgacguggaccugggcgacaucagcgggaucaacgccuccguggucaacauccagaaggagaucgaccgccugaacgagguggccaagaaccucaacgagagccugaucgaccugcaggagcucggcaaguacgagcaguacaucaaguggccgugguacaucuggcugggcuucaucgccgggcugaucgccaucgugauggucaccaucaugcucugcugcaugaccuccugcugcagcugccugaagggcugcugcuccugcgggagcugcugcaaguucgacgaggacgacuccgagcccgugcugaagggcgugaagcuccacuacacgugaggacuagucccuguucccagagcccacuuuuuuuucuuuuuuugaaauaaaauagccugucuuucagaucuaaaaaaaaaaaaaaaaaaaaaaaaaaaaaaaaaaaaaaaaaaaaaaaaaaaaaaaaaaaaaaaaaaaaaaaaaaaaaaaaaaaaaaaaaaaaaaaaaaaa

SEQ ID NO: 24758 - RNA, 4064 nt, Artificial Sequence
  SARS-CoV-2/Wuhan/WIV05/2019__EPI_ISL_402128 spike protein mRNA gc (1-1273)(H69del_V70del_Y453F_D614G_I692V_M1229I)
aggagagucccgcagucggcguccagcggcucugcuuguucgugugugugucguugcaggccuuauucaagcuuaccauguucguguuccugguccuccugccccuggugagcucccagugcgugaaccucaccacccgcacgcagcugccgcccgccuacaccaacagcuucacccggggcgucuacuaccccgacaagguguuccgcuccagcgugcugcacuccacccaggaccucuuccugcccuucuucagcaacgucacgugguuccacgccaucuccgggaccaacggcaccaagcgguucgacaacccggugcugcccuucaacgacgggguguacuucgcgagcaccgagaaguccaacaucauccgcggcuggaucuucgggacgacccucgacagcaagacccagucccugcugaucgucaacaacgccaccaacguggugaucaaggucugcgaguuccaguucugcaacgaccccuuccucggcguguacuaccacaagaacaacaagagcuggauggaguccgaguuccggguguacagcuccgccaacaacugcacguucgaguacgucagccagcccuuccugauggaccuggagggcaagcaggggaacuucaagaaccuccgcgaguucguguucaagaacaucgacggcuacuucaagaucuacuccaagcacaccccgaucaaccuggugcgggaccugccccagggguucagcgcccucgagccccuggucgaccugcccaucggcaucaacaucacccgcuuccagacccuccuggcccugcaccgguccuaccucacgccgggggacagcagcuccggcuggaccgcgggcgccgccgccuacuacgugggguaccugcagccccgcaccuuccugcucaaguacaacgagaacggcaccaucacggacgcgguggacugcgcccuggacccccugagcgagaccaagugcacccucaaguccuucaccgucgagaaggggaucuaccagacgagcaacuuccgggugcagcccaccgaguccaucgugcgcuucccgaacaucaccaaccugugccccuucggcgaggucuucaacgccacccgguucgccagcguguacgccuggaaccgcaagcggaucuccaacugcgucgcggacuacagcgugcuguacaacuccgccagcuucuccacguucaagugcuacggcgugagccccaccaagcucaacgaccugugcuucaccaacgucuacgccgacuccuucgugauccgcggggacgaggugcggcagaucgcccccggccagaccgggaagaucgccgacuacaacuacaagcugccggacgacuucacgggcugcgucaucgcguggaacagcaacaaccucgacuccaaggucgggggcaacuacaacuaccuguuccgccuguuccgcaagagcaaccucaagcccuucgagcgggacaucuccaccgagaucuaccaggccggcagcacccccugcaacgggguggagggcuucaacugcuacuucccccugcaguccuacggguuccagccgaccaacggcgugggguaccagcccuaccggguggugguccugagcuucgagcuccugcacgcccccgccacggugugcggccccaagaaguccaccaaccuggugaagaacaagugcgucaacuucaacuucaacggccucaccgggaccggcgugcugaccgagagcaacaagaaguuccugccguuccagcaguucgggcgcgacaucgccgacacgaccgacgcggugcgcgacccccagacccuggagauccucgacaucacccccugcagcuucggcggggucuccgugaucacgccgggcaccaacaccagcaaccagguggccguccuguaccagggcgugaacugcaccgaggugcccgucgccauccacgccgaccagcugacgcccaccuggcggguguacuccaccgggagcaacguguuccagacccgcgccggcugccucaucggggcggagcacgucaacaacuccuacgagugcgacauccccaucggcgccggcaucugcgccagcuaccagacgcagaccaacuccccgcggcgcgcccggagcguggcgucccagagcgugaucgccuacaccaugucccugggggccgagaacagcgucgccuacuccaacaacagcaucgccauccccaccaacuucacgaucuccgugaccaccgagauccugcccgugagcaugaccaagacgagcgucgacugcaccauguacaucugcggcgacuccaccgagugcagcaaccuccugcugcaguacggguccuucugcacccagcucaaccgcgcgcugacgggcaucgccguggagcaggacaagaacacccaggagguguucgcccaggucaagcagaucuacaagacgcccccgaucaaggacuucgggggcuucaacuucagccagauccugcccgaccccuccaagcccagcaagcgguccuucaucgaggaccuccuguucaacaaggugacccuggccgacgccggcuucaucaagcaguacggggacugccucggcgacaucgcggcccgcgaccugaucugcgcccagaaguucaacgggcugaccgugcucccgccccugcugaccgacgagaugaucgcccaguacaccagcgcccuccuggcgggcaccaucacguccggguggaccuucggcgccggcgccgcccugcagauccccuucgcgaugcagauggccuaccgguucaacgggaucggcgucacccagaacgugcucuacgagaaccagaagcugaucgccaaccaguucaacagcgccaucgggaagauccaggacucccugagcuccaccgccagcgcgcucggcaagcugcaggacguggucaaccagaacgcccaggcccugaacacgcucgugaagcagcuguccagcaacuucggggccaucuccagcgugcugaacgacauccucucccgccuggacaaggucgaggccgaggugcagaucgaccggcugaucaccggccgccuccagagccugcagaccuacgugacccagcagcugauccgggcggccgagauccgcgccagcgccaaccucgccgcgaccaagauguccgagugcguccugggccagagcaagcggguggacuucugcgggaagggcuaccaccugauguccuucccccagagcgccccgcacgggguggucuuccuccacgugacguacguccccgcccaggagaagaacuucaccaccgcccccgcgaucugccacgacggcaaggcccacuucccccgcgaggggguguucguguccaacggcacccacugguucgucacgcagcggaacuucuacgagccgcagaucaucaccaccgacaacaccuucgugagcggcaacugcgacguggucaucgggaucgugaacaacacgguguacgacccccugcagcccgagcuggacuccuucaaggaggagcucgacaaguacuucaagaaccacaccagccccgacgucgaccugggcgacaucuccgggaucaacgccagcguggugaacauccagaaggagaucgaccgccugaacgaggucgccaagaaccucaacgagucccugaucgaccugcaggagcucggcaaguacgagcaguacaucaaguggccgugguacaucuggcugggcuucaucgccgggcugaucgcgaucgugaucgugaccaucaugcucugcugcaugaccagcugcugcuccugccugaagggcugcugcagcugcggguccugcugcaaguucgacgaggacgacagcgagcccguccugaagggcgugaagcuccacuacacgugaggacuagucccuguucccagagcccacuuuuuuuucuuuuuuugaaauaaaauagccugucuuucagaucuaaaaaaaaaaaaaaaaaaaaaaaaaaaaaaaaaaaaaaaaaaaaaaaaaaaaaaaaaaaaaaaaaaaaaaaaaaaaaaaaaaaaaaaaaaaaaaaaaaaa

SEQ ID NO: 24759 - RNA, 4061 nt, Artificial Sequence
  SARS-CoV-2/Wuhan/WIV05/2019__EPI_ISL_402128 spike protein mRNA gc (1-1273)(H69del_V70del_Y144del_N501Y_A570D_D614G_P681H_T716I_S982 A_D1118H)
aggagagucccgcagucggcguccagcggcucugcuuguucgugugugugucguugcaggccuuauucaagcuuaccauguucguguuccugguccuccugccccuggugagcucccagugcgugaaccucaccacccgcacgcagcugccgcccgccuacaccaacagcuucacccggggcgucuacuaccccgacaagguguuccgcuccagcgugcugcacuccacccaggaccucuuccugcccuucuucagcaacgucacgugguuccacgccaucuccgggaccaacggcaccaagcgguucgacaacccggugcugcccuucaacgacgggguguacuucgcgagcaccgagaaguccaacaucauccgcggcuggaucuucgggacgacccucgacagcaagacccagucccugcugaucgucaacaacgccaccaacguggugaucaaggucugcgaguuccaguucugcaacgaccccuuccucggcguguaccacaagaacaacaagagcuggauggaguccgaguuccggguguacagcuccgccaacaacugcacguucgaguacgucagccagcccuuccugauggaccuggagggcaagcaggggaacuucaagaaccuccgcgaguucguguucaagaacaucgacggcuacuucaagaucuacuccaagcacaccccgaucaaccuggugcgggaccugccccagggguucagcgcccucgagccccuggucgaccugcccaucggcaucaacaucacccgcuuccagacccuccuggcccugcaccgguccuaccucacgccgggggacagcagcuccggcuggaccgcgggcgccgccgccuacuacgugggguaccugcagccccgcaccuuccugcucaaguacaacgagaacggcaccaucacggacgcgguggacugcgcccuggacccccugagcgagaccaagugcacccucaaguccuucaccgucgagaaggggaucuaccagacgagcaacuuccgggugcagcccaccgaguccaucgugcgcuucccgaacaucaccaaccugugccccuucggcgaggucuucaacgccacccgguucgccagcguguacgccuggaaccgcaagcggaucuccaacugcgucgcggacuacagcgugcuguacaacuccgccagcuucuccacguucaagugcuacggcgugagccccaccaagcucaacgaccugugcuucaccaacgucuacgccgacuccuucgugauccgcggggacgaggugcggcagaucgcccccggccagaccgggaagaucgccgacuacaacuacaagcugccggacgacuucacgggcugcgucaucgcguggaacagcaacaaccucgacuccaaggucgggggcaacuacaacuaccuguaccgccuguuccgcaagagcaaccucaagcccuucgagcgggacaucuccaccgagaucuaccaggccggcagcacccccugcaacgggguggagggcuucaacugcuacuucccccugcaguccuacggguuccagccgaccuacggcgugggguaccagcccuaccggguggugguccugagcuucgagcuccugcacgcccccgccacggugugcggccccaagaaguccaccaaccuggugaagaacaagugcgucaacuucaacuucaacggccucaccgggaccggcgugcugaccgagagcaacaagaaguuccugccguuccagcaguucgggcgcgacaucgacgacacgaccgacgccgugcgcgacccccagacccuggagauccucgacaucacccccugcagcuucggcggggucuccgugaucacgccgggcaccaacaccagcaaccagguggcgguccuguaccagggcgugaacugcaccgaggugcccgucgccauccacgccgaccagcugacgcccaccuggcggguguacuccaccgggagcaacguguuccagacccgcgccggcugccucaucggggccgagcacgucaacaacuccuacgagugcgacauccccaucggcgcgggcaucugcgccagcuaccagacgcagaccaacucccaccggcgcgcccggagcguggccucccagagcaucaucgcguacaccaugucccugggggccgagaacagcguggccuacuccaacaacagcaucgccaucccgaucaacuucaccaucuccgucacgaccgagauccugcccgugagcaugaccaagaccagcguggacugcacgauguacaucugcggcgacuccaccgagugcagcaaccuccugcugcaguacggguccuucugcacccagcucaaccgcgcccugaccggcaucgcggucgagcaggacaagaacacgcaggagguguucgcccaggugaagcagaucuacaagaccccgcccaucaaggacuucgggggcuucaacuucagccagauccugcccgaccccuccaagcccagcaagcgguccuucaucgaggaccuccuguucaacaaggucacccuggccgacgccggcuucaucaagcaguacggggacugccucggcgacaucgccgcgcgcgaccugaucugcgcccagaaguucaacgggcugaccgugcugcccccgcuccugacggacgagaugaucgcccaguacaccagcgcccuccuggccggcaccaucaccuccggguggacguucggcgcgggcgccgcccugcagauccccuucgccaugcagauggcguaccgguucaacgggaucggcgugacccagaacguccucuacgagaaccagaagcugaucgccaaccaguucaacagcgccaucgggaagauccaggacucccugagcuccaccgccagcgcccucggcaagcugcaggacguggugaaccagaacgcgcaggcccugaacacccucgucaagcagcuguccagcaacuucggggccaucuccagcgugcugaacgacauccucgcccgccuggacaagguggaggccgagguccagaucgaccggcugaucacgggccgccuccagucccugcagaccuacgugacccagcagcugauccgggcggccgagauccgcgccagcgccaaccucgccgcgaccaagaugagcgagugcgugcugggccaguccaagcgggucgacuucugcgggaagggcuaccaccugaugagcuucccccaguccgcgccccacggggugguguuccuccacgucaccuacgugccggcccaggagaagaacuucacgaccgcccccgccaucugccacgacggcaaggcccacuucccccgcgagggggucuucgugagcaacggcacccacugguucgugacccagcggaacuucuacgagccccagaucaucacgacccacaacaccuucgucuccggcaacugcgacguggugaucgggaucgucaacaacaccguguacgacccgcugcagcccgagcuggacagcuucaaggaggagcucgacaaguacuucaagaaccacacgucccccgacguggaccugggcgacaucagcgggaucaacgccuccgucgugaacauccagaaggagaucgaccgccugaacgagguggccaagaaccucaacgagagccugaucgaccugcaggagcucggcaaguacgagcaguacaucaaguggcccugguacaucuggcugggcuucaucgccgggcugaucgcgaucgucauggugaccaucaugcucugcugcaugaccuccugcugcagcugccugaagggcugcugcuccugcgggagcugcugcaaguucgacgaggacgacuccgagccggugcugaagggcgucaagcuccacuacaccugaggacuagucccuguucccagagcccacuuuuuuuucuuuuuuugaaauaaaauagccugucuuucagaucuaaaaaaaaaaaaaaaaaaaaaaaaaaaaaaaaaaaaaaaaaaaaaaaaaaaaaaaaaaaaaaaaaaaaaaaaaaaaaaaaaaaaaaaaaaaaaaaaaaaa

SEQ ID NO: 24760 - RNA, 4070 nt, Artificial Sequence
  SARS-CoV-2/Wuhan/WIV05/2019__EPI_ISL_402128 spike protein mRNA gc (1-1273)(K417N_E484K_N501Y_D614G)
aggagagucccgcagucggcguccagcggcucugcuuguucgugugugugucguugcaggccuuauucaagcuuaccauguucguguuccugguccuccugccccuggugagcucccagugcgugaaccucaccacccgcacgcagcugccgcccgccuacaccaacagcuucacccggggcgucuacuaccccgacaagguguuccgcuccagcgugcugcacuccacccaggaccucuuccugcccuucuucagcaacgucacgugguuccacgccauccacguguccgggaccaacggcaccaagcgguucgacaacccggugcugcccuucaacgacggggucuacuucgcgagcaccgagaaguccaacaucauccgcggcuggaucuucgggacgacccucgacagcaagacccagucccugcugaucgugaacaacgccaccaacguggucaucaaggugugcgaguuccaguucugcaacgaccccuuccucggcguguacuaccacaagaacaacaagagcuggauggaguccgaguuccgggucuacagcuccgccaacaacugcacguucgaguacgugagccagcccuuccugauggaccuggagggcaagcaggggaacuucaagaaccuccgcgaguucguguucaagaacaucgacggcuacuucaagaucuacuccaagcacaccccgaucaaccugguccgggaccugccccagggguucagcgcccucgagccccugguggaccugcccaucggcaucaacaucacccgcuuccagacccuccuggcccugcaccgguccuaccucacgccgggggacagcagcuccggcuggaccgcgggcgccgccgccuacuacgugggguaccugcagccccgcaccuuccugcucaaguacaacgagaacggcaccaucacggacgcggucgacugcgcccuggacccccugagcgagaccaagugcacccucaaguccuucaccguggagaaggggaucuaccagacgagcaacuuccgggugcagcccaccgaguccaucguccgcuucccgaacaucaccaaccugugccccuucggcgagguguucaacgccacccgguucgccagcgucuacgccuggaaccgcaagcggaucuccaacugcguggcggacuacagcgugcuguacaacuccgccagcuucuccacguucaagugcuacggcgucagccccaccaagcucaacgaccugugcuucaccaacguguacgccgacuccuucgugauccgcggggacgagguccggcagaucgcccccggccagaccgggaacaucgccgacuacaacuacaagcugccggacgacuucacgggcugcgugaucgcguggaacagcaacaaccucgacuccaaggucgggggcaacuacaacuaccuguaccgccuguuccgcaagagcaaccucaagcccuucgagcgggacaucuccaccgagaucuaccaggccggcagcacccccugcaacggggugaagggcuucaacugcuacuucccccugcaguccuacggguuccagccgaccuacggcgugggguaccagcccuaccggguggucgugcugagcuucgagcuccugcacgcccccgccacggugugcggccccaagaaguccaccaaccuggucaagaacaagugcgugaacuucaacuucaacggccucaccgggaccggcgugcugaccgagagcaacaagaaguuccugccguuccagcaguucgggcgcgacaucgccgacacgaccgacgcgguccgcgacccccagacccuggagauccucgacaucacccccugcagcuucggcgggguguccgugaucacgccgggcaccaacaccagcaaccaggucgccgugcuguaccagggcgugaacugcaccgagguccccguggccauccacgccgaccagcugacgcccaccuggcggguguacuccaccgggagcaacgucuuccagacccgcgccggcugccucaucggggcggagcacgugaacaacuccuacgagugcgacauccccaucggcgccggcaucugcgccagcuaccagacgcagaccaacuccccgcggcgcgcccggagcguggcgucccagagcaucaucgccuacaccaugucccugggggccgagaacagcgucgccuacuccaacaacagcaucgccauccccaccaacuucacgaucuccgugaccaccgagauccugcccgugagcaugaccaagacgagcgucgacugcaccauguacaucugcggcgacuccaccgagugcagcaaccuccugcugcaguacggguccuucugcacccagcucaaccgcgcgcugacgggcaucgccguggagcaggacaagaacacccaggagguguucgcccaggucaagcagaucuacaagacgcccccgaucaaggacuucgggggcuucaacuucagccagauccugcccgaccccuccaagcccagcaagcgguccuucaucgaggaccuccuguucaacaaggugacccuggccgacgccggcuucaucaagcaguacggggacugccucggcgacaucgcggcccgcgaccugaucugcgcccagaaguucaacgggcugaccgugcucccgccccugcugaccgacgagaugaucgcccaguacaccagcgcccuccuggcgggcaccaucacguccggguggaccuucggcgccggcgccgcccugcagauccccuucgcgaugcagauggccuaccgguucaacgggaucggcgucacccagaacgugcucuacgagaaccagaagcugaucgccaaccaguucaacagcgccaucgggaagauccaggacucccugagcuccaccgccagcgcgcucggcaagcugcaggacguggucaaccagaacgcccaggcccugaacacgcucgugaagcagcuguccagcaacuucggggccaucuccagcgugcugaacgacauccucucccgccuggacaaggucgaggccgaggugcagaucgaccggcugaucaccggccgccuccagagccugcagaccuacgugacccagcagcugauccgggcggccgagauccgcgccagcgccaaccucgccgcgaccaagauguccgagugcguccugggccagagcaagcggguggacuucugcgggaagggcuaccaccugauguccuucccccagagcgccccgcacgggguggucuuccuccacgugacguacguccccgcccaggagaagaacuucaccaccgcccccgcgaucugccacgacggcaaggcccacuucccccgcgaggggguguucguguccaacggcacccacugguucgucacgcagcggaacuucuacgagccgcagaucaucaccaccgacaacaccuucgugagcggcaacugcgacguggucaucgggaucgugaacaacacgguguacgacccccugcagcccgagcuggacuccuucaaggaggagcucgacaaguacuucaagaaccacaccagccccgacgucgaccugggcgacaucuccgggaucaacgccagcguggugaacauccagaaggagaucgaccgccugaacgaggucgccaagaaccucaacgagucccugaucgaccugcaggagcucggcaaguacgagcaguacaucaaguggccgugguacaucuggcugggcuucaucgccgggcugaucgcgaucgugauggugaccaucaugcucugcugcaugaccagcugcugcuccugccugaagggcugcugcagcugcggguccugcugcaaguucgacgaggacgacagcgagcccguccugaagggcgugaagcuccacuacacgugaggacuagucccuguucccagagcccacuuuuuuuucuuuuuuugaaauaaaauagccugucuuucagaucuaaaaaaaaaaaaaaaaaaaaaaaaaaaaaaaaaaaaaaaaaaaaaaaaaaaaaaaaaaaaaaaaaaaaaaaaaaaaaaaaaaaaaaaaaaaaaaaaaaaa

SEQ ID NO: 24761 - RNA, 4061 nt, Artificial Sequence
  SARS-CoV-2/Wuhan/WIV05/2019__EPI_ISL_402128 spike protein mRNA gc (1-1273)(L18F_D80A_D215G_L242del_A243del_L244del_R246I_K417N_E484 K_N501Y_D614G_A701V)
aggagagucccgcagucggcguccagcggcucugcuuguucgugugugugucguugcaggccuuauucaagcuuaccauguucguguuccugguccuccugccccuggugagcucccagugcgugaacuucaccacccgcacgcagcucccgcccgccuacaccaacagcuucacccggggcgucuacuaccccgacaagguguuccgcuccagcgugcugcacuccacccaggaccuguuccuccccuucuucagcaacgucacgugguuccacgccauccacguguccgggaccaacggcaccaagcgguucgcgaacccggugcugcccuucaacgacggggucuacuucgccagcaccgagaaguccaacaucauccgcggcuggaucuucgggacgacccuggacagcaagacccagucccuccugaucgugaacaacgccaccaacguggucaucaaggugugcgaguuccaguucugcaacgaccccuuccugggcguguacuaccacaagaacaacaagagcuggauggaguccgaguuccgggucuacagcuccgccaacaacugcacguucgaguacgugagccagcccuuccucauggaccuggagggcaagcaggggaacuucaagaaccugcgcgaguucguguucaagaacaucgacggcuacuucaagaucuacuccaagcacaccccgaucaaccucguccgggggcugccccagggcuucagcgcccuggagccccucguggaccugcccaucgggaucaacaucacccgcuuccagacccugcacaucuccuaccucacgccgggcgacagcagcuccggcuggaccgcgggggccgccgccuacuacgugggcuaccugcagccccggaccuuccugcucaaguacaacgagaacgggaccaucacggacgcggucgacugcgcccuggacccccugagcgagaccaagugcacccucaaguccuucaccguggagaagggcaucuaccagacgagcaacuuccgcgugcagcccaccgaguccaucguccgguucccgaacaucaccaaccugugccccuucggcgagguguucaacgccacccgcuucgccagcgucuacgccuggaaccggaagcgcaucuccaacugcguggcggacuacagcgugcuguacaacuccgccagcuucuccacguucaagugcuacggggucagccccaccaagcucaacgaccugugcuucaccaacguguacgccgacuccuucgugauccggggcgacgagguccgccagaucgcccccgggcagaccggcaacaucgccgacuacaacuacaagcugccggacgacuucacggggugcgugaucgcguggaacagcaacaaccucgacuccaaggugggcggcaacuacaacuaccuguaccggcuguuccgcaagagcaaccucaagcccuucgagcgggacaucuccaccgagaucuaccaggccgggagcacccccugcaacggcgucaagggguucaacugcuacuucccccugcaguccuacggcuuccagccgaccuacggggugggcuaccagcccuaccgcguggucgugcugagcuucgagcuccugcacgcccccgccacggugugcggccccaagaaguccaccaaccuggucaagaacaagugcgugaacuucaacuucaacgggcucaccggcaccggggugcugaccgagagcaacaagaaguuccugccguuccagcaguucggccgggacaucgccgacacgaccgacgcgguccgcgacccccagacccucgagauccuggacaucacccccugcagcuucgggggcguguccgugaucacgccgggcaccaacaccagcaaccaggucgccgugcuguaccagggggugaacugcaccgagguccccguggccauccacgccgaccagcugacgcccaccuggcgcguguacuccaccggcagcaacgucuuccagacccgggccgggugccucaucggcgcggagcacgugaacaacuccuacgagugcgacauccccaucggcgccgggaucugcgccagcuaccagacgcagaccaacuccccgcgccgggcccgcagcguggcgucccagagcaucaucgccuacaccaugucccugggcgucgagaacagcguggccuacuccaacaacagcaucgccauccccaccaacuucacgaucuccgugaccaccgagauccugcccgucagcaugaccaagacgagcguggacugcaccauguacaucugcggggacuccaccgagugcagcaaccuccugcugcaguacggcuccuucugcacccagcucaaccgggcccugacggggaucgcgguggagcaggacaagaacacccaggaggucuucgcccaggugaagcagaucuacaagacgcccccgaucaaggacuucggcggcuucaacuucagccagauccugcccgaccccuccaagcccagcaagcgcuccuucaucgaggaccuccuguucaacaaggugacccuggccgacgccggguucaucaagcaguacggcgacugccucggggacaucgccgcgcgggaccugaucugcgcccagaaguucaacggccugaccguccucccgccccugcugaccgacgagaugaucgcccaguacaccagcgcccuccuggccgggaccaucacguccggcuggaccuucggcgcgggggccgcccugcagauccccuucgccaugcagauggcguaccgcuucaacggcaucggggugacccagaacgugcucuacgagaaccagaagcugaucgccaaccaguucaacagcgccaucggcaagauccaggacucccugagcuccaccgccagcgcccucgggaagcugcaggacgucgugaaccagaacgcgcaggcccugaacacgcucgugaagcagcuguccagcaacuucggcgccaucuccagcguccugaacgacauccucucccggcuggacaagguggaggccgaggugcagaucgaccgccugaucaccggccggcuccagagccugcagaccuacgucacccagcagcugauccgcgccgcggagauccgggccagcgccaaccucgccgccaccaagauguccgagugcgugcuggggcagagcaagcgcguggacuucugcggcaagggguaccaccugauguccuucccccagagcgcgccgcacggcgucguguuccuccacgucacguacgugcccgcccaggagaagaacuucaccaccgcccccgccaucugccacgacgggaaggcgcacuucccccgggagggcguguucgucuccaacggcacccacugguucgugacgcagcgcaacuucuacgagccgcagaucaucaccaccgacaacaccuucgugagcgggaacugcgacgucgugaucggcaucgugaacaacacggucuacgacccccugcagcccgagcuggacuccuucaaggaggagcucgacaaguacuucaagaaccacaccagccccgacguggaccugggggacaucuccggcaucaacgccagcguggucaacauccagaaggagaucgaccggcugaacgagguggccaagaaccucaacgagucccugaucgaccugcaggagcucggcaaguacgagcaguacaucaaguggccgugguacaucuggcugggguucaucgccggccugaucgccaucgugauggucaccaucaugcucugcugcaugaccagcugcugcuccugccugaaggggugcugcagcugcggcuccugcugcaaguucgacgaggacgacagcgagcccgugcugaagggggugaagcuccacuacacgugaggacuagucccuguucccagagcccacuuuuuuuucuuuuuuugaaauaaaauagccugucuuucagaucuaaaaaaaaaaaaaaaaaaaaaaaaaaaaaaaaaaaaaaaaaaaaaaaaaaaaaaaaaaaaaaaaaaaaaaaaaaaaaaaaaaaaaaaaaaaaaaaaaaaa

SEQ ID NO: 24762 - RNA, 4070 nt, Artificial Sequence
  SARS-CoV-2/Wuhan/WIV05/2019__EPI_ISL_402128 spike protein mRNA gc (1-1273)(E484K_D614G)
aggagagucccgcagucggcguccagcggcucugcuuguucgugugugugucguugcaggccuuauucaagcuuaccauguucguguuccugguccuccugccccuggugagcucccagugcgugaaccucaccacccgcacgcagcugccgcccgccuacaccaacagcuucacccggggcgucuacuaccccgacaagguguuccgcuccagcgugcugcacuccacccaggaccucuuccugcccuucuucagcaacgucacgugguuccacgccauccacguguccgggaccaacggcaccaagcgguucgacaacccggugcugcccuucaacgacggggucuacuucgcgagcaccgagaaguccaacaucauccgcggcuggaucuucgggacgacccucgacagcaagacccagucccugcugaucgugaacaacgccaccaacguggucaucaaggugugcgaguuccaguucugcaacgaccccuuccucggcguguacuaccacaagaacaacaagagcuggauggaguccgaguuccgggucuacagcuccgccaacaacugcacguucgaguacgugagccagcccuuccugauggaccuggagggcaagcaggggaacuucaagaaccuccgcgaguucguguucaagaacaucgacggcuacuucaagaucuacuccaagcacaccccgaucaaccugguccgggaccugccccagggguucagcgcccucgagccccugguggaccugcccaucggcaucaacaucacccgcuuccagacccuccuggcccugcaccgguccuaccucacgccgggggacagcagcuccggcuggaccgcgggcgccgccgccuacuacgugggguaccugcagccccgcaccuuccugcucaaguacaacgagaacggcaccaucacggacgcggucgacugcgcccuggacccccugagcgagaccaagugcacccucaaguccuucaccguggagaaggggaucuaccagacgagcaacuuccgggugcagcccaccgaguccaucguccgcuucccgaacaucaccaaccugugccccuucggcgagguguucaacgccacccgguucgccagcgucuacgccuggaaccgcaagcggaucuccaacugcguggcggacuacagcgugcuguacaacuccgccagcuucuccacguucaagugcuacggcgucagccccaccaagcucaacgaccugugcuucaccaacguguacgccgacuccuucgugauccgcggggacgagguccggcagaucgcccccggccagaccgggaagaucgccgacuacaacuacaagcugccggacgacuucacgggcugcgugaucgcguggaacagcaacaaccucgacuccaaggucgggggcaacuacaacuaccuguaccgccuguuccgcaagagcaaccucaagcccuucgagcgggacaucuccaccgagaucuaccaggccggcagcacccccugcaacggggugaagggcuucaacugcuacuucccccugcaguccuacggguuccagccgaccaacggcgugggguaccagcccuaccggguggucgugcugagcuucgagcuccugcacgcccccgccacggugugcggccccaagaaguccaccaaccuggucaagaacaagugcgugaacuucaacuucaacggccucaccgggaccggcgugcugaccgagagcaacaagaaguuccugccguuccagcaguucgggcgcgacaucgccgacacgaccgacgcgguccgcgacccccagacccuggagauccucgacaucacccccugcagcuucggcgggguguccgugaucacgccgggcaccaacaccagcaaccaggucgccgugcuguaccagggcgugaacugcaccgagguccccguggccauccacgccgaccagcugacgcccaccuggcggguguacuccaccgggagcaacgucuuccagacccgcgccggcugccucaucggggcggagcacgugaacaacuccuacgagugcgacauccccaucggcgccggcaucugcgccagcuaccagacgcagaccaacuccccgcggcgcgcccggagcguggcgucccagagcaucaucgccuacaccaugucccugggggccgagaacagcgucgccuacuccaacaacagcaucgccauccccaccaacuucacgaucuccgugaccaccgagauccugcccgugagcaugaccaagacgagcgucgacugcaccauguacaucugcggcgacuccaccgagugcagcaaccuccugcugcaguacggguccuucugcacccagcucaaccgcgcgcugacgggcaucgccguggagcaggacaagaacacccaggagguguucgcccaggucaagcagaucuacaagacgcccccgaucaaggacuucgggggcuucaacuucagccagauccugcccgaccccuccaagcccagcaagcgguccuucaucgaggaccuccuguucaacaaggugacccuggccgacgccggcuucaucaagcaguacggggacugccucggcgacaucgcggcccgcgaccugaucugcgcccagaaguucaacgggcugaccgugcucccgccccugcugaccgacgagaugaucgcccaguacaccagcgcccuccuggcgggcaccaucacguccggguggaccuucggcgccggcgccgcccugcagauccccuucgcgaugcagauggccuaccgguucaacgggaucggcgucacccagaacgugcucuacgagaaccagaagcugaucgccaaccaguucaacagcgccaucgggaagauccaggacucccugagcuccaccgccagcgcgcucggcaagcugcaggacguggucaaccagaacgcccaggcccugaacacgcucgugaagcagcuguccagcaacuucggggccaucuccagcgugcugaacgacauccucucccgccuggacaaggucgaggccgaggugcagaucgaccggcugaucaccggccgccuccagagccugcagaccuacgugacccagcagcugauccgggcggccgagauccgcgccagcgccaaccucgccgcgaccaagauguccgagugcguccugggccagagcaagcggguggacuucugcgggaagggcuaccaccugauguccuucccccagagcgccccgcacgggguggucuuccuccacgugacguacguccccgcccaggagaagaacuucaccaccgcccccgcgaucugccacgacggcaaggcccacuucccccgcgaggggguguucguguccaacggcacccacugguucgucacgcagcggaacuucuacgagccgcagaucaucaccaccgacaacaccuucgugagcggcaacugcgacguggucaucgggaucgugaacaacacgguguacgacccccugcagcccgagcuggacuccuucaaggaggagcucgacaaguacuucaagaaccacaccagccccgacgucgaccugggcgacaucuccgggaucaacgccagcguggugaacauccagaaggagaucgaccgccugaacgaggucgccaagaaccucaacgagucccugaucgaccugcaggagcucggcaaguacgagcaguacaucaaguggccgugguacaucuggcugggcuucaucgccgggcugaucgcgaucgugauggugaccaucaugcucugcugcaugaccagcugcugcuccugccugaagggcugcugcagcugcggguccugcugcaaguucgacgaggacgacagcgagcccguccugaagggcgugaagcuccacuacacgugaggacuagucccuguucccagagcccacuuuuuuuucuuuuuuugaaauaaaauagccugucuuucagaucuaaaaaaaaaaaaaaaaaaaaaaaaaaaaaaaaaaaaaaaaaaaaaaaaaaaaaaaaaaaaaaaaaaaaaaaaaaaaaaaaaaaaaaaaaaaaaaaaaaaa

SEQ ID NO: 24763 - RNA, 4070 nt, Artificial Sequence
  SARS-CoV-2/Wuhan/WIV05/2019__EPI_ISL_402128 spike protein mRNA gc (1-1273)(L18F_T20N_P26S_D138Y_R190S_K417T_E484K_N501Y_D614G_H655Y _T1027I)
aggagagucccgcagucggcguccagcggcucugcuuguucgugugugugucguugcaggccuuauucaagcuuaccauguucguguuccugguccuccugccccuggugagcucccagugcgugaacuucaccaaccgcacccagcucccgagcgccuacacgaacuccuucacccggggcgucuacuaccccgacaagguguuccgcagcuccgugcugcacagcacccaggaccuguuccuccccuucuucuccaacgucaccugguuccacgccauccacgugagcgggacgaacggcaccaagcgguucgacaaccccgugcugccguucaacgacggggucuacuucgcguccaccgagaaguccaacaucauccgcggcuggaucuucgggaccacgcuggacuccaagacccagagccuccugaucgugaacaacgccaccaacguggucaucaaggugugcgaguuccaguucugcaacuaccccuuccugggcguguacuaccacaagaacaacaaguccuggauggagagcgaguuccgggucuacuccagcgccaacaacugcaccuucgaguacgugucccagcccuuccucauggaccuggagggcaagcaggggaacuucaagaaccugagcgaguucguguucaagaacaucgacggcuacuucaagaucuacuccaagcacacgcccaucaaccucguccgcgaccugccgcagggguucagcgcccuggagccccucguggaccugcccaucggcaucaacaucacccgguuccagacccugcucgcccugcaccgcagcuaccugacccccggggacuccagcuccggcuggacggcgggcgccgccgccuacuacgugggguaccuccagccgcggaccuuccugcugaaguacaacgagaacggcaccaucaccgacgcggucgacugcgcccucgacccccugagcgagacgaagugcacccugaaguccuucaccguggagaaggggaucuaccagaccagcaacuuccgcgugcagcccacggaguccaucguccgguuccccaacaucaccaaccucugcccguucggcgagguguucaacgccacccgcuucgccagcgucuacgccuggaaccggaagcgcaucuccaacugcguggcggacuacagcgugcuguacaacuccgccagcuucuccaccuucaagugcuacggcgucagccccacgaagcugaacgaccucugcuucaccaacguguacgccgacuccuucgugauccgcggggacgagguccggcagaucgcccccggccagaccgggaccaucgccgacuacaacuacaagcugcccgacgacuucacgggcugcgugaucgcguggaacagcaacaaccuggacuccaaggucgggggcaacuacaacuaccucuaccggcuguuccgcaagagcaaccugaagccguucgagcgggacaucuccaccgagaucuaccaggccggcagcacccccugcaacggggugaagggcuucaacugcuacuucccccuccagagcuacggguuccagcccaccuacggcgugggguaccagccguaccgcguggucgugcuguccuucgagcugcuccacgcccccgccacggugugcggccccaagaaguccaccaaccuggucaagaacaagugcgugaacuucaacuucaacggccugaccgggaccggcgugcucaccgagagcaacaagaaguuccugcccuuccagcaguucgggcgggacaucgccgacacgaccgacgcgguccgcgacccgcagacccuggagauccuggacaucacccccugcagcuucggcgggguguccgugaucacgcccggcaccaacaccagcaaccaggucgccgugcucuaccagggcgugaacugcaccgaggucccgguggccauccacgccgaccagcugacgcccaccuggcgcguguacuccaccgggagcaacgucuuccagacccgggccggcugccugaucggggcggaguacgugaacaacuccuacgagugcgacauccccaucggcgccggcaucugcgccagcuaccagacgcagaccaacagcccccgccgggcccgcagcguggcgucccagagcaucaucgccuacaccaugucccucggggccgagaacagcgucgccuacuccaacaacagcaucgccaucccgaccaacuucacgaucagcgugaccaccgagauccugcccguguccaugaccaagacgagcgucgacugcaccauguacaucugcggcgacuccaccgagugcagcaaccugcuccugcaguacggguccuucugcacccagcugaaccgggcgcucacgggcaucgccguggagcaggacaagaacacccaggagguguucgcccaggucaagcagaucuacaagaccccgcccaucaaggacuucgggggcuucaacuucagccagauccugcccgaccccuccaagcccagcaagcgcuccuucaucgaggaccuccuguucaacaaggugacccuggccgacgccggcuucaucaagcaguacggggacugccugggcgacaucgcggcccgggaccucaucugcgcccagaaguucaacgggcugacggugcugcccccgcuccugaccgacgagaugaucgcccaguacaccagcgcccugcucgcgggcaccaucacguccggguggaccuucggcgccggcgccgcccugcagauccccuucgcgaugcagauggccuaccgcuucaacgggaucggcgucacccagaacgugcuguacgagaaccagaagcucaucgccaaccaguucaacagcgccaucgggaagauccaggacucccugagcuccaccgccagcgcgcugggcaagcuccaggacguggucaaccagaacgcccaggcccugaacacgcuggugaagcagcucuccagcaacuucggggccaucuccagcgugcugaacgacauccugagccggcucgacaaggucgaggccgaggugcagaucgaccgccugaucaccggccggcugcagucccuccagaccuacgugacccagcagcugauccgcgcggccgagauccgggccagcgccaaccuggccgcgaucaagauguccgagugcguccucggccagagcaagcgcguggacuucugcgggaagggcuaccaccugauguccuucccccagagcgcgccccacgggguggucuuccugcacgugaccuacgucccggcccaggagaagaacuucacgaccgcccccgccaucugccacgacggcaaggcccacuucccccgggaggggguguucguguccaacggcacccacugguucgucacccagcgcaacuucuacgagccccagaucaucacgaccgacaacaccuucgugagcggcaacugcgacguggucaucgggaucgugaacaacaccguguacgacccgcuccagcccgagcuggacuccuucaaggaggagcuggacaaguacuucaagaaccacacgagccccgacgucgaccucggcgacaucuccgggaucaacgccagcguggugaacauccagaaggagaucgaccggcugaacgaggucgccaagaaccugaacgagucccucaucgaccugcaggagcugggcaaguacgagcaguacaucaaguggcccugguacaucuggcucggcuucaucgccgggcugaucgcgaucgugauggugaccaucaugcugugcugcaugaccagcugcugcuccugccucaagggcugcugcagcugcggguccugcugcaaguucgacgaggacgacagcgagccgguccugaagggcgugaagcugcacuacaccugaggacuagucccuguucccagagcccacuuuuuuuucuuuuuuugaaauaaaauagccugucuuucagaucuaaaaaaaaaaaaaaaaaaaaaaaaaaaaaaaaaaaaaaaaaaaaaaaaaaaaaaaaaaaaaaaaaaaaaaaaaaaaaaaaaaaaaaaaaaaaaaaaaaaa

SEQ ID NO: 24764 - RNA, 4070 nt, Artificial Sequence
  SARS-CoV-2/Wuhan/WIV05/2019__EPI_ISL_402128 spike protein mRNA gc (1-1273)(S13I_W152C_L452R_D614G)
aggagagucccgcagucggcguccagcggcucugcuuguucgugugugugucguugcaggccuuauucaagcuuaccauguucguguuccugguccuccugccccuggugagcauccagugcgugaaccucaccacccgcacgcagcugccgcccgccuacaccaacuccuucacccggggcgucuacuaccccgacaagguguuccgcagcuccgugcugcacagcacccaggaccucuuccugcccuucuucuccaacgucacgugguuccacgccauccacgugagcgggaccaacggcaccaagcgguucgacaacccggugcugcccuucaacgacggggucuacuucgcguccaccgagaaguccaacaucauccgcggcuggaucuucgggacgacccucgacagcaagacccagagccugcugaucgugaacaacgccaccaacguggucaucaaggugugcgaguuccaguucugcaacgaccccuuccucggcguguacuaccacaagaacaacaaguccugcauggagagcgaguuccgggucuacuccagcgccaacaacugcacguucgaguacgugucccagcccuuccugauggaccuggagggcaagcaggggaacuucaagaaccuccgcgaguucguguucaagaacaucgacggcuacuucaagaucuacagcaagcacaccccgaucaaccugguccgggaccugccccagggguucuccgcccucgagccccugguggaccugcccaucggcaucaacaucacccgcuuccagacccuccuggcccugcaccggagcuaccucacgccgggggacuccagcagcggcuggaccgcgggcgccgccgccuacuacgugggguaccugcagccccgcaccuuccugcucaaguacaacgagaacggcaccaucacggacgcggucgacugcgcccuggacccccuguccgagaccaagugcacccucaagagcuucaccguggagaaggggaucuaccagacguccaacuuccgggugcagcccaccgagagcaucguccgcuucccgaacaucaccaaccugugccccuucggcgagguguucaacgccacccgguucgccuccgucuacgccuggaaccgcaagcggaucagcaacugcguggcggacuacuccgugcuguacaacagcgccuccuucagcacguucaagugcuacggcgucucccccaccaagcucaacgaccugugcuucaccaacguguacgccgacagcuucgugauccgcggggacgagguccggcagaucgcccccggccagaccgggaagaucgccgacuacaacuacaagcugccggacgacuucacgggcugcgugaucgcguggaacuccaacaaccucgacagcaaggucgggggcaacuacaacuaccgcuaccggcuguuccgcaaguccaaccugaagcccuucgagcgggacaucagcaccgagaucuaccaggccggcuccacccccugcaacgggguggagggcuucaacugcuacuucccccuccagagcuacggguuccagccgaccaacggcgugggguaccagcccuaccgcguggucgugcuguccuucgagcugcuccacgcccccgccacggugugcggccccaagaaguccaccaaccuggucaagaacaagugcgugaacuucaacuucaacggccugaccgggaccggcgugcucaccgagagcaacaagaaguuccugccguuccagcaguucgggcgcgacaucgccgacacgaccgacgcgguccgggacccccagacccuggagauccuggacaucacccccugcagcuucggcggggugagcgugaucacgccgggcaccaacaccuccaaccaggucgccgugcucuaccagggcgugaacugcaccgagguccccguggccauccacgccgaccagcugacgcccaccuggcgcguguacagcaccggguccaacgucuuccagacccgggccggcugccugaucggggcggagcacgugaacaacagcuacgagugcgacauccccaucggcgccggcaucugcgccuccuaccagacgcagaccaacagcccgcgccgggcccgcuccguggcgagccaguccaucaucgccuacaccaugagccucggggccgagaacuccgucgccuacagcaacaacuccaucgccauccccaccaacuucacgaucagcgugaccaccgagauccugcccguguccaugaccaagacgagcgucgacugcaccauguacaucugcggcgacagcaccgagugcuccaaccugcuccugcaguacgggagcuucugcacccagcugaaccgggcgcucacgggcaucgccguggagcaggacaagaacacccaggagguguucgcccaggucaagcagaucuacaagacgcccccgaucaaggacuucgggggcuucaacuucucccagauccugcccgaccccagcaagcccuccaagcgcagcuucaucgaggaccuccuguucaacaaggugacccuggccgacgccggcuucaucaagcaguacggggacugccugggcgacaucgcggcccgggaccucaucugcgcccagaaguucaacgggcugaccgugcugccgccccuccugaccgacgagaugaucgcccaguacaccuccgcccugcucgcgggcaccaucacgagcggguggaccuucggcgccggcgccgcccugcagauccccuucgcgaugcagauggccuaccgcuucaacgggaucggcgucacccagaacgugcuguacgagaaccagaagcucaucgccaaccaguucaacuccgccaucgggaagauccaggacagccuguccagcaccgccuccgcgcugggcaagcuccaggacguggucaaccagaacgcccaggcccugaacacgcuggugaagcagcucagcuccaacuucggggccaucagcuccgugcugaacgacauccugagccggcucgacaaggucgaggccgaggugcagaucgaccgccugaucaccggccggcugcagucccuccagaccuacgugacccagcagcugauccgcgcggccgagauccgggccagcgccaaccuggccgcgaccaagaugagcgagugcguccucggccaguccaagcgcguggacuucugcgggaagggcuaccaccugaugagcuucccccaguccgccccgcacgggguggucuuccugcacgugacguacguccccgcccaggagaagaacuucaccaccgcccccgcgaucugccacgacggcaaggcccacuucccccgggaggggguguucgugagcaacggcacccacugguucgucacgcagcgcaacuucuacgagccgcagaucaucaccaccgacaacaccuucguguccggcaacugcgacguggucaucgggaucgugaacaacacgguguacgacccccuccagcccgagcuggacagcuucaaggaggagcuggacaaguacuucaagaaccacaccucccccgacgucgaccucggcgacaucagcgggaucaacgccuccguggugaacauccagaaggagaucgaccggcugaacgaggucgccaagaaccugaacgagagccucaucgaccugcaggagcugggcaaguacgagcaguacaucaaguggccgugguacaucuggcucggcuucaucgccgggcugaucgcgaucgugauggugaccaucaugcugugcugcaugaccuccugcugcagcugccucaagggcugcugcuccugcgggagcugcugcaaguucgacgaggacgacuccgagcccguccugaagggcgugaagcugcacuacacgugaggacuagucccuguucccagagcccacuuuuuuuucuuuuuuugaaauaaaauagccugucuuucagaucuaaaaaaaaaaaaaaaaaaaaaaaaaaaaaaaaaaaaaaaaaaaaaaaaaaaaaaaaaaaaaaaaaaaaaaaaaaaaaaaaaaaaaaaaaaaaaaaaaaaa

SEQ ID NO: 24765 - RNA, 4070 nt, Artificial Sequence
  SARS-CoV-2/Wuhan/WIV05/2019__EPI_ISL_402128 spike protein mRNA gc (1-1273)
aggagagucccgcagucggcguccagcggcucugcuuguucgugugugugucguugcaggccuuauucaagcuuaccauguucguguuccuggugcugcugccccuggugagcagccagugcgugaaccugaccacccggacccagcugccaccagccuacaccaacagcuucacccggggcgucuacuaccccgacaagguguuccggagcagcguccugcacagcacccaggaccuguuccugcccuucuucagcaacgugaccugguuccacgccauccacgugagcggcaccaacggcaccaagcgguucgacaaccccgugcugcccuucaacgacggcguguacuucgccagcaccgagaagagcaacaucauccggggcuggaucuucggcaccacccuggacagcaagacccagagccugcugaucgugaauaacgccaccaacguggugaucaaggugugcgaguuccaguucugcaacgaccccuuccugggcguguacuaccacaagaacaacaagagcuggauggagagcgaguuccggguguacagcagcgccaacaacugcaccuucgaguacgugagccagcccuuccugauggaccuggagggcaagcagggcaacuucaagaaccugcgggaguucguguucaagaacaucgacggcuacuucaagaucuacagcaagcacaccccaaucaaccuggugcgggaucugccccagggcuucucagcccuggagccccugguggaccugcccaucggcaucaacaucacccgguuccagacccugcuggcccugcaccggagcuaccugaccccaggcgacagcagcagcggguggacagcaggcgcggcugcuuacuacgugggcuaccugcagccccggaccuuccugcugaaguacaacgagaacggcaccaucaccgacgccguggacugcgcccuggacccucugagcgagaccaagugcacccugaagagcuucaccguggagaagggcaucuaccagaccagcaacuuccgggugcagcccaccgagagcaucgugcgguuccccaacaucaccaaccugugccccuucggcgagguguucaacgccacccgguucgccagcguguacgccuggaaccggaagcggaucagcaacugcguggccgacuacagcgugcuguacaacagcgccagcuucagcaccuucaagugcuacggcgugagccccaccaagcugaacgaccugugcuucaccaacguguacgccgacagcuucgugauccguggcgacgaggugcggcagaucgcacccggccagacaggcaagaucgccgacuacaacuacaagcugcccgacgacuucaccggcugcgugaucgccuggaacagcaacaaccucgacagcaaggugggcggcaacuacaacuaccuguaccggcuguuccggaagagcaaccugaagcccuucgagcgggacaucagcaccgagaucuaccaagccggcuccaccccuugcaacggcguggagggcuucaacugcuacuucccucugcagagcuacggcuuccagcccaccaacggcgugggcuaccagcccuaccgggugguggugcugagcuucgagcugcugcacgccccagccaccguguguggccccaagaagagcaccaaccuggugaagaacaagugcgugaacuucaacuucaacggccuuaccggcaccggcgugcugaccgagagcaacaagaaauuccugcccuuucagcaguucggccgggacaucgccgacaccaccgacgcugugcgggauccccagacccuggagauccuggacaucaccccuugcagcuucggcggcgugagcgugaucaccccaggcaccaacaccagcaaccagguggccgugcuguaccaggacgugaacugcaccgaggugcccguggccauccacgccgaccagcugacacccaccuggcgggucuacagcaccggcagcaacguguuccagacccgggccgguugccugaucggcgccgagcacgugaacaacagcuacgagugcgacauccccaucggcgccggcaucugugccagcuaccagacccagaccaauucaccccggagggcaaggagcguggccagccagagcaucaucgccuacaccaugagccugggcgccgagaacagcguggccuacagcaacaacagcaucgccauccccaccaacuucaccaucagcgugaccaccgagauucugcccgugagcaugaccaagaccagcguggacugcaccauguacaucugcggcgacagcaccgagugcagcaaccugcugcugcaguacggcagcuucugcacccagcugaaccgggcccugaccggcaucgccguggagcaggacaagaacacccaggagguguucgcccaggugaagcagaucuacaagaccccucccaucaaggacuucggcggcuucaacuucagccagauccugcccgaccccagcaagcccagcaagcggagcuucaucgaggaccugcuguucaacaaggugacccuagccgacgccggcuucaucaagcaguacggcgacugccucggcgacauagccgcccgggaccugaucugcgcccagaaguucaacggccugaccgugcugccuccccugcugaccgacgagaugaucgcccaguacaccagcgcccuguuagccggaaccaucaccagcggcuggacuuucggcgcuggagccgcucugcagauccccuucgccaugcagauggccuaccgguucaacggcaucggcgugacccagaacgugcuguacgagaaccagaagcugaucgccaaccaguucaacagcgccaucggcaagauccaggacagccugagcagcaccgcuagcgcccugggcaagcugcaggacguggugaaccagaacgcccaggcccugaacacccuggugaagcagcugagcagcaacuucggcgccaucagcagcgugcugaacgacauccugagccggcuggacaaggucgaggccgaggugcagaucgaccggcugaucacuggccggcugcagagccugcagaccuacgugacccagcagcugauccgggccgccgagauucgggccagcgccaaccuggccgccaccaagaugagcgagugcgugcugggccagagcaagcggguggacuucugcggcaagggcuaccaccugaugagcuuuccccagagcgcaccccacggagugguguuccugcacgugaccuacgugcccgcccaggagaagaacuucaccaccgccccagccaucugccacgacggcaaggcccacuuuccccgggagggcguguucgugagcaacggcacccacugguucgugacccagcggaacuucuacgagccccagaucaucaccaccgacaacaccuucgugagcggcaacugcgacguggugaucggcaucgugaacaacaccguguacgauccccugcagcccgagcuggacagcuucaaggaggagcuggacaaguacuucaagaaucacaccagccccgacguggaccugggcgacaucagcggcaucaacgccagcguggugaacauccagaaggagaucgaucggcugaacgagguggccaagaaccugaacgagagccugaucgaccugcaggagcugggcaaguacgagcaguacaucaaguggcccugguacaucuggcugggcuucaucgccggccugaucgccaucgugauggugaccaucaugcugugcugcaugaccagcugcugcagcugccugaagggcuguugcagcugcggcagcugcugcaaguucgacgaggacgacagcgagcccgugcugaagggcgugaagcugcacuacaccugaggacuagucccuguucccagagcccacuuuuuuuucuuuuuuugaaauaaaauagccugucuuucagaucuaaaaaaaaaaaaaaaaaaaaaaaaaaaaaaaaaaaaaaaaaaaaaaaaaaaaaaaaaaaaaaaaaaaaaaaaaaaaaaaaaaaaaaaaaaaaaaaaaaaa

SEQ ID NO: 24766 - RNA, 4070 nt, Artificial Sequence
  SARS-CoV-2/Wuhan/WIV05/2019__EPI_ISL_402128 spike protein mRNA gc (1-1273)(D614G)
aggagagucccgcagucggcguccagcggcucugcuuguucgugugugugucguugcaggccuuauucaagcuuaccauguucguguuccuggugcugcugccccuggugagcagccagugcgugaaccugaccacccggacccagcugccaccagccuacaccaacagcuucacccggggcgucuacuaccccgacaagguguuccggagcagcguccugcacagcacccaggaccuguuccugcccuucuucagcaacgugaccugguuccacgccauccacgugagcggcaccaacggcaccaagcgguucgacaaccccgugcugcccuucaacgacggcguguacuucgccagcaccgagaagagcaacaucauccggggcuggaucuucggcaccacccuggacagcaagacccagagccugcugaucgugaauaacgccaccaacguggugaucaaggugugcgaguuccaguucugcaacgaccccuuccugggcguguacuaccacaagaacaacaagagcuggauggagagcgaguuccggguguacagcagcgccaacaacugcaccuucgaguacgugagccagcccuuccugauggaccuggagggcaagcagggcaacuucaagaaccugcgggaguucguguucaagaacaucgacggcuacuucaagaucuacagcaagcacaccccaaucaaccuggugcgggaucugccccagggcuucucagcccuggagccccugguggaccugcccaucggcaucaacaucacccgguuccagacccugcuggcccugcaccggagcuaccugaccccaggcgacagcagcagcggguggacagcaggcgcggcugcuuacuacgugggcuaccugcagccccggaccuuccugcugaaguacaacgagaacggcaccaucaccgacgccguggacugcgcccuggacccucugagcgagaccaagugcacccugaagagcuucaccguggagaagggcaucuaccagaccagcaacuuccgggugcagcccaccgagagcaucgugcgguuccccaacaucaccaaccugugccccuucggcgagguguucaacgccacccgguucgccagcguguacgccuggaaccggaagcggaucagcaacugcguggccgacuacagcgugcuguacaacagcgccagcuucagcaccuucaagugcuacggcgugagccccaccaagcugaacgaccugugcuucaccaacguguacgccgacagcuucgugauccguggcgacgaggugcggcagaucgcacccggccagacaggcaagaucgccgacuacaacuacaagcugcccgacgacuucaccggcugcgugaucgccuggaacagcaacaaccucgacagcaaggugggcggcaacuacaacuaccuguaccggcuguuccggaagagcaaccugaagcccuucgagcgggacaucagcaccgagaucuaccaagccggcuccaccccuugcaacggcguggagggcuucaacugcuacuucccucugcagagcuacggcuuccagcccaccaacggcgugggcuaccagcccuaccgggugguggugcugagcuucgagcugcugcacgccccagccaccguguguggccccaagaagagcaccaaccuggugaagaacaagugcgugaacuucaacuucaacggccuuaccggcaccggcgugcugaccgagagcaacaagaaauuccugcccuuucagcaguucggccgggacaucgccgacaccaccgacgcugugcgggauccccagacccuggagauccuggacaucaccccuugcagcuucggcggcgugagcgugaucaccccaggcaccaacaccagcaaccagguggccgugcuguaccagggcgugaacugcaccgaggugcccguggccauccacgccgaccagcugacacccaccuggcgggucuacagcaccggcagcaacguguuccagacccgggccgguugccugaucggcgccgagcacgugaacaacagcuacgagugcgacauccccaucggcgccggcaucugugccagcuaccagacccagaccaauucaccccggagggcaaggagcguggccagccagagcaucaucgccuacaccaugagccugggcgccgagaacagcguggccuacagcaacaacagcaucgccauccccaccaacuucaccaucagcgugaccaccgagauucugcccgugagcaugaccaagaccagcguggacugcaccauguacaucugcggcgacagcaccgagugcagcaaccugcugcugcaguacggcagcuucugcacccagcugaaccgggcccugaccggcaucgccguggagcaggacaagaacacccaggagguguucgcccaggugaagcagaucuacaagaccccucccaucaaggacuucggcggcuucaacuucagccagauccugcccgaccccagcaagcccagcaagcggagcuucaucgaggaccugcuguucaacaaggugacccuagccgacgccggcuucaucaagcaguacggcgacugccucggcgacauagccgcccgggaccugaucugcgcccagaaguucaacggccugaccgugcugccuccccugcugaccgacgagaugaucgcccaguacaccagcgcccuguuagccggaaccaucaccagcggcuggacuuucggcgcuggagccgcucugcagauccccuucgccaugcagauggccuaccgguucaacggcaucggcgugacccagaacgugcuguacgagaaccagaagcugaucgccaaccaguucaacagcgccaucggcaagauccaggacagccugagcagcaccgcuagcgcccugggcaagcugcaggacguggugaaccagaacgcccaggcccugaacacccuggugaagcagcugagcagcaacuucggcgccaucagcagcgugcugaacgacauccugagccggcuggacaaggucgaggccgaggugcagaucgaccggcugaucacuggccggcugcagagccugcagaccuacgugacccagcagcugauccgggccgccgagauucgggccagcgccaaccuggccgccaccaagaugagcgagugcgugcugggccagagcaagcggguggacuucugcggcaagggcuaccaccugaugagcuuuccccagagcgcaccccacggagugguguuccugcacgugaccuacgugcccgcccaggagaagaacuucaccaccgccccagccaucugccacgacggcaaggcccacuuuccccgggagggcguguucgugagcaacggcacccacugguucgugacccagcggaacuucuacgagccccagaucaucaccaccgacaacaccuucgugagcggcaacugcgacguggugaucggcaucgugaacaacaccguguacgauccccugcagcccgagcuggacagcuucaaggaggagcuggacaaguacuucaagaaucacaccagccccgacguggaccugggcgacaucagcggcaucaacgccagcguggugaacauccagaaggagaucgaucggcugaacgagguggccaagaaccugaacgagagccugaucgaccugcaggagcugggcaaguacgagcaguacaucaaguggcccugguacaucuggcugggcuucaucgccggccugaucgccaucgugauggugaccaucaugcugugcugcaugaccagcugcugcagcugccugaagggcuguugcagcugcggcagcugcugcaaguucgacgaggacgacagcgagcccgugcugaagggcgugaagcugcacuacaccugaggacuagucccuguucccagagcccacuuuuuuuucuuuuuuugaaauaaaauagccugucuuucagaucuaaaaaaaaaaaaaaaaaaaaaaaaaaaaaaaaaaaaaaaaaaaaaaaaaaaaaaaaaaaaaaaaaaaaaaaaaaaaaaaaaaaaaaaaaaaaaaaaaaaa

SEQ ID NO: 24767 - RNA, 4070 nt, Artificial Sequence
  SARS-CoV-2/Wuhan/WIV05/2019__EPI_ISL_402128 spike protein mRNA gc (1-1273)(A222V_D614G)
aggagagucccgcagucggcguccagcggcucugcuuguucgugugugugucguugcaggccuuauucaagcuuaccauguucguguuccuggugcugcugccccuggugagcagccagugcgugaaccugaccacccggacccagcugccaccagccuacaccaacagcuucacccggggcgucuacuaccccgacaagguguuccggagcagcguccugcacagcacccaggaccuguuccugcccuucuucagcaacgugaccugguuccacgccauccacgugagcggcaccaacggcaccaagcgguucgacaaccccgugcugcccuucaacgacggcguguacuucgccagcaccgagaagagcaacaucauccggggcuggaucuucggcaccacccuggacagcaagacccagagccugcugaucgugaauaacgccaccaacguggugaucaaggugugcgaguuccaguucugcaacgaccccuuccugggcguguacuaccacaagaacaacaagagcuggauggagagcgaguuccggguguacagcagcgccaacaacugcaccuucgaguacgugagccagcccuuccugauggaccuggagggcaagcagggcaacuucaagaaccugcgggaguucguguucaagaacaucgacggcuacuucaagaucuacagcaagcacaccccaaucaaccuggugcgggaucugccccagggcuucucagugcuggagccccugguggaccugcccaucggcaucaacaucacccgguuccagacccugcuggcccugcaccggagcuaccugaccccaggcgacagcagcagcggguggacagcaggcgcggcugcuuacuacgugggcuaccugcagccccggaccuuccugcugaaguacaacgagaacggcaccaucaccgacgccguggacugcgcccuggacccucugagcgagaccaagugcacccugaagagcuucaccguggagaagggcaucuaccagaccagcaacuuccgggugcagcccaccgagagcaucgugcgguuccccaacaucaccaaccugugccccuucggcgagguguucaacgccacccgguucgccagcguguacgccuggaaccggaagcggaucagcaacugcguggccgacuacagcgugcuguacaacagcgccagcuucagcaccuucaagugcuacggcgugagccccaccaagcugaacgaccugugcuucaccaacguguacgccgacagcuucgugauccguggcgacgaggugcggcagaucgcacccggccagacaggcaagaucgccgacuacaacuacaagcugcccgacgacuucaccggcugcgugaucgccuggaacagcaacaaccucgacagcaaggugggcggcaacuacaacuaccuguaccggcuguuccggaagagcaaccugaagcccuucgagcgggacaucagcaccgagaucuaccaagccggcuccaccccuugcaacggcguggagggcuucaacugcuacuucccucugcagagcuacggcuuccagcccaccaacggcgugggcuaccagcccuaccgggugguggugcugagcuucgagcugcugcacgccccagccaccguguguggccccaagaagagcaccaaccuggugaagaacaagugcgugaacuucaacuucaacggccuuaccggcaccggcgugcugaccgagagcaacaagaaauuccugcccuuucagcaguucggccgggacaucgccgacaccaccgacgcugugcgggauccccagacccuggagauccuggacaucaccccuugcagcuucggcggcgugagcgugaucaccccaggcaccaacaccagcaaccagguggccgugcuguaccagggcgugaacugcaccgaggugcccguggccauccacgccgaccagcugacacccaccuggcgggucuacagcaccggcagcaacguguuccagacccgggccgguugccugaucggcgccgagcacgugaacaacagcuacgagugcgacauccccaucggcgccggcaucugugccagcuaccagacccagaccaauucaccccggagggcaaggagcguggccagccagagcaucaucgccuacaccaugagccugggcgccgagaacagcguggccuacagcaacaacagcaucgccauccccaccaacuucaccaucagcgugaccaccgagauucugcccgugagcaugaccaagaccagcguggacugcaccauguacaucugcggcgacagcaccgagugcagcaaccugcugcugcaguacggcagcuucugcacccagcugaaccgggcccugaccggcaucgccguggagcaggacaagaacacccaggagguguucgcccaggugaagcagaucuacaagaccccucccaucaaggacuucggcggcuucaacuucagccagauccugcccgaccccagcaagcccagcaagcggagcuucaucgaggaccugcuguucaacaaggugacccuagccgacgccggcuucaucaagcaguacggcgacugccucggcgacauagccgcccgggaccugaucugcgcccagaaguucaacggccugaccgugcugccuccccugcugaccgacgagaugaucgcccaguacaccagcgcccuguuagccggaaccaucaccagcggcuggacuuucggcgcuggagccgcucugcagauccccuucgccaugcagauggccuaccgguucaacggcaucggcgugacccagaacgugcuguacgagaaccagaagcugaucgccaaccaguucaacagcgccaucggcaagauccaggacagccugagcagcaccgcuagcgcccugggcaagcugcaggacguggugaaccagaacgcccaggcccugaacacccuggugaagcagcugagcagcaacuucggcgccaucagcagcgugcugaacgacauccugagccggcuggacaaggucgaggccgaggugcagaucgaccggcugaucacuggccggcugcagagccugcagaccuacgugacccagcagcugauccgggccgccgagauucgggccagcgccaaccuggccgccaccaagaugagcgagugcgugcugggccagagcaagcggguggacuucugcggcaagggcuaccaccugaugagcuuuccccagagcgcaccccacggagugguguuccugcacgugaccuacgugcccgcccaggagaagaacuucaccaccgccccagccaucugccacgacggcaaggcccacuuuccccgggagggcguguucgugagcaacggcacccacugguucgugacccagcggaacuucuacgagccccagaucaucaccaccgacaacaccuucgugagcggcaacugcgacguggugaucggcaucgugaacaacaccguguacgauccccugcagcccgagcuggacagcuucaaggaggagcuggacaaguacuucaagaaucacaccagccccgacguggaccugggcgacaucagcggcaucaacgccagcguggugaacauccagaaggagaucgaucggcugaacgagguggccaagaaccugaacgagagccugaucgaccugcaggagcugggcaaguacgagcaguacaucaaguggcccugguacaucuggcugggcuucaucgccggccugaucgccaucgugauggugaccaucaugcugugcugcaugaccagcugcugcagcugccugaagggcuguugcagcugcggcagcugcugcaaguucgacgaggacgacagcgagcccgugcugaagggcgugaagcugcacuacaccugaggacuagucccuguucccagagcccacuuuuuuuucuuuuuuugaaauaaaauagccugucuuucagaucuaaaaaaaaaaaaaaaaaaaaaaaaaaaaaaaaaaaaaaaaaaaaaaaaaaaaaaaaaaaaaaaaaaaaaaaaaaaaaaaaaaaaaaaaaaaaaaaaaaaa

SEQ ID NO: 24768 - RNA, 4070 nt, Artificial Sequence
  SARS-CoV-2/Wuhan/WIV05/2019__EPI_ISL_402128 spike protein mRNA gc (1-1273)(N439K_D614G)
aggagagucccgcagucggcguccagcggcucugcuuguucgugugugugucguugcaggccuuauucaagcuuaccauguucguguuccuggugcugcugccccuggugagcagccagugcgugaaccugaccacccggacccagcugccaccagccuacaccaacagcuucacccggggcgucuacuaccccgacaagguguuccggagcagcguccugcacagcacccaggaccuguuccugcccuucuucagcaacgugaccugguuccacgccauccacgugagcggcaccaacggcaccaagcgguucgacaaccccgugcugcccuucaacgacggcguguacuucgccagcaccgagaagagcaacaucauccggggcuggaucuucggcaccacccuggacagcaagacccagagccugcugaucgugaauaacgccaccaacguggugaucaaggugugcgaguuccaguucugcaacgaccccuuccugggcguguacuaccacaagaacaacaagagcuggauggagagcgaguuccggguguacagcagcgccaacaacugcaccuucgaguacgugagccagcccuuccugauggaccuggagggcaagcagggcaacuucaagaaccugcgggaguucguguucaagaacaucgacggcuacuucaagaucuacagcaagcacaccccaaucaaccuggugcgggaucugccccagggcuucucagcccuggagccccugguggaccugcccaucggcaucaacaucacccgguuccagacccugcuggcccugcaccggagcuaccugaccccaggcgacagcagcagcggguggacagcaggcgcggcugcuuacuacgugggcuaccugcagccccggaccuuccugcugaaguacaacgagaacggcaccaucaccgacgccguggacugcgcccuggacccucugagcgagaccaagugcacccugaagagcuucaccguggagaagggcaucuaccagaccagcaacuuccgggugcagcccaccgagagcaucgugcgguuccccaacaucaccaaccugugccccuucggcgagguguucaacgccacccgguucgccagcguguacgccuggaaccggaagcggaucagcaacugcguggccgacuacagcgugcuguacaacagcgccagcuucagcaccuucaagugcuacggcgugagccccaccaagcugaacgaccugugcuucaccaacguguacgccgacagcuucgugauccguggcgacgaggugcggcagaucgcacccggccagacaggcaagaucgccgacuacaacuacaagcugcccgacgacuucaccggcugcgugaucgccuggaacagcaagaaccucgacagcaaggugggcggcaacuacaacuaccuguaccggcuguuccggaagagcaaccugaagcccuucgagcgggacaucagcaccgagaucuaccaagccggcuccaccccuugcaacggcguggagggcuucaacugcuacuucccucugcagagcuacggcuuccagcccaccaacggcgugggcuaccagcccuaccgggugguggugcugagcuucgagcugcugcacgccccagccaccguguguggccccaagaagagcaccaaccuggugaagaacaagugcgugaacuucaacuucaacggccuuaccggcaccggcgugcugaccgagagcaacaagaaauuccugcccuuucagcaguucggccgggacaucgccgacaccaccgacgcugugcgggauccccagacccuggagauccuggacaucaccccuugcagcuucggcggcgugagcgugaucaccccaggcaccaacaccagcaaccagguggccgugcuguaccagggcgugaacugcaccgaggugcccguggccauccacgccgaccagcugacacccaccuggcgggucuacagcaccggcagcaacguguuccagacccgggccgguugccugaucggcgccgagcacgugaacaacagcuacgagugcgacauccccaucggcgccggcaucugugccagcuaccagacccagaccaauucaccccggagggcaaggagcguggccagccagagcaucaucgccuacaccaugagccugggcgccgagaacagcguggccuacagcaacaacagcaucgccauccccaccaacuucaccaucagcgugaccaccgagauucugcccgugagcaugaccaagaccagcguggacugcaccauguacaucugcggcgacagcaccgagugcagcaaccugcugcugcaguacggcagcuucugcacccagcugaaccgggcccugaccggcaucgccguggagcaggacaagaacacccaggagguguucgcccaggugaagcagaucuacaagaccccucccaucaaggacuucggcggcuucaacuucagccagauccugcccgaccccagcaagcccagcaagcggagcuucaucgaggaccugcuguucaacaaggugacccuagccgacgccggcuucaucaagcaguacggcgacugccucggcgacauagccgcccgggaccugaucugcgcccagaaguucaacggccugaccgugcugccuccccugcugaccgacgagaugaucgcccaguacaccagcgcccuguuagccggaaccaucaccagcggcuggacuuucggcgcuggagccgcucugcagauccccuucgccaugcagauggccuaccgguucaacggcaucggcgugacccagaacgugcuguacgagaaccagaagcugaucgccaaccaguucaacagcgccaucggcaagauccaggacagccugagcagcaccgcuagcgcccugggcaagcugcaggacguggugaaccagaacgcccaggcccugaacacccuggugaagcagcugagcagcaacuucggcgccaucagcagcgugcugaacgacauccugagccggcuggacaaggucgaggccgaggugcagaucgaccggcugaucacuggccggcugcagagccugcagaccuacgugacccagcagcugauccgggccgccgagauucgggccagcgccaaccuggccgccaccaagaugagcgagugcgugcugggccagagcaagcggguggacuucugcggcaagggcuaccaccugaugagcuuuccccagagcgcaccccacggagugguguuccugcacgugaccuacgugcccgcccaggagaagaacuucaccaccgccccagccaucugccacgacggcaaggcccacuuuccccgggagggcguguucgugagcaacggcacccacugguucgugacccagcggaacuucuacgagccccagaucaucaccaccgacaacaccuucgugagcggcaacugcgacguggugaucggcaucgugaacaacaccguguacgauccccugcagcccgagcuggacagcuucaaggaggagcuggacaaguacuucaagaaucacaccagccccgacguggaccugggcgacaucagcggcaucaacgccagcguggugaacauccagaaggagaucgaucggcugaacgagguggccaagaaccugaacgagagccugaucgaccugcaggagcugggcaaguacgagcaguacaucaaguggcccugguacaucuggcugggcuucaucgccggccugaucgccaucgugauggugaccaucaugcugugcugcaugaccagcugcugcagcugccugaagggcuguugcagcugcggcagcugcugcaaguucgacgaggacgacagcgagcccgugcugaagggcgugaagcugcacuacaccugaggacuagucccuguucccagagcccacuuuuuuuucuuuuuuugaaauaaaauagccugucuuucagaucuaaaaaaaaaaaaaaaaaaaaaaaaaaaaaaaaaaaaaaaaaaaaaaaaaaaaaaaaaaaaaaaaaaaaaaaaaaaaaaaaaaaaaaaaaaaaaaaaaaaa

SEQ ID NO: 24769 - RNA, 4070 nt, Artificial Sequence
  SARS-CoV-2/Wuhan/WIV05/2019__EPI_ISL_402128 spike protein mRNA gc (1-1273)(S477N_D614G)
aggagagucccgcagucggcguccagcggcucugcuuguucgugugugugucguugcaggccuuauucaagcuuaccauguucguguuccuggugcugcugccccuggugagcagccagugcgugaaccugaccacccggacccagcugccaccagccuacaccaacagcuucacccggggcgucuacuaccccgacaagguguuccggagcagcguccugcacagcacccaggaccuguuccugcccuucuucagcaacgugaccugguuccacgccauccacgugagcggcaccaacggcaccaagcgguucgacaaccccgugcugcccuucaacgacggcguguacuucgccagcaccgagaagagcaacaucauccggggcuggaucuucggcaccacccuggacagcaagacccagagccugcugaucgugaauaacgccaccaacguggugaucaaggugugcgaguuccaguucugcaacgaccccuuccugggcguguacuaccacaagaacaacaagagcuggauggagagcgaguuccggguguacagcagcgccaacaacugcaccuucgaguacgugagccagcccuuccugauggaccuggagggcaagcagggcaacuucaagaaccugcgggaguucguguucaagaacaucgacggcuacuucaagaucuacagcaagcacaccccaaucaaccuggugcgggaucugccccagggcuucucagcccuggagccccugguggaccugcccaucggcaucaacaucacccgguuccagacccugcuggcccugcaccggagcuaccugaccccaggcgacagcagcagcggguggacagcaggcgcggcugcuuacuacgugggcuaccugcagccccggaccuuccugcugaaguacaacgagaacggcaccaucaccgacgccguggacugcgcccuggacccucugagcgagaccaagugcacccugaagagcuucaccguggagaagggcaucuaccagaccagcaacuuccgggugcagcccaccgagagcaucgugcgguuccccaacaucaccaaccugugccccuucggcgagguguucaacgccacccgguucgccagcguguacgccuggaaccggaagcggaucagcaacugcguggccgacuacagcgugcuguacaacagcgccagcuucagcaccuucaagugcuacggcgugagccccaccaagcugaacgaccugugcuucaccaacguguacgccgacagcuucgugauccguggcgacgaggugcggcagaucgcacccggccagacaggcaagaucgccgacuacaacuacaagcugcccgacgacuucaccggcugcgugaucgccuggaacagcaacaaccucgacagcaaggugggcggcaacuacaacuaccuguaccggcuguuccggaagagcaaccugaagcccuucgagcgggacaucagcaccgagaucuaccaagccggcaacaccccuugcaacggcguggagggcuucaacugcuacuucccucugcagagcuacggcuuccagcccaccaacggcgugggcuaccagcccuaccgggugguggugcugagcuucgagcugcugcacgccccagccaccguguguggccccaagaagagcaccaaccuggugaagaacaagugcgugaacuucaacuucaacggccuuaccggcaccggcgugcugaccgagagcaacaagaaauuccugcccuuucagcaguucggccgggacaucgccgacaccaccgacgcugugcgggauccccagacccuggagauccuggacaucaccccuugcagcuucggcggcgugagcgugaucaccccaggcaccaacaccagcaaccagguggccgugcuguaccagggcgugaacugcaccgaggugcccguggccauccacgccgaccagcugacacccaccuggcgggucuacagcaccggcagcaacguguuccagacccgggccgguugccugaucggcgccgagcacgugaacaacagcuacgagugcgacauccccaucggcgccggcaucugugccagcuaccagacccagaccaauucaccccggagggcaaggagcguggccagccagagcaucaucgccuacaccaugagccugggcgccgagaacagcguggccuacagcaacaacagcaucgccauccccaccaacuucaccaucagcgugaccaccgagauucugcccgugagcaugaccaagaccagcguggacugcaccauguacaucugcggcgacagcaccgagugcagcaaccugcugcugcaguacggcagcuucugcacccagcugaaccgggcccugaccggcaucgccguggagcaggacaagaacacccaggagguguucgcccaggugaagcagaucuacaagaccccucccaucaaggacuucggcggcuucaacuucagccagauccugcccgaccccagcaagcccagcaagcggagcuucaucgaggaccugcuguucaacaaggugacccuagccgacgccggcuucaucaagcaguacggcgacugccucggcgacauagccgcccgggaccugaucugcgcccagaaguucaacggccugaccgugcugccuccccugcugaccgacgagaugaucgcccaguacaccagcgcccuguuagccggaaccaucaccagcggcuggacuuucggcgcuggagccgcucugcagauccccuucgccaugcagauggccuaccgguucaacggcaucggcgugacccagaacgugcuguacgagaaccagaagcugaucgccaaccaguucaacagcgccaucggcaagauccaggacagccugagcagcaccgcuagcgcccugggcaagcugcaggacguggugaaccagaacgcccaggcccugaacacccuggugaagcagcugagcagcaacuucggcgccaucagcagcgugcugaacgacauccugagccggcuggacaaggucgaggccgaggugcagaucgaccggcugaucacuggccggcugcagagccugcagaccuacgugacccagcagcugauccgggccgccgagauucgggccagcgccaaccuggccgccaccaagaugagcgagugcgugcugggccagagcaagcggguggacuucugcggcaagggcuaccaccugaugagcuuuccccagagcgcaccccacggagugguguuccugcacgugaccuacgugcccgcccaggagaagaacuucaccaccgccccagccaucugccacgacggcaaggcccacuuuccccgggagggcguguucgugagcaacggcacccacugguucgugacccagcggaacuucuacgagccccagaucaucaccaccgacaacaccuucgugagcggcaacugcgacguggugaucggcaucgugaacaacaccguguacgauccccugcagcccgagcuggacagcuucaaggaggagcuggacaaguacuucaagaaucacaccagccccgacguggaccugggcgacaucagcggcaucaacgccagcguggugaacauccagaaggagaucgaucggcugaacgagguggccaagaaccugaacgagagccugaucgaccugcaggagcugggcaaguacgagcaguacaucaaguggcccugguacaucuggcugggcuucaucgccggccugaucgccaucgugauggugaccaucaugcugugcugcaugaccagcugcugcagcugccugaagggcuguugcagcugcggcagcugcugcaaguucgacgaggacgacagcgagcccgugcugaagggcgugaagcugcacuacaccugaggacuagucccuguucccagagcccacuuuuuuuucuuuuuuugaaauaaaauagccugucuuucagaucuaaaaaaaaaaaaaaaaaaaaaaaaaaaaaaaaaaaaaaaaaaaaaaaaaaaaaaaaaaaaaaaaaaaaaaaaaaaaaaaaaaaaaaaaaaaaaaaaaaaa

SEQ ID NO: 24770 - RNA, 4070 nt, Artificial Sequence
  SARS-CoV-2/Wuhan/WIV05/2019__EPI_ISL_402128 spike protein mRNA gc (1-1273)(N501Y_D614G)
aggagagucccgcagucggcguccagcggcucugcuuguucgugugugugucguugcaggccuuauucaagcuuaccauguucguguuccuggugcugcugccccuggugagcagccagugcgugaaccugaccacccggacccagcugccaccagccuacaccaacagcuucacccggggcgucuacuaccccgacaagguguuccggagcagcguccugcacagcacccaggaccuguuccugcccuucuucagcaacgugaccugguuccacgccauccacgugagcggcaccaacggcaccaagcgguucgacaaccccgugcugcccuucaacgacggcguguacuucgccagcaccgagaagagcaacaucauccggggcuggaucuucggcaccacccuggacagcaagacccagagccugcugaucgugaauaacgccaccaacguggugaucaaggugugcgaguuccaguucugcaacgaccccuuccugggcguguacuaccacaagaacaacaagagcuggauggagagcgaguuccggguguacagcagcgccaacaacugcaccuucgaguacgugagccagcccuuccugauggaccuggagggcaagcagggcaacuucaagaaccugcgggaguucguguucaagaacaucgacggcuacuucaagaucuacagcaagcacaccccaaucaaccuggugcgggaucugccccagggcuucucagcccuggagccccugguggaccugcccaucggcaucaacaucacccgguuccagacccugcuggcccugcaccggagcuaccugaccccaggcgacagcagcagcggguggacagcaggcgcggcugcuuacuacgugggcuaccugcagccccggaccuuccugcugaaguacaacgagaacggcaccaucaccgacgccguggacugcgcccuggacccucugagcgagaccaagugcacccugaagagcuucaccguggagaagggcaucuaccagaccagcaacuuccgggugcagcccaccgagagcaucgugcgguuccccaacaucaccaaccugugccccuucggcgagguguucaacgccacccgguucgccagcguguacgccuggaaccggaagcggaucagcaacugcguggccgacuacagcgugcuguacaacagcgccagcuucagcaccuucaagugcuacggcgugagccccaccaagcugaacgaccugugcuucaccaacguguacgccgacagcuucgugauccguggcgacgaggugcggcagaucgcacccggccagacaggcaagaucgccgacuacaacuacaagcugcccgacgacuucaccggcugcgugaucgccuggaacagcaacaaccucgacagcaaggugggcggcaacuacaacuaccuguaccggcuguuccggaagagcaaccugaagcccuucgagcgggacaucagcaccgagaucuaccaagccggcuccaccccuugcaacggcguggagggcuucaacugcuacuucccucugcagagcuacggcuuccagcccaccuacggcgugggcuaccagcccuaccgggugguggugcugagcuucgagcugcugcacgccccagccaccguguguggccccaagaagagcaccaaccuggugaagaacaagugcgugaacuucaacuucaacggccuuaccggcaccggcgugcugaccgagagcaacaagaaauuccugcccuuucagcaguucggccgggacaucgccgacaccaccgacgcugugcgggauccccagacccuggagauccuggacaucaccccuugcagcuucggcggcgugagcgugaucaccccaggcaccaacaccagcaaccagguggccgugcuguaccagggcgugaacugcaccgaggugcccguggccauccacgccgaccagcugacacccaccuggcgggucuacagcaccggcagcaacguguuccagacccgggccgguugccugaucggcgccgagcacgugaacaacagcuacgagugcgacauccccaucggcgccggcaucugugccagcuaccagacccagaccaauucaccccggagggcaaggagcguggccagccagagcaucaucgccuacaccaugagccugggcgccgagaacagcguggccuacagcaacaacagcaucgccauccccaccaacuucaccaucagcgugaccaccgagauucugcccgugagcaugaccaagaccagcguggacugcaccauguacaucugcggcgacagcaccgagugcagcaaccugcugcugcaguacggcagcuucugcacccagcugaaccgggcccugaccggcaucgccguggagcaggacaagaacacccaggagguguucgcccaggugaagcagaucuacaagaccccucccaucaaggacuucggcggcuucaacuucagccagauccugcccgaccccagcaagcccagcaagcggagcuucaucgaggaccugcuguucaacaaggugacccuagccgacgccggcuucaucaagcaguacggcgacugccucggcgacauagccgcccgggaccugaucugcgcccagaaguucaacggccugaccgugcugccuccccugcugaccgacgagaugaucgcccaguacaccagcgcccuguuagccggaaccaucaccagcggcuggacuuucggcgcuggagccgcucugcagauccccuucgccaugcagauggccuaccgguucaacggcaucggcgugacccagaacgugcuguacgagaaccagaagcugaucgccaaccaguucaacagcgccaucggcaagauccaggacagccugagcagcaccgcuagcgcccugggcaagcugcaggacguggugaaccagaacgcccaggcccugaacacccuggugaagcagcugagcagcaacuucggcgccaucagcagcgugcugaacgacauccugagccggcuggacaaggucgaggccgaggugcagaucgaccggcugaucacuggccggcugcagagccugcagaccuacgugacccagcagcugauccgggccgccgagauucgggccagcgccaaccuggccgccaccaagaugagcgagugcgugcugggccagagcaagcggguggacuucugcggcaagggcuaccaccugaugagcuuuccccagagcgcaccccacggagugguguuccugcacgugaccuacgugcccgcccaggagaagaacuucaccaccgccccagccaucugccacgacggcaaggcccacuuuccccgggagggcguguucgugagcaacggcacccacugguucgugacccagcggaacuucuacgagccccagaucaucaccaccgacaacaccuucgugagcggcaacugcgacguggugaucggcaucgugaacaacaccguguacgauccccugcagcccgagcuggacagcuucaaggaggagcuggacaaguacuucaagaaucacaccagccccgacguggaccugggcgacaucagcggcaucaacgccagcguggugaacauccagaaggagaucgaucggcugaacgagguggccaagaaccugaacgagagccugaucgaccugcaggagcugggcaaguacgagcaguacaucaaguggcccugguacaucuggcugggcuucaucgccggccugaucgccaucgugauggugaccaucaugcugugcugcaugaccagcugcugcagcugccugaagggcuguugcagcugcggcagcugcugcaaguucgacgaggacgacagcgagcccgugcugaagggcgugaagcugcacuacaccugaggacuagucccuguucccagagcccacuuuuuuuucuuuuuuugaaauaaaauagccugucuuucagaucuaaaaaaaaaaaaaaaaaaaaaaaaaaaaaaaaaaaaaaaaaaaaaaaaaaaaaaaaaaaaaaaaaaaaaaaaaaaaaaaaaaaaaaaaaaaaaaaaaaaa

SEQ ID NO: 24771 - RNA, 4064 nt, Artificial Sequence
  SARS-CoV-2/Wuhan/WIV05/2019__EPI_ISL_402128 spike protein mRNA gc (1-1273)(H69del_V70del_D614G)
aggagagucccgcagucggcguccagcggcucugcuuguucgugugugugucguugcaggccuuauucaagcuuaccauguucguguuccuggugcugcugccccuggugagcagccagugcgugaaccugaccacccggacccagcugccaccagccuacaccaacagcuucacccggggcgucuacuaccccgacaagguguuccggagcagcguccugcacagcacccaggaccuguuccugcccuucuucagcaacgugaccugguuccacgccaucagcggcaccaacggcaccaagcgguucgacaaccccgugcugcccuucaacgacggcguguacuucgccagcaccgagaagagcaacaucauccggggcuggaucuucggcaccacccuggacagcaagacccagagccugcugaucgugaauaacgccaccaacguggugaucaaggugugcgaguuccaguucugcaacgaccccuuccugggcguguacuaccacaagaacaacaagagcuggauggagagcgaguuccggguguacagcagcgccaacaacugcaccuucgaguacgugagccagcccuuccugauggaccuggagggcaagcagggcaacuucaagaaccugcgggaguucguguucaagaacaucgacggcuacuucaagaucuacagcaagcacaccccaaucaaccuggugcgggaucugccccagggcuucucagcccuggagccccugguggaccugcccaucggcaucaacaucacccgguuccagacccugcuggcccugcaccggagcuaccugaccccaggcgacagcagcagcggguggacagcaggcgcggcugcuuacuacgugggcuaccugcagccccggaccuuccugcugaaguacaacgagaacggcaccaucaccgacgccguggacugcgcccuggacccucugagcgagaccaagugcacccugaagagcuucaccguggagaagggcaucuaccagaccagcaacuuccgggugcagcccaccgagagcaucgugcgguuccccaacaucaccaaccugugccccuucggcgagguguucaacgccacccgguucgccagcguguacgccuggaaccggaagcggaucagcaacugcguggccgacuacagcgugcuguacaacagcgccagcuucagcaccuucaagugcuacggcgugagccccaccaagcugaacgaccugugcuucaccaacguguacgccgacagcuucgugauccguggcgacgaggugcggcagaucgcacccggccagacaggcaagaucgccgacuacaacuacaagcugcccgacgacuucaccggcugcgugaucgccuggaacagcaacaaccucgacagcaaggugggcggcaacuacaacuaccuguaccggcuguuccggaagagcaaccugaagcccuucgagcgggacaucagcaccgagaucuaccaagccggcuccaccccuugcaacggcguggagggcuucaacugcuacuucccucugcagagcuacggcuuccagcccaccaacggcgugggcuaccagcccuaccgggugguggugcugagcuucgagcugcugcacgccccagccaccguguguggccccaagaagagcaccaaccuggugaagaacaagugcgugaacuucaacuucaacggccuuaccggcaccggcgugcugaccgagagcaacaagaaauuccugcccuuucagcaguucggccgggacaucgccgacaccaccgacgcugugcgggauccccagacccuggagauccuggacaucaccccuugcagcuucggcggcgugagcgugaucaccccaggcaccaacaccagcaaccagguggccgugcuguaccagggcgugaacugcaccgaggugcccguggccauccacgccgaccagcugacacccaccuggcgggucuacagcaccggcagcaacguguuccagacccgggccgguugccugaucggcgccgagcacgugaacaacagcuacgagugcgacauccccaucggcgccggcaucugugccagcuaccagacccagaccaauucaccccggagggcaaggagcguggccagccagagcaucaucgccuacaccaugagccugggcgccgagaacagcguggccuacagcaacaacagcaucgccauccccaccaacuucaccaucagcgugaccaccgagauucugcccgugagcaugaccaagaccagcguggacugcaccauguacaucugcggcgacagcaccgagugcagcaaccugcugcugcaguacggcagcuucugcacccagcugaaccgggcccugaccggcaucgccguggagcaggacaagaacacccaggagguguucgcccaggugaagcagaucuacaagaccccucccaucaaggacuucggcggcuucaacuucagccagauccugcccgaccccagcaagcccagcaagcggagcuucaucgaggaccugcuguucaacaaggugacccuagccgacgccggcuucaucaagcaguacggcgacugccucggcgacauagccgcccgggaccugaucugcgcccagaaguucaacggccugaccgugcugccuccccugcugaccgacgagaugaucgcccaguacaccagcgcccuguuagccggaaccaucaccagcggcuggacuuucggcgcuggagccgcucugcagauccccuucgccaugcagauggccuaccgguucaacggcaucggcgugacccagaacgugcuguacgagaaccagaagcugaucgccaaccaguucaacagcgccaucggcaagauccaggacagccugagcagcaccgcuagcgcccugggcaagcugcaggacguggugaaccagaacgcccaggcccugaacacccuggugaagcagcugagcagcaacuucggcgccaucagcagcgugcugaacgacauccugagccggcuggacaaggucgaggccgaggugcagaucgaccggcugaucacuggccggcugcagagccugcagaccuacgugacccagcagcugauccgggccgccgagauucgggccagcgccaaccuggccgccaccaagaugagcgagugcgugcugggccagagcaagcggguggacuucugcggcaagggcuaccaccugaugagcuuuccccagagcgcaccccacggagugguguuccugcacgugaccuacgugcccgcccaggagaagaacuucaccaccgccccagccaucugccacgacggcaaggcccacuuuccccgggagggcguguucgugagcaacggcacccacugguucgugacccagcggaacuucuacgagccccagaucaucaccaccgacaacaccuucgugagcggcaacugcgacguggugaucggcaucgugaacaacaccguguacgauccccugcagcccgagcuggacagcuucaaggaggagcuggacaaguacuucaagaaucacaccagccccgacguggaccugggcgacaucagcggcaucaacgccagcguggugaacauccagaaggagaucgaucggcugaacgagguggccaagaaccugaacgagagccugaucgaccugcaggagcugggcaaguacgagcaguacaucaaguggcccugguacaucuggcugggcuucaucgccggccugaucgccaucgugauggugaccaucaugcugugcugcaugaccagcugcugcagcugccugaagggcuguugcagcugcggcagcugcugcaaguucgacgaggacgacagcgagcccgugcugaagggcgugaagcugcacuacaccugaggacuagucccuguucccagagcccacuuuuuuuucuuuuuuugaaauaaaauagccugucuuucagaucuaaaaaaaaaaaaaaaaaaaaaaaaaaaaaaaaaaaaaaaaaaaaaaaaaaaaaaaaaaaaaaaaaaaaaaaaaaaaaaaaaaaaaaaaaaaaaaaaaaaa

SEQ ID NO: 24772 - RNA, 4070 nt, Artificial Sequence
  SARS-CoV-2/Wuhan/WIV05/2019__EPI_ISL_402128 spike protein mRNA gc (1-1273)(Y453F_D614G)
aggagagucccgcagucggcguccagcggcucugcuuguucgugugugugucguugcaggccuuauucaagcuuaccauguucguguuccuggugcugcugccccuggugagcagccagugcgugaaccugaccacccggacccagcugccaccagccuacaccaacagcuucacccggggcgucuacuaccccgacaagguguuccggagcagcguccugcacagcacccaggaccuguuccugcccuucuucagcaacgugaccugguuccacgccauccacgugagcggcaccaacggcaccaagcgguucgacaaccccgugcugcccuucaacgacggcguguacuucgccagcaccgagaagagcaacaucauccggggcuggaucuucggcaccacccuggacagcaagacccagagccugcugaucgugaauaacgccaccaacguggugaucaaggugugcgaguuccaguucugcaacgaccccuuccugggcguguacuaccacaagaacaacaagagcuggauggagagcgaguuccggguguacagcagcgccaacaacugcaccuucgaguacgugagccagcccuuccugauggaccuggagggcaagcagggcaacuucaagaaccugcgggaguucguguucaagaacaucgacggcuacuucaagaucuacagcaagcacaccccaaucaaccuggugcgggaucugccccagggcuucucagcccuggagccccugguggaccugcccaucggcaucaacaucacccgguuccagacccugcuggcccugcaccggagcuaccugaccccaggcgacagcagcagcggguggacagcaggcgcggcugcuuacuacgugggcuaccugcagccccggaccuuccugcugaaguacaacgagaacggcaccaucaccgacgccguggacugcgcccuggacccucugagcgagaccaagugcacccugaagagcuucaccguggagaagggcaucuaccagaccagcaacuuccgggugcagcccaccgagagcaucgugcgguuccccaacaucaccaaccugugccccuucggcgagguguucaacgccacccgguucgccagcguguacgccuggaaccggaagcggaucagcaacugcguggccgacuacagcgugcuguacaacagcgccagcuucagcaccuucaagugcuacggcgugagccccaccaagcugaacgaccugugcuucaccaacguguacgccgacagcuucgugauccguggcgacgaggugcggcagaucgcacccggccagacaggcaagaucgccgacuacaacuacaagcugcccgacgacuucaccggcugcgugaucgccuggaacagcaacaaccucgacagcaaggugggcggcaacuacaacuaccuguuccggcuguuccggaagagcaaccugaagcccuucgagcgggacaucagcaccgagaucuaccaagccggcuccaccccuugcaacggcguggagggcuucaacugcuacuucccucugcagagcuacggcuuccagcccaccaacggcgugggcuaccagcccuaccgggugguggugcugagcuucgagcugcugcacgccccagccaccguguguggccccaagaagagcaccaaccuggugaagaacaagugcgugaacuucaacuucaacggccuuaccggcaccggcgugcugaccgagagcaacaagaaauuccugcccuuucagcaguucggccgggacaucgccgacaccaccgacgcugugcgggauccccagacccuggagauccuggacaucaccccuugcagcuucggcggcgugagcgugaucaccccaggcaccaacaccagcaaccagguggccgugcuguaccagggcgugaacugcaccgaggugcccguggccauccacgccgaccagcugacacccaccuggcgggucuacagcaccggcagcaacguguuccagacccgggccgguugccugaucggcgccgagcacgugaacaacagcuacgagugcgacauccccaucggcgccggcaucugugccagcuaccagacccagaccaauucaccccggagggcaaggagcguggccagccagagcaucaucgccuacaccaugagccugggcgccgagaacagcguggccuacagcaacaacagcaucgccauccccaccaacuucaccaucagcgugaccaccgagauucugcccgugagcaugaccaagaccagcguggacugcaccauguacaucugcggcgacagcaccgagugcagcaaccugcugcugcaguacggcagcuucugcacccagcugaaccgggcccugaccggcaucgccguggagcaggacaagaacacccaggagguguucgcccaggugaagcagaucuacaagaccccucccaucaaggacuucggcggcuucaacuucagccagauccugcccgaccccagcaagcccagcaagcggagcuucaucgaggaccugcuguucaacaaggugacccuagccgacgccggcuucaucaagcaguacggcgacugccucggcgacauagccgcccgggaccugaucugcgcccagaaguucaacggccugaccgugcugccuccccugcugaccgacgagaugaucgcccaguacaccagcgcccuguuagccggaaccaucaccagcggcuggacuuucggcgcuggagccgcucugcagauccccuucgccaugcagauggccuaccgguucaacggcaucggcgugacccagaacgugcuguacgagaaccagaagcugaucgccaaccaguucaacagcgccaucggcaagauccaggacagccugagcagcaccgcuagcgcccugggcaagcugcaggacguggugaaccagaacgcccaggcccugaacacccuggugaagcagcugagcagcaacuucggcgccaucagcagcgugcugaacgacauccugagccggcuggacaaggucgaggccgaggugcagaucgaccggcugaucacuggccggcugcagagccugcagaccuacgugacccagcagcugauccgggccgccgagauucgggccagcgccaaccuggccgccaccaagaugagcgagugcgugcugggccagagcaagcggguggacuucugcggcaagggcuaccaccugaugagcuuuccccagagcgcaccccacggagugguguuccugcacgugaccuacgugcccgcccaggagaagaacuucaccaccgccccagccaucugccacgacggcaaggcccacuuuccccgggagggcguguucgugagcaacggcacccacugguucgugacccagcggaacuucuacgagccccagaucaucaccaccgacaacaccuucgugagcggcaacugcgacguggugaucggcaucgugaacaacaccguguacgauccccugcagcccgagcuggacagcuucaaggaggagcuggacaaguacuucaagaaucacaccagccccgacguggaccugggcgacaucagcggcaucaacgccagcguggugaacauccagaaggagaucgaucggcugaacgagguggccaagaaccugaacgagagccugaucgaccugcaggagcugggcaaguacgagcaguacaucaaguggcccugguacaucuggcugggcuucaucgccggccugaucgccaucgugauggugaccaucaugcugugcugcaugaccagcugcugcagcugccugaagggcuguugcagcugcggcagcugcugcaaguucgacgaggacgacagcgagcccgugcugaagggcgugaagcugcacuacaccugaggacuagucccuguucccagagcccacuuuuuuuucuuuuuuugaaauaaaauagccugucuuucagaucuaaaaaaaaaaaaaaaaaaaaaaaaaaaaaaaaaaaaaaaaaaaaaaaaaaaaaaaaaaaaaaaaaaaaaaaaaaaaaaaaaaaaaaaaaaaaaaaaaaaa

SEQ ID NO: 24773 - RNA, 4070 nt, Artificial Sequence
  SARS-CoV-2/Wuhan/WIV05/2019__EPI_ISL_402128 spike protein mRNA gc (1-1273)(D614G_I692V)
aggagagucccgcagucggcguccagcggcucugcuuguucgugugugugucguugcaggccuuauucaagcuuaccauguucguguuccuggugcugcugccccuggugagcagccagugcgugaaccugaccacccggacccagcugccaccagccuacaccaacagcuucacccggggcgucuacuaccccgacaagguguuccggagcagcguccugcacagcacccaggaccuguuccugcccuucuucagcaacgugaccugguuccacgccauccacgugagcggcaccaacggcaccaagcgguucgacaaccccgugcugcccuucaacgacggcguguacuucgccagcaccgagaagagcaacaucauccggggcuggaucuucggcaccacccuggacagcaagacccagagccugcugaucgugaauaacgccaccaacguggugaucaaggugugcgaguuccaguucugcaacgaccccuuccugggcguguacuaccacaagaacaacaagagcuggauggagagcgaguuccggguguacagcagcgccaacaacugcaccuucgaguacgugagccagcccuuccugauggaccuggagggcaagcagggcaacuucaagaaccugcgggaguucguguucaagaacaucgacggcuacuucaagaucuacagcaagcacaccccaaucaaccuggugcgggaucugccccagggcuucucagcccuggagccccugguggaccugcccaucggcaucaacaucacccgguuccagacccugcuggcccugcaccggagcuaccugaccccaggcgacagcagcagcggguggacagcaggcgcggcugcuuacuacgugggcuaccugcagccccggaccuuccugcugaaguacaacgagaacggcaccaucaccgacgccguggacugcgcccuggacccucugagcgagaccaagugcacccugaagagcuucaccguggagaagggcaucuaccagaccagcaacuuccgggugcagcccaccgagagcaucgugcgguuccccaacaucaccaaccugugccccuucggcgagguguucaacgccacccgguucgccagcguguacgccuggaaccggaagcggaucagcaacugcguggccgacuacagcgugcuguacaacagcgccagcuucagcaccuucaagugcuacggcgugagccccaccaagcugaacgaccugugcuucaccaacguguacgccgacagcuucgugauccguggcgacgaggugcggcagaucgcacccggccagacaggcaagaucgccgacuacaacuacaagcugcccgacgacuucaccggcugcgugaucgccuggaacagcaacaaccucgacagcaaggugggcggcaacuacaacuaccuguaccggcuguuccggaagagcaaccugaagcccuucgagcgggacaucagcaccgagaucuaccaagccggcuccaccccuugcaacggcguggagggcuucaacugcuacuucccucugcagagcuacggcuuccagcccaccaacggcgugggcuaccagcccuaccgggugguggugcugagcuucgagcugcugcacgccccagccaccguguguggccccaagaagagcaccaaccuggugaagaacaagugcgugaacuucaacuucaacggccuuaccggcaccggcgugcugaccgagagcaacaagaaauuccugcccuuucagcaguucggccgggacaucgccgacaccaccgacgcugugcgggauccccagacccuggagauccuggacaucaccccuugcagcuucggcggcgugagcgugaucaccccaggcaccaacaccagcaaccagguggccgugcuguaccagggcgugaacugcaccgaggugcccguggccauccacgccgaccagcugacacccaccuggcgggucuacagcaccggcagcaacguguuccagacccgggccgguugccugaucggcgccgagcacgugaacaacagcuacgagugcgacauccccaucggcgccggcaucugugccagcuaccagacccagaccaauucaccccggagggcaaggagcguggccagccagagcgugaucgccuacaccaugagccugggcgccgagaacagcguggccuacagcaacaacagcaucgccauccccaccaacuucaccaucagcgugaccaccgagauucugcccgugagcaugaccaagaccagcguggacugcaccauguacaucugcggcgacagcaccgagugcagcaaccugcugcugcaguacggcagcuucugcacccagcugaaccgggcccugaccggcaucgccguggagcaggacaagaacacccaggagguguucgcccaggugaagcagaucuacaagaccccucccaucaaggacuucggcggcuucaacuucagccagauccugcccgaccccagcaagcccagcaagcggagcuucaucgaggaccugcuguucaacaaggugacccuagccgacgccggcuucaucaagcaguacggcgacugccucggcgacauagccgcccgggaccugaucugcgcccagaaguucaacggccugaccgugcugccuccccugcugaccgacgagaugaucgcccaguacaccagcgcccuguuagccggaaccaucaccagcggcuggacuuucggcgcuggagccgcucugcagauccccuucgccaugcagauggccuaccgguucaacggcaucggcgugacccagaacgugcuguacgagaaccagaagcugaucgccaaccaguucaacagcgccaucggcaagauccaggacagccugagcagcaccgcuagcgcccugggcaagcugcaggacguggugaaccagaacgcccaggcccugaacacccuggugaagcagcugagcagcaacuucggcgccaucagcagcgugcugaacgacauccugagccggcuggacaaggucgaggccgaggugcagaucgaccggcugaucacuggccggcugcagagccugcagaccuacgugacccagcagcugauccgggccgccgagauucgggccagcgccaaccuggccgccaccaagaugagcgagugcgugcugggccagagcaagcggguggacuucugcggcaagggcuaccaccugaugagcuuuccccagagcgcaccccacggagugguguuccugcacgugaccuacgugcccgcccaggagaagaacuucaccaccgccccagccaucugccacgacggcaaggcccacuuuccccgggagggcguguucgugagcaacggcacccacugguucgugacccagcggaacuucuacgagccccagaucaucaccaccgacaacaccuucgugagcggcaacugcgacguggugaucggcaucgugaacaacaccguguacgauccccugcagcccgagcuggacagcuucaaggaggagcuggacaaguacuucaagaaucacaccagccccgacguggaccugggcgacaucagcggcaucaacgccagcguggugaacauccagaaggagaucgaucggcugaacgagguggccaagaaccugaacgagagccugaucgaccugcaggagcugggcaaguacgagcaguacaucaaguggcccugguacaucuggcugggcuucaucgccggccugaucgccaucgugauggugaccaucaugcugugcugcaugaccagcugcugcagcugccugaagggcuguugcagcugcggcagcugcugcaaguucgacgaggacgacagcgagcccgugcugaagggcgugaagcugcacuacaccugaggacuagucccuguucccagagcccacuuuuuuuucuuuuuuugaaauaaaauagccugucuuucagaucuaaaaaaaaaaaaaaaaaaaaaaaaaaaaaaaaaaaaaaaaaaaaaaaaaaaaaaaaaaaaaaaaaaaaaaaaaaaaaaaaaaaaaaaaaaaaaaaaaaaa

SEQ ID NO: 24774 - RNA, 4070 nt, Artificial Sequence
  SARS-CoV-2/Wuhan/WIV05/2019__EPI_ISL_402128 spike protein mRNA gc (1-1273)(D614G_M1229I)
aggagagucccgcagucggcguccagcggcucugcuuguucgugugugugucguugcaggccuuauucaagcuuaccauguucguguuccuggugcugcugccccuggugagcagccagugcgugaaccugaccacccggacccagcugccaccagccuacaccaacagcuucacccggggcgucuacuaccccgacaagguguuccggagcagcguccugcacagcacccaggaccuguuccugcccuucuucagcaacgugaccugguuccacgccauccacgugagcggcaccaacggcaccaagcgguucgacaaccccgugcugcccuucaacgacggcguguacuucgccagcaccgagaagagcaacaucauccggggcuggaucuucggcaccacccuggacagcaagacccagagccugcugaucgugaauaacgccaccaacguggugaucaaggugugcgaguuccaguucugcaacgaccccuuccugggcguguacuaccacaagaacaacaagagcuggauggagagcgaguuccggguguacagcagcgccaacaacugcaccuucgaguacgugagccagcccuuccugauggaccuggagggcaagcagggcaacuucaagaaccugcgggaguucguguucaagaacaucgacggcuacuucaagaucuacagcaagcacaccccaaucaaccuggugcgggaucugccccagggcuucucagcccuggagccccugguggaccugcccaucggcaucaacaucacccgguuccagacccugcuggcccugcaccggagcuaccugaccccaggcgacagcagcagcggguggacagcaggcgcggcugcuuacuacgugggcuaccugcagccccggaccuuccugcugaaguacaacgagaacggcaccaucaccgacgccguggacugcgcccuggacccucugagcgagaccaagugcacccugaagagcuucaccguggagaagggcaucuaccagaccagcaacuuccgggugcagcccaccgagagcaucgugcgguuccccaacaucaccaaccugugccccuucggcgagguguucaacgccacccgguucgccagcguguacgccuggaaccggaagcggaucagcaacugcguggccgacuacagcgugcuguacaacagcgccagcuucagcaccuucaagugcuacggcgugagccccaccaagcugaacgaccugugcuucaccaacguguacgccgacagcuucgugauccguggcgacgaggugcggcagaucgcacccggccagacaggcaagaucgccgacuacaacuacaagcugcccgacgacuucaccggcugcgugaucgccuggaacagcaacaaccucgacagcaaggugggcggcaacuacaacuaccuguaccggcuguuccggaagagcaaccugaagcccuucgagcgggacaucagcaccgagaucuaccaagccggcuccaccccuugcaacggcguggagggcuucaacugcuacuucccucugcagagcuacggcuuccagcccaccaacggcgugggcuaccagcccuaccgggugguggugcugagcuucgagcugcugcacgccccagccaccguguguggccccaagaagagcaccaaccuggugaagaacaagugcgugaacuucaacuucaacggccuuaccggcaccggcgugcugaccgagagcaacaagaaauuccugcccuuucagcaguucggccgggacaucgccgacaccaccgacgcugugcgggauccccagacccuggagauccuggacaucaccccuugcagcuucggcggcgugagcgugaucaccccaggcaccaacaccagcaaccagguggccgugcuguaccagggcgugaacugcaccgaggugcccguggccauccacgccgaccagcugacacccaccuggcgggucuacagcaccggcagcaacguguuccagacccgggccgguugccugaucggcgccgagcacgugaacaacagcuacgagugcgacauccccaucggcgccggcaucugugccagcuaccagacccagaccaauucaccccggagggcaaggagcguggccagccagagcaucaucgccuacaccaugagccugggcgccgagaacagcguggccuacagcaacaacagcaucgccauccccaccaacuucaccaucagcgugaccaccgagauucugcccgugagcaugaccaagaccagcguggacugcaccauguacaucugcggcgacagcaccgagugcagcaaccugcugcugcaguacggcagcuucugcacccagcugaaccgggcccugaccggcaucgccguggagcaggacaagaacacccaggagguguucgcccaggugaagcagaucuacaagaccccucccaucaaggacuucggcggcuucaacuucagccagauccugcccgaccccagcaagcccagcaagcggagcuucaucgaggaccugcuguucaacaaggugacccuagccgacgccggcuucaucaagcaguacggcgacugccucggcgacauagccgcccgggaccugaucugcgcccagaaguucaacggccugaccgugcugccuccccugcugaccgacgagaugaucgcccaguacaccagcgcccuguuagccggaaccaucaccagcggcuggacuuucggcgcuggagccgcucugcagauccccuucgccaugcagauggccuaccgguucaacggcaucggcgugacccagaacgugcuguacgagaaccagaagcugaucgccaaccaguucaacagcgccaucggcaagauccaggacagccugagcagcaccgcuagcgcccugggcaagcugcaggacguggugaaccagaacgcccaggcccugaacacccuggugaagcagcugagcagcaacuucggcgccaucagcagcgugcugaacgacauccugagccggcuggacaaggucgaggccgaggugcagaucgaccggcugaucacuggccggcugcagagccugcagaccuacgugacccagcagcugauccgggccgccgagauucgggccagcgccaaccuggccgccaccaagaugagcgagugcgugcugggccagagcaagcggguggacuucugcggcaagggcuaccaccugaugagcuuuccccagagcgcaccccacggagugguguuccugcacgugaccuacgugcccgcccaggagaagaacuucaccaccgccccagccaucugccacgacggcaaggcccacuuuccccgggagggcguguucgugagcaacggcacccacugguucgugacccagcggaacuucuacgagccccagaucaucaccaccgacaacaccuucgugagcggcaacugcgacguggugaucggcaucgugaacaacaccguguacgauccccugcagcccgagcuggacagcuucaaggaggagcuggacaaguacuucaagaaucacaccagccccgacguggaccugggcgacaucagcggcaucaacgccagcguggugaacauccagaaggagaucgaucggcugaacgagguggccaagaaccugaacgagagccugaucgaccugcaggagcugggcaaguacgagcaguacaucaaguggcccugguacaucuggcugggcuucaucgccggccugaucgccaucgugaucgugaccaucaugcugugcugcaugaccagcugcugcagcugccugaagggcuguugcagcugcggcagcugcugcaaguucgacgaggacgacagcgagcccgugcugaagggcgugaagcugcacuacaccugaggacuagucccuguucccagagcccacuuuuuuuucuuuuuuugaaauaaaauagccugucuuucagaucuaaaaaaaaaaaaaaaaaaaaaaaaaaaaaaaaaaaaaaaaaaaaaaaaaaaaaaaaaaaaaaaaaaaaaaaaaaaaaaaaaaaaaaaaaaaaaaaaaaaa

SEQ ID NO: 24775 - RNA, 4064 nt, Artificial Sequence
  SARS-CoV-2/Wuhan/WIV05/2019__EPI_ISL_402128 spike protein mRNA gc (1-1273)(H69del_V70del_A222V_Y453F_S477N_D614G_I692V)
aggagagucccgcagucggcguccagcggcucugcuuguucgugugugugucguugcaggccuuauucaagcuuaccauguucguguuccuggugcugcugccccuggugagcagccagugcgugaaccugaccacccggacccagcugccaccagccuacaccaacagcuucacccggggcgucuacuaccccgacaagguguuccggagcagcguccugcacagcacccaggaccuguuccugcccuucuucagcaacgugaccugguuccacgccaucagcggcaccaacggcaccaagcgguucgacaaccccgugcugcccuucaacgacggcguguacuucgccagcaccgagaagagcaacaucauccggggcuggaucuucggcaccacccuggacagcaagacccagagccugcugaucgugaauaacgccaccaacguggugaucaaggugugcgaguuccaguucugcaacgaccccuuccugggcguguacuaccacaagaacaacaagagcuggauggagagcgaguuccggguguacagcagcgccaacaacugcaccuucgaguacgugagccagcccuuccugauggaccuggagggcaagcagggcaacuucaagaaccugcgggaguucguguucaagaacaucgacggcuacuucaagaucuacagcaagcacaccccaaucaaccuggugcgggaucugccccagggcuucucagugcuggagccccugguggaccugcccaucggcaucaacaucacccgguuccagacccugcuggcccugcaccggagcuaccugaccccaggcgacagcagcagcggguggacagcaggcgcggcugcuuacuacgugggcuaccugcagccccggaccuuccugcugaaguacaacgagaacggcaccaucaccgacgccguggacugcgcccuggacccucugagcgagaccaagugcacccugaagagcuucaccguggagaagggcaucuaccagaccagcaacuuccgggugcagcccaccgagagcaucgugcgguuccccaacaucaccaaccugugccccuucggcgagguguucaacgccacccgguucgccagcguguacgccuggaaccggaagcggaucagcaacugcguggccgacuacagcgugcuguacaacagcgccagcuucagcaccuucaagugcuacggcgugagccccaccaagcugaacgaccugugcuucaccaacguguacgccgacagcuucgugauccguggcgacgaggugcggcagaucgcacccggccagacaggcaagaucgccgacuacaacuacaagcugcccgacgacuucaccggcugcgugaucgccuggaacagcaacaaccucgacagcaaggugggcggcaacuacaacuaccuguuccggcuguuccggaagagcaaccugaagcccuucgagcgggacaucagcaccgagaucuaccaagccggcaacaccccuugcaacggcguggagggcuucaacugcuacuucccucugcagagcuacggcuuccagcccaccaacggcgugggcuaccagcccuaccgggugguggugcugagcuucgagcugcugcacgccccagccaccguguguggccccaagaagagcaccaaccuggugaagaacaagugcgugaacuucaacuucaacggccuuaccggcaccggcgugcugaccgagagcaacaagaaauuccugcccuuucagcaguucggccgggacaucgccgacaccaccgacgcugugcgggauccccagacccuggagauccuggacaucaccccuugcagcuucggcggcgugagcgugaucaccccaggcaccaacaccagcaaccagguggccgugcuguaccagggcgugaacugcaccgaggugcccguggccauccacgccgaccagcugacacccaccuggcgggucuacagcaccggcagcaacguguuccagacccgggccgguugccugaucggcgccgagcacgugaacaacagcuacgagugcgacauccccaucggcgccggcaucugugccagcuaccagacccagaccaauucaccccggagggcaaggagcguggccagccagagcgugaucgccuacaccaugagccugggcgccgagaacagcguggccuacagcaacaacagcaucgccauccccaccaacuucaccaucagcgugaccaccgagauucugcccgugagcaugaccaagaccagcguggacugcaccauguacaucugcggcgacagcaccgagugcagcaaccugcugcugcaguacggcagcuucugcacccagcugaaccgggcccugaccggcaucgccguggagcaggacaagaacacccaggagguguucgcccaggugaagcagaucuacaagaccccucccaucaaggacuucggcggcuucaacuucagccagauccugcccgaccccagcaagcccagcaagcggagcuucaucgaggaccugcuguucaacaaggugacccuagccgacgccggcuucaucaagcaguacggcgacugccucggcgacauagccgcccgggaccugaucugcgcccagaaguucaacggccugaccgugcugccuccccugcugaccgacgagaugaucgcccaguacaccagcgcccuguuagccggaaccaucaccagcggcuggacuuucggcgcuggagccgcucugcagauccccuucgccaugcagauggccuaccgguucaacggcaucggcgugacccagaacgugcuguacgagaaccagaagcugaucgccaaccaguucaacagcgccaucggcaagauccaggacagccugagcagcaccgcuagcgcccugggcaagcugcaggacguggugaaccagaacgcccaggcccugaacacccuggugaagcagcugagcagcaacuucggcgccaucagcagcgugcugaacgacauccugagccggcuggacaaggucgaggccgaggugcagaucgaccggcugaucacuggccggcugcagagccugcagaccuacgugacccagcagcugauccgggccgccgagauucgggccagcgccaaccuggccgccaccaagaugagcgagugcgugcugggccagagcaagcggguggacuucugcggcaagggcuaccaccugaugagcuuuccccagagcgcaccccacggagugguguuccugcacgugaccuacgugcccgcccaggagaagaacuucaccaccgccccagccaucugccacgacggcaaggcccacuuuccccgggagggcguguucgugagcaacggcacccacugguucgugacccagcggaacuucuacgagccccagaucaucaccaccgacaacaccuucgugagcggcaacugcgacguggugaucggcaucgugaacaacaccguguacgauccccugcagcccgagcuggacagcuucaaggaggagcuggacaaguacuucaagaaucacaccagccccgacguggaccugggcgacaucagcggcaucaacgccagcguggugaacauccagaaggagaucgaucggcugaacgagguggccaagaaccugaacgagagccugaucgaccugcaggagcugggcaaguacgagcaguacaucaaguggcccugguacaucuggcugggcuucaucgccggccugaucgccaucgugauggugaccaucaugcugugcugcaugaccagcugcugcagcugccugaagggcuguugcagcugcggcagcugcugcaaguucgacgaggacgacagcgagcccgugcugaagggcgugaagcugcacuacaccugaggacuagucccuguucccagagcccacuuuuuuuucuuuuuuugaaauaaaauagccugucuuucagaucuaaaaaaaaaaaaaaaaaaaaaaaaaaaaaaaaaaaaaaaaaaaaaaaaaaaaaaaaaaaaaaaaaaaaaaaaaaaaaaaaaaaaaaaaaaaaaaaaaaaa

SEQ ID NO: 24776 - RNA, 4064 nt, Artificial Sequence
  SARS-CoV-2/Wuhan/WIV05/2019__EPI_ISL_402128 spike protein mRNA gc (1-1273)(H69del_V70del_Y453F_D614G_I692V_M1229I)
aggagagucccgcagucggcguccagcggcucugcuuguucgugugugugucguugcaggccuuauucaagcuuaccauguucguguuccuggugcugcugccccuggugagcagccagugcgugaaccugaccacccggacccagcugccaccagccuacaccaacagcuucacccggggcgucuacuaccccgacaagguguuccggagcagcguccugcacagcacccaggaccuguuccugcccuucuucagcaacgugaccugguuccacgccaucagcggcaccaacggcaccaagcgguucgacaaccccgugcugcccuucaacgacggcguguacuucgccagcaccgagaagagcaacaucauccggggcuggaucuucggcaccacccuggacagcaagacccagagccugcugaucgugaauaacgccaccaacguggugaucaaggugugcgaguuccaguucugcaacgaccccuuccugggcguguacuaccacaagaacaacaagagcuggauggagagcgaguuccggguguacagcagcgccaacaacugcaccuucgaguacgugagccagcccuuccugauggaccuggagggcaagcagggcaacuucaagaaccugcgggaguucguguucaagaacaucgacggcuacuucaagaucuacagcaagcacaccccaaucaaccuggugcgggaucugccccagggcuucucagcccuggagccccugguggaccugcccaucggcaucaacaucacccgguuccagacccugcuggcccugcaccggagcuaccugaccccaggcgacagcagcagcggguggacagcaggcgcggcugcuuacuacgugggcuaccugcagccccggaccuuccugcugaaguacaacgagaacggcaccaucaccgacgccguggacugcgcccuggacccucugagcgagaccaagugcacccugaagagcuucaccguggagaagggcaucuaccagaccagcaacuuccgggugcagcccaccgagagcaucgugcgguuccccaacaucaccaaccugugccccuucggcgagguguucaacgccacccgguucgccagcguguacgccuggaaccggaagcggaucagcaacugcguggccgacuacagcgugcuguacaacagcgccagcuucagcaccuucaagugcuacggcgugagccccaccaagcugaacgaccugugcuucaccaacguguacgccgacagcuucgugauccguggcgacgaggugcggcagaucgcacccggccagacaggcaagaucgccgacuacaacuacaagcugcccgacgacuucaccggcugcgugaucgccuggaacagcaacaaccucgacagcaaggugggcggcaacuacaacuaccuguuccggcuguuccggaagagcaaccugaagcccuucgagcgggacaucagcaccgagaucuaccaagccggcuccaccccuugcaacggcguggagggcuucaacugcuacuucccucugcagagcuacggcuuccagcccaccaacggcgugggcuaccagcccuaccgggugguggugcugagcuucgagcugcugcacgccccagccaccguguguggccccaagaagagcaccaaccuggugaagaacaagugcgugaacuucaacuucaacggccuuaccggcaccggcgugcugaccgagagcaacaagaaauuccugcccuuucagcaguucggccgggacaucgccgacaccaccgacgcugugcgggauccccagacccuggagauccuggacaucaccccuugcagcuucggcggcgugagcgugaucaccccaggcaccaacaccagcaaccagguggccgugcuguaccagggcgugaacugcaccgaggugcccguggccauccacgccgaccagcugacacccaccuggcgggucuacagcaccggcagcaacguguuccagacccgggccgguugccugaucggcgccgagcacgugaacaacagcuacgagugcgacauccccaucggcgccggcaucugugccagcuaccagacccagaccaauucaccccggagggcaaggagcguggccagccagagcgugaucgccuacaccaugagccugggcgccgagaacagcguggccuacagcaacaacagcaucgccauccccaccaacuucaccaucagcgugaccaccgagauucugcccgugagcaugaccaagaccagcguggacugcaccauguacaucugcggcgacagcaccgagugcagcaaccugcugcugcaguacggcagcuucugcacccagcugaaccgggcccugaccggcaucgccguggagcaggacaagaacacccaggagguguucgcccaggugaagcagaucuacaagaccccucccaucaaggacuucggcggcuucaacuucagccagauccugcccgaccccagcaagcccagcaagcggagcuucaucgaggaccugcuguucaacaaggugacccuagccgacgccggcuucaucaagcaguacggcgacugccucggcgacauagccgcccgggaccugaucugcgcccagaaguucaacggccugaccgugcugccuccccugcugaccgacgagaugaucgcccaguacaccagcgcccuguuagccggaaccaucaccagcggcuggacuuucggcgcuggagccgcucugcagauccccuucgccaugcagauggccuaccgguucaacggcaucggcgugacccagaacgugcuguacgagaaccagaagcugaucgccaaccaguucaacagcgccaucggcaagauccaggacagccugagcagcaccgcuagcgcccugggcaagcugcaggacguggugaaccagaacgcccaggcccugaacacccuggugaagcagcugagcagcaacuucggcgccaucagcagcgugcugaacgacauccugagccggcuggacaaggucgaggccgaggugcagaucgaccggcugaucacuggccggcugcagagccugcagaccuacgugacccagcagcugauccgggccgccgagauucgggccagcgccaaccuggccgccaccaagaugagcgagugcgugcugggccagagcaagcggguggacuucugcggcaagggcuaccaccugaugagcuuuccccagagcgcaccccacggagugguguuccugcacgugaccuacgugcccgcccaggagaagaacuucaccaccgccccagccaucugccacgacggcaaggcccacuuuccccgggagggcguguucgugagcaacggcacccacugguucgugacccagcggaacuucuacgagccccagaucaucaccaccgacaacaccuucgugagcggcaacugcgacguggugaucggcaucgugaacaacaccguguacgauccccugcagcccgagcuggacagcuucaaggaggagcuggacaaguacuucaagaaucacaccagccccgacguggaccugggcgacaucagcggcaucaacgccagcguggugaacauccagaaggagaucgaucggcugaacgagguggccaagaaccugaacgagagccugaucgaccugcaggagcugggcaaguacgagcaguacaucaaguggcccugguacaucuggcugggcuucaucgccggccugaucgccaucgugaucgugaccaucaugcugugcugcaugaccagcugcugcagcugccugaagggcuguugcagcugcggcagcugcugcaaguucgacgaggacgacagcgagcccgugcugaagggcgugaagcugcacuacaccugaggacuagucccuguucccagagcccacuuuuuuuucuuuuuuugaaauaaaauagccugucuuucagaucuaaaaaaaaaaaaaaaaaaaaaaaaaaaaaaaaaaaaaaaaaaaaaaaaaaaaaaaaaaaaaaaaaaaaaaaaaaaaaaaaaaaaaaaaaaaaaaaaaaaa

SEQ ID NO: 24777 - RNA, 4061 nt, Artificial Sequence
  SARS-CoV-2/Wuhan/WIV05/2019__EPI_ISL_402128 spike protein mRNA gc (1-1273)(H69del_V70del_Y144del_N501Y_A570D_D614G_P681H_T716I_S982 A_D1118H)
aggagagucccgcagucggcguccagcggcucugcuuguucgugugugugucguugcaggccuuauucaagcuuaccauguucguguuccuggugcugcugccccuggugagcagccagugcgugaaccugaccacccggacccagcugccaccagccuacaccaacagcuucacccggggcgucuacuaccccgacaagguguuccggagcagcguccugcacagcacccaggaccuguuccugcccuucuucagcaacgugaccugguuccacgccaucagcggcaccaacggcaccaagcgguucgacaaccccgugcugcccuucaacgacggcguguacuucgccagcaccgagaagagcaacaucauccggggcuggaucuucggcaccacccuggacagcaagacccagagccugcugaucgugaauaacgccaccaacguggugaucaaggugugcgaguuccaguucugcaacgaccccuuccugggcguguaccacaagaacaacaagagcuggauggagagcgaguuccggguguacagcagcgccaacaacugcaccuucgaguacgugagccagcccuuccugauggaccuggagggcaagcagggcaacuucaagaaccugcgggaguucguguucaagaacaucgacggcuacuucaagaucuacagcaagcacaccccaaucaaccuggugcgggaucugccccagggcuucucagcccuggagccccugguggaccugcccaucggcaucaacaucacccgguuccagacccugcuggcccugcaccggagcuaccugaccccaggcgacagcagcagcggguggacagcaggcgcggcugcuuacuacgugggcuaccugcagccccggaccuuccugcugaaguacaacgagaacggcaccaucaccgacgccguggacugcgcccuggacccucugagcgagaccaagugcacccugaagagcuucaccguggagaagggcaucuaccagaccagcaacuuccgggugcagcccaccgagagcaucgugcgguuccccaacaucaccaaccugugccccuucggcgagguguucaacgccacccgguucgccagcguguacgccuggaaccggaagcggaucagcaacugcguggccgacuacagcgugcuguacaacagcgccagcuucagcaccuucaagugcuacggcgugagccccaccaagcugaacgaccugugcuucaccaacguguacgccgacagcuucgugauccguggcgacgaggugcggcagaucgcacccggccagacaggcaagaucgccgacuacaacuacaagcugcccgacgacuucaccggcugcgugaucgccuggaacagcaacaaccucgacagcaaggugggcggcaacuacaacuaccuguaccggcuguuccggaagagcaaccugaagcccuucgagcgggacaucagcaccgagaucuaccaagccggcuccaccccuugcaacggcguggagggcuucaacugcuacuucccucugcagagcuacggcuuccagcccaccuacggcgugggcuaccagcccuaccgggugguggugcugagcuucgagcugcugcacgccccagccaccguguguggccccaagaagagcaccaaccuggugaagaacaagugcgugaacuucaacuucaacggccuuaccggcaccggcgugcugaccgagagcaacaagaaauuccugcccuuucagcaguucggccgggacaucgacgacaccaccgacgcugugcgggauccccagacccuggagauccuggacaucaccccuugcagcuucggcggcgugagcgugaucaccccaggcaccaacaccagcaaccagguggccgugcuguaccagggcgugaacugcaccgaggugcccguggccauccacgccgaccagcugacacccaccuggcgggucuacagcaccggcagcaacguguuccagacccgggccgguugccugaucggcgccgagcacgugaacaacagcuacgagugcgacauccccaucggcgccggcaucugugccagcuaccagacccagaccaauucacaccggagggcaaggagcguggccagccagagcaucaucgccuacaccaugagccugggcgccgagaacagcguggccuacagcaacaacagcaucgccauccccaucaacuucaccaucagcgugaccaccgagauucugcccgugagcaugaccaagaccagcguggacugcaccauguacaucugcggcgacagcaccgagugcagcaaccugcugcugcaguacggcagcuucugcacccagcugaaccgggcccugaccggcaucgccguggagcaggacaagaacacccaggagguguucgcccaggugaagcagaucuacaagaccccucccaucaaggacuucggcggcuucaacuucagccagauccugcccgaccccagcaagcccagcaagcggagcuucaucgaggaccugcuguucaacaaggugacccuagccgacgccggcuucaucaagcaguacggcgacugccucggcgacauagccgcccgggaccugaucugcgcccagaaguucaacggccugaccgugcugccuccccugcugaccgacgagaugaucgcccaguacaccagcgcccuguuagccggaaccaucaccagcggcuggacuuucggcgcuggagccgcucugcagauccccuucgccaugcagauggccuaccgguucaacggcaucggcgugacccagaacgugcuguacgagaaccagaagcugaucgccaaccaguucaacagcgccaucggcaagauccaggacagccugagcagcaccgcuagcgcccugggcaagcugcaggacguggugaaccagaacgcccaggcccugaacacccuggugaagcagcugagcagcaacuucggcgccaucagcagcgugcugaacgacauccuggcccggcuggacaaggucgaggccgaggugcagaucgaccggcugaucacuggccggcugcagagccugcagaccuacgugacccagcagcugauccgggccgccgagauucgggccagcgccaaccuggccgccaccaagaugagcgagugcgugcugggccagagcaagcggguggacuucugcggcaagggcuaccaccugaugagcuuuccccagagcgcaccccacggagugguguuccugcacgugaccuacgugcccgcccaggagaagaacuucaccaccgccccagccaucugccacgacggcaaggcccacuuuccccgggagggcguguucgugagcaacggcacccacugguucgugacccagcggaacuucuacgagccccagaucaucaccacccacaacaccuucgugagcggcaacugcgacguggugaucggcaucgugaacaacaccguguacgauccccugcagcccgagcuggacagcuucaaggaggagcuggacaaguacuucaagaaucacaccagccccgacguggaccugggcgacaucagcggcaucaacgccagcguggugaacauccagaaggagaucgaucggcugaacgagguggccaagaaccugaacgagagccugaucgaccugcaggagcugggcaaguacgagcaguacaucaaguggcccugguacaucuggcugggcuucaucgccggccugaucgccaucgugauggugaccaucaugcugugcugcaugaccagcugcugcagcugccugaagggcuguugcagcugcggcagcugcugcaaguucgacgaggacgacagcgagcccgugcugaagggcgugaagcugcacuacaccugaggacuagucccuguucccagagcccacuuuuuuuucuuuuuuugaaauaaaauagccugucuuucagaucuaaaaaaaaaaaaaaaaaaaaaaaaaaaaaaaaaaaaaaaaaaaaaaaaaaaaaaaaaaaaaaaaaaaaaaaaaaaaaaaaaaaaaaaaaaaaaaaaaaaa

SEQ ID NO: 24778 - RNA, 4070 nt, Artificial Sequence
  SARS-CoV-2/Wuhan/WIV05/2019__EPI_ISL_402128 spike protein mRNA gc (1-1273)(K417N_E484K_N501Y_D614G)
aggagagucccgcagucggcguccagcggcucugcuuguucgugugugugucguugcaggccuuauucaagcuuaccauguucguguuccuggugcugcugccccuggugagcagccagugcgugaaccugaccacccggacccagcugccaccagccuacaccaacagcuucacccggggcgucuacuaccccgacaagguguuccggagcagcguccugcacagcacccaggaccuguuccugcccuucuucagcaacgugaccugguuccacgccauccacgugagcggcaccaacggcaccaagcgguucgacaaccccgugcugcccuucaacgacggcguguacuucgccagcaccgagaagagcaacaucauccggggcuggaucuucggcaccacccuggacagcaagacccagagccugcugaucgugaauaacgccaccaacguggugaucaaggugugcgaguuccaguucugcaacgaccccuuccugggcguguacuaccacaagaacaacaagagcuggauggagagcgaguuccggguguacagcagcgccaacaacugcaccuucgaguacgugagccagcccuuccugauggaccuggagggcaagcagggcaacuucaagaaccugcgggaguucguguucaagaacaucgacggcuacuucaagaucuacagcaagcacaccccaaucaaccuggugcgggaucugccccagggcuucucagcccuggagccccugguggaccugcccaucggcaucaacaucacccgguuccagacccugcuggcccugcaccggagcuaccugaccccaggcgacagcagcagcggguggacagcaggcgcggcugcuuacuacgugggcuaccugcagccccggaccuuccugcugaaguacaacgagaacggcaccaucaccgacgccguggacugcgcccuggacccucugagcgagaccaagugcacccugaagagcuucaccguggagaagggcaucuaccagaccagcaacuuccgggugcagcccaccgagagcaucgugcgguuccccaacaucaccaaccugugccccuucggcgagguguucaacgccacccgguucgccagcguguacgccuggaaccggaagcggaucagcaacugcguggccgacuacagcgugcuguacaacagcgccagcuucagcaccuucaagugcuacggcgugagccccaccaagcugaacgaccugugcuucaccaacguguacgccgacagcuucgugauccguggcgacgaggugcggcagaucgcacccggccagacaggcaacaucgccgacuacaacuacaagcugcccgacgacuucaccggcugcgugaucgccuggaacagcaacaaccucgacagcaaggugggcggcaacuacaacuaccuguaccggcuguuccggaagagcaaccugaagcccuucgagcgggacaucagcaccgagaucuaccaagccggcuccaccccuugcaacggcgugaagggcuucaacugcuacuucccucugcagagcuacggcuuccagcccaccuacggcgugggcuaccagcccuaccgggugguggugcugagcuucgagcugcugcacgccccagccaccguguguggccccaagaagagcaccaaccuggugaagaacaagugcgugaacuucaacuucaacggccuuaccggcaccggcgugcugaccgagagcaacaagaaauuccugcccuuucagcaguucggccgggacaucgccgacaccaccgacgcugugcgggauccccagacccuggagauccuggacaucaccccuugcagcuucggcggcgugagcgugaucaccccaggcaccaacaccagcaaccagguggccgugcuguaccagggcgugaacugcaccgaggugcccguggccauccacgccgaccagcugacacccaccuggcgggucuacagcaccggcagcaacguguuccagacccgggccgguugccugaucggcgccgagcacgugaacaacagcuacgagugcgacauccccaucggcgccggcaucugugccagcuaccagacccagaccaauucaccccggagggcaaggagcguggccagccagagcaucaucgccuacaccaugagccugggcgccgagaacagcguggccuacagcaacaacagcaucgccauccccaccaacuucaccaucagcgugaccaccgagauucugcccgugagcaugaccaagaccagcguggacugcaccauguacaucugcggcgacagcaccgagugcagcaaccugcugcugcaguacggcagcuucugcacccagcugaaccgggcccugaccggcaucgccguggagcaggacaagaacacccaggagguguucgcccaggugaagcagaucuacaagaccccucccaucaaggacuucggcggcuucaacuucagccagauccugcccgaccccagcaagcccagcaagcggagcuucaucgaggaccugcuguucaacaaggugacccuagccgacgccggcuucaucaagcaguacggcgacugccucggcgacauagccgcccgggaccugaucugcgcccagaaguucaacggccugaccgugcugccuccccugcugaccgacgagaugaucgcccaguacaccagcgcccuguuagccggaaccaucaccagcggcuggacuuucggcgcuggagccgcucugcagauccccuucgccaugcagauggccuaccgguucaacggcaucggcgugacccagaacgugcuguacgagaaccagaagcugaucgccaaccaguucaacagcgccaucggcaagauccaggacagccugagcagcaccgcuagcgcccugggcaagcugcaggacguggugaaccagaacgcccaggcccugaacacccuggugaagcagcugagcagcaacuucggcgccaucagcagcgugcugaacgacauccugagccggcuggacaaggucgaggccgaggugcagaucgaccggcugaucacuggccggcugcagagccugcagaccuacgugacccagcagcugauccgggccgccgagauucgggccagcgccaaccuggccgccaccaagaugagcgagugcgugcugggccagagcaagcggguggacuucugcggcaagggcuaccaccugaugagcuuuccccagagcgcaccccacggagugguguuccugcacgugaccuacgugcccgcccaggagaagaacuucaccaccgccccagccaucugccacgacggcaaggcccacuuuccccgggagggcguguucgugagcaacggcacccacugguucgugacccagcggaacuucuacgagccccagaucaucaccaccgacaacaccuucgugagcggcaacugcgacguggugaucggcaucgugaacaacaccguguacgauccccugcagcccgagcuggacagcuucaaggaggagcuggacaaguacuucaagaaucacaccagccccgacguggaccugggcgacaucagcggcaucaacgccagcguggugaacauccagaaggagaucgaucggcugaacgagguggccaagaaccugaacgagagccugaucgaccugcaggagcugggcaaguacgagcaguacaucaaguggcccugguacaucuggcugggcuucaucgccggccugaucgccaucgugauggugaccaucaugcugugcugcaugaccagcugcugcagcugccugaagggcuguugcagcugcggcagcugcugcaaguucgacgaggacgacagcgagcccgugcugaagggcgugaagcugcacuacaccugaggacuagucccuguucccagagcccacuuuuuuuucuuuuuuugaaauaaaauagccugucuuucagaucuaaaaaaaaaaaaaaaaaaaaaaaaaaaaaaaaaaaaaaaaaaaaaaaaaaaaaaaaaaaaaaaaaaaaaaaaaaaaaaaaaaaaaaaaaaaaaaaaaaaa

SEQ ID NO: 24779 - RNA, 4061 nt, Artificial Sequence
  SARS-CoV-2/Wuhan/WIV05/2019__EPI_ISL_402128 spike protein mRNA gc (1-1273)(L18F_D80A_D215G_L242del_A243del_L244del_R246I_K417N_E484 K_N501Y_D614G_A701V)
aggagagucccgcagucggcguccagcggcucugcuuguucgugugugugucguugcaggccuuauucaagcuuaccauguucguguuccuggugcugcugccccuggugagcagccagugcgugaacuucaccacccggacccagcugccaccagccuacaccaacagcuucacccggggcgucuacuaccccgacaagguguuccggagcagcguccugcacagcacccaggaccuguuccugcccuucuucagcaacgugaccugguuccacgccauccacgugagcggcaccaacggcaccaagcgguucgccaaccccgugcugcccuucaacgacggcguguacuucgccagcaccgagaagagcaacaucauccggggcuggaucuucggcaccacccuggacagcaagacccagagccugcugaucgugaauaacgccaccaacguggugaucaaggugugcgaguuccaguucugcaacgaccccuuccugggcguguacuaccacaagaacaacaagagcuggauggagagcgaguuccggguguacagcagcgccaacaacugcaccuucgaguacgugagccagcccuuccugauggaccuggagggcaagcagggcaacuucaagaaccugcgggaguucguguucaagaacaucgacggcuacuucaagaucuacagcaagcacaccccaaucaaccuggugcggggccugccccagggcuucucagcccuggagccccugguggaccugcccaucggcaucaacaucacccgguuccagacccugcacaucagcuaccugaccccaggcgacagcagcagcggguggacagcaggcgcggcugcuuacuacgugggcuaccugcagccccggaccuuccugcugaaguacaacgagaacggcaccaucaccgacgccguggacugcgcccuggacccucugagcgagaccaagugcacccugaagagcuucaccguggagaagggcaucuaccagaccagcaacuuccgggugcagcccaccgagagcaucgugcgguuccccaacaucaccaaccugugccccuucggcgagguguucaacgccacccgguucgccagcguguacgccuggaaccggaagcggaucagcaacugcguggccgacuacagcgugcuguacaacagcgccagcuucagcaccuucaagugcuacggcgugagccccaccaagcugaacgaccugugcuucaccaacguguacgccgacagcuucgugauccguggcgacgaggugcggcagaucgcacccggccagacaggcaacaucgccgacuacaacuacaagcugcccgacgacuucaccggcugcgugaucgccuggaacagcaacaaccucgacagcaaggugggcggcaacuacaacuaccuguaccggcuguuccggaagagcaaccugaagcccuucgagcgggacaucagcaccgagaucuaccaagccggcuccaccccuugcaacggcgugaagggcuucaacugcuacuucccucugcagagcuacggcuuccagcccaccuacggcgugggcuaccagcccuaccgggugguggugcugagcuucgagcugcugcacgccccagccaccguguguggccccaagaagagcaccaaccuggugaagaacaagugcgugaacuucaacuucaacggccuuaccggcaccggcgugcugaccgagagcaacaagaaauuccugcccuuucagcaguucggccgggacaucgccgacaccaccgacgcugugcgggauccccagacccuggagauccuggacaucaccccuugcagcuucggcggcgugagcgugaucaccccaggcaccaacaccagcaaccagguggccgugcuguaccagggcgugaacugcaccgaggugcccguggccauccacgccgaccagcugacacccaccuggcgggucuacagcaccggcagcaacguguuccagacccgggccgguugccugaucggcgccgagcacgugaacaacagcuacgagugcgacauccccaucggcgccggcaucugugccagcuaccagacccagaccaauucaccccggagggcaaggagcguggccagccagagcaucaucgccuacaccaugagccugggcguggagaacagcguggccuacagcaacaacagcaucgccauccccaccaacuucaccaucagcgugaccaccgagauucugcccgugagcaugaccaagaccagcguggacugcaccauguacaucugcggcgacagcaccgagugcagcaaccugcugcugcaguacggcagcuucugcacccagcugaaccgggcccugaccggcaucgccguggagcaggacaagaacacccaggagguguucgcccaggugaagcagaucuacaagaccccucccaucaaggacuucggcggcuucaacuucagccagauccugcccgaccccagcaagcccagcaagcggagcuucaucgaggaccugcuguucaacaaggugacccuagccgacgccggcuucaucaagcaguacggcgacugccucggcgacauagccgcccgggaccugaucugcgcccagaaguucaacggccugaccgugcugccuccccugcugaccgacgagaugaucgcccaguacaccagcgcccuguuagccggaaccaucaccagcggcuggacuuucggcgcuggagccgcucugcagauccccuucgccaugcagauggccuaccgguucaacggcaucggcgugacccagaacgugcuguacgagaaccagaagcugaucgccaaccaguucaacagcgccaucggcaagauccaggacagccugagcagcaccgcuagcgcccugggcaagcugcaggacguggugaaccagaacgcccaggcccugaacacccuggugaagcagcugagcagcaacuucggcgccaucagcagcgugcugaacgacauccugagccggcuggacaaggucgaggccgaggugcagaucgaccggcugaucacuggccggcugcagagccugcagaccuacgugacccagcagcugauccgggccgccgagauucgggccagcgccaaccuggccgccaccaagaugagcgagugcgugcugggccagagcaagcggguggacuucugcggcaagggcuaccaccugaugagcuuuccccagagcgcaccccacggagugguguuccugcacgugaccuacgugcccgcccaggagaagaacuucaccaccgccccagccaucugccacgacggcaaggcccacuuuccccgggagggcguguucgugagcaacggcacccacugguucgugacccagcggaacuucuacgagccccagaucaucaccaccgacaacaccuucgugagcggcaacugcgacguggugaucggcaucgugaacaacaccguguacgauccccugcagcccgagcuggacagcuucaaggaggagcuggacaaguacuucaagaaucacaccagccccgacguggaccugggcgacaucagcggcaucaacgccagcguggugaacauccagaaggagaucgaucggcugaacgagguggccaagaaccugaacgagagccugaucgaccugcaggagcugggcaaguacgagcaguacaucaaguggcccugguacaucuggcugggcuucaucgccggccugaucgccaucgugauggugaccaucaugcugugcugcaugaccagcugcugcagcugccugaagggcuguugcagcugcggcagcugcugcaaguucgacgaggacgacagcgagcccgugcugaagggcgugaagcugcacuacaccugaggacuagucccuguucccagagcccacuuuuuuuucuuuuuuugaaauaaaauagccugucuuucagaucuaaaaaaaaaaaaaaaaaaaaaaaaaaaaaaaaaaaaaaaaaaaaaaaaaaaaaaaaaaaaaaaaaaaaaaaaaaaaaaaaaaaaaaaaaaaaaaaaaaaa

SEQ ID NO: 24780 - RNA, 4070 nt, Artificial Sequence
  SARS-CoV-2/Wuhan/WIV05/2019__EPI_ISL_402128 spike protein mRNA gc (1-1273)(E484K_D614G)
aggagagucccgcagucggcguccagcggcucugcuuguucgugugugugucguugcaggccuuauucaagcuuaccauguucguguuccuggugcugcugccccuggugagcagccagugcgugaaccugaccacccggacccagcugccaccagccuacaccaacagcuucacccggggcgucuacuaccccgacaagguguuccggagcagcguccugcacagcacccaggaccuguuccugcccuucuucagcaacgugaccugguuccacgccauccacgugagcggcaccaacggcaccaagcgguucgacaaccccgugcugcccuucaacgacggcguguacuucgccagcaccgagaagagcaacaucauccggggcuggaucuucggcaccacccuggacagcaagacccagagccugcugaucgugaauaacgccaccaacguggugaucaaggugugcgaguuccaguucugcaacgaccccuuccugggcguguacuaccacaagaacaacaagagcuggauggagagcgaguuccggguguacagcagcgccaacaacugcaccuucgaguacgugagccagcccuuccugauggaccuggagggcaagcagggcaacuucaagaaccugcgggaguucguguucaagaacaucgacggcuacuucaagaucuacagcaagcacaccccaaucaaccuggugcgggaucugccccagggcuucucagcccuggagccccugguggaccugcccaucggcaucaacaucacccgguuccagacccugcuggcccugcaccggagcuaccugaccccaggcgacagcagcagcggguggacagcaggcgcggcugcuuacuacgugggcuaccugcagccccggaccuuccugcugaaguacaacgagaacggcaccaucaccgacgccguggacugcgcccuggacccucugagcgagaccaagugcacccugaagagcuucaccguggagaagggcaucuaccagaccagcaacuuccgggugcagcccaccgagagcaucgugcgguuccccaacaucaccaaccugugccccuucggcgagguguucaacgccacccgguucgccagcguguacgccuggaaccggaagcggaucagcaacugcguggccgacuacagcgugcuguacaacagcgccagcuucagcaccuucaagugcuacggcgugagccccaccaagcugaacgaccugugcuucaccaacguguacgccgacagcuucgugauccguggcgacgaggugcggcagaucgcacccggccagacaggcaagaucgccgacuacaacuacaagcugcccgacgacuucaccggcugcgugaucgccuggaacagcaacaaccucgacagcaaggugggcggcaacuacaacuaccuguaccggcuguuccggaagagcaaccugaagcccuucgagcgggacaucagcaccgagaucuaccaagccggcuccaccccuugcaacggcgugaagggcuucaacugcuacuucccucugcagagcuacggcuuccagcccaccaacggcgugggcuaccagcccuaccgggugguggugcugagcuucgagcugcugcacgccccagccaccguguguggccccaagaagagcaccaaccuggugaagaacaagugcgugaacuucaacuucaacggccuuaccggcaccggcgugcugaccgagagcaacaagaaauuccugcccuuucagcaguucggccgggacaucgccgacaccaccgacgcugugcgggauccccagacccuggagauccuggacaucaccccuugcagcuucggcggcgugagcgugaucaccccaggcaccaacaccagcaaccagguggccgugcuguaccagggcgugaacugcaccgaggugcccguggccauccacgccgaccagcugacacccaccuggcgggucuacagcaccggcagcaacguguuccagacccgggccgguugccugaucggcgccgagcacgugaacaacagcuacgagugcgacauccccaucggcgccggcaucugugccagcuaccagacccagaccaauucaccccggagggcaaggagcguggccagccagagcaucaucgccuacaccaugagccugggcgccgagaacagcguggccuacagcaacaacagcaucgccauccccaccaacuucaccaucagcgugaccaccgagauucugcccgugagcaugaccaagaccagcguggacugcaccauguacaucugcggcgacagcaccgagugcagcaaccugcugcugcaguacggcagcuucugcacccagcugaaccgggcccugaccggcaucgccguggagcaggacaagaacacccaggagguguucgcccaggugaagcagaucuacaagaccccucccaucaaggacuucggcggcuucaacuucagccagauccugcccgaccccagcaagcccagcaagcggagcuucaucgaggaccugcuguucaacaaggugacccuagccgacgccggcuucaucaagcaguacggcgacugccucggcgacauagccgcccgggaccugaucugcgcccagaaguucaacggccugaccgugcugccuccccugcugaccgacgagaugaucgcccaguacaccagcgcccuguuagccggaaccaucaccagcggcuggacuuucggcgcuggagccgcucugcagauccccuucgccaugcagauggccuaccgguucaacggcaucggcgugacccagaacgugcuguacgagaaccagaagcugaucgccaaccaguucaacagcgccaucggcaagauccaggacagccugagcagcaccgcuagcgcccugggcaagcugcaggacguggugaaccagaacgcccaggcccugaacacccuggugaagcagcugagcagcaacuucggcgccaucagcagcgugcugaacgacauccugagccggcuggacaaggucgaggccgaggugcagaucgaccggcugaucacuggccggcugcagagccugcagaccuacgugacccagcagcugauccgggccgccgagauucgggccagcgccaaccuggccgccaccaagaugagcgagugcgugcugggccagagcaagcggguggacuucugcggcaagggcuaccaccugaugagcuuuccccagagcgcaccccacggagugguguuccugcacgugaccuacgugcccgcccaggagaagaacuucaccaccgccccagccaucugccacgacggcaaggcccacuuuccccgggagggcguguucgugagcaacggcacccacugguucgugacccagcggaacuucuacgagccccagaucaucaccaccgacaacaccuucgugagcggcaacugcgacguggugaucggcaucgugaacaacaccguguacgauccccugcagcccgagcuggacagcuucaaggaggagcuggacaaguacuucaagaaucacaccagccccgacguggaccugggcgacaucagcggcaucaacgccagcguggugaacauccagaaggagaucgaucggcugaacgagguggccaagaaccugaacgagagccugaucgaccugcaggagcugggcaaguacgagcaguacaucaaguggcccugguacaucuggcugggcuucaucgccggccugaucgccaucgugauggugaccaucaugcugugcugcaugaccagcugcugcagcugccugaagggcuguugcagcugcggcagcugcugcaaguucgacgaggacgacagcgagcccgugcugaagggcgugaagcugcacuacaccugaggacuagucccuguucccagagcccacuuuuuuuucuuuuuuugaaauaaaauagccugucuuucagaucuaaaaaaaaaaaaaaaaaaaaaaaaaaaaaaaaaaaaaaaaaaaaaaaaaaaaaaaaaaaaaaaaaaaaaaaaaaaaaaaaaaaaaaaaaaaaaaaaaaaa

SEQ ID NO: 24781 - RNA, 4070 nt, Artificial Sequence
  SARS-CoV-2/Wuhan/WIV05/2019__EPI_ISL_402128 spike protein mRNA gc (1-1273)(L18F_T20N_P26S_D138Y_R190S_K417T_E484K_N501Y_D614G_H655Y _T1027I)
aggagagucccgcagucggcguccagcggcucugcuuguucgugugugugucguugcaggccuuauucaagcuuaccauguucguguuccuggugcugcugccccuggugagcagccagugcgugaacuucaccaaccggacccagcugccaagcgccuacaccaacagcuucacccggggcgucuacuaccccgacaagguguuccggagcagcguccugcacagcacccaggaccuguuccugcccuucuucagcaacgugaccugguuccacgccauccacgugagcggcaccaacggcaccaagcgguucgacaaccccgugcugcccuucaacgacggcguguacuucgccagcaccgagaagagcaacaucauccggggcuggaucuucggcaccacccuggacagcaagacccagagccugcugaucgugaauaacgccaccaacguggugaucaaggugugcgaguuccaguucugcaacuaccccuuccugggcguguacuaccacaagaacaacaagagcuggauggagagcgaguuccggguguacagcagcgccaacaacugcaccuucgaguacgugagccagcccuuccugauggaccuggagggcaagcagggcaacuucaagaaccugagcgaguucguguucaagaacaucgacggcuacuucaagaucuacagcaagcacaccccaaucaaccuggugcgggaucugccccagggcuucucagcccuggagccccugguggaccugcccaucggcaucaacaucacccgguuccagacccugcuggcccugcaccggagcuaccugaccccaggcgacagcagcagcggguggacagcaggcgcggcugcuuacuacgugggcuaccugcagccccggaccuuccugcugaaguacaacgagaacggcaccaucaccgacgccguggacugcgcccuggacccucugagcgagaccaagugcacccugaagagcuucaccguggagaagggcaucuaccagaccagcaacuuccgggugcagcccaccgagagcaucgugcgguuccccaacaucaccaaccugugccccuucggcgagguguucaacgccacccgguucgccagcguguacgccuggaaccggaagcggaucagcaacugcguggccgacuacagcgugcuguacaacagcgccagcuucagcaccuucaagugcuacggcgugagccccaccaagcugaacgaccugugcuucaccaacguguacgccgacagcuucgugauccguggcgacgaggugcggcagaucgcacccggccagacaggcaccaucgccgacuacaacuacaagcugcccgacgacuucaccggcugcgugaucgccuggaacagcaacaaccucgacagcaaggugggcggcaacuacaacuaccuguaccggcuguuccggaagagcaaccugaagcccuucgagcgggacaucagcaccgagaucuaccaagccggcuccaccccuugcaacggcgugaagggcuucaacugcuacuucccucugcagagcuacggcuuccagcccaccuacggcgugggcuaccagcccuaccgggugguggugcugagcuucgagcugcugcacgccccagccaccguguguggccccaagaagagcaccaaccuggugaagaacaagugcgugaacuucaacuucaacggccuuaccggcaccggcgugcugaccgagagcaacaagaaauuccugcccuuucagcaguucggccgggacaucgccgacaccaccgacgcugugcgggauccccagacccuggagauccuggacaucaccccuugcagcuucggcggcgugagcgugaucaccccaggcaccaacaccagcaaccagguggccgugcuguaccagggcgugaacugcaccgaggugcccguggccauccacgccgaccagcugacacccaccuggcgggucuacagcaccggcagcaacguguuccagacccgggccgguugccugaucggcgccgaguacgugaacaacagcuacgagugcgacauccccaucggcgccggcaucugugccagcuaccagacccagaccaauucaccccggagggcaaggagcguggccagccagagcaucaucgccuacaccaugagccugggcgccgagaacagcguggccuacagcaacaacagcaucgccauccccaccaacuucaccaucagcgugaccaccgagauucugcccgugagcaugaccaagaccagcguggacugcaccauguacaucugcggcgacagcaccgagugcagcaaccugcugcugcaguacggcagcuucugcacccagcugaaccgggcccugaccggcaucgccguggagcaggacaagaacacccaggagguguucgcccaggugaagcagaucuacaagaccccucccaucaaggacuucggcggcuucaacuucagccagauccugcccgaccccagcaagcccagcaagcggagcuucaucgaggaccugcuguucaacaaggugacccuagccgacgccggcuucaucaagcaguacggcgacugccucggcgacauagccgcccgggaccugaucugcgcccagaaguucaacggccugaccgugcugccuccccugcugaccgacgagaugaucgcccaguacaccagcgcccuguuagccggaaccaucaccagcggcuggacuuucggcgcuggagccgcucugcagauccccuucgccaugcagauggccuaccgguucaacggcaucggcgugacccagaacgugcuguacgagaaccagaagcugaucgccaaccaguucaacagcgccaucggcaagauccaggacagccugagcagcaccgcuagcgcccugggcaagcugcaggacguggugaaccagaacgcccaggcccugaacacccuggugaagcagcugagcagcaacuucggcgccaucagcagcgugcugaacgacauccugagccggcuggacaaggucgaggccgaggugcagaucgaccggcugaucacuggccggcugcagagccugcagaccuacgugacccagcagcugauccgggccgccgagauucgggccagcgccaaccuggccgccaucaagaugagcgagugcgugcugggccagagcaagcggguggacuucugcggcaagggcuaccaccugaugagcuuuccccagagcgcaccccacggagugguguuccugcacgugaccuacgugcccgcccaggagaagaacuucaccaccgccccagccaucugccacgacggcaaggcccacuuuccccgggagggcguguucgugagcaacggcacccacugguucgugacccagcggaacuucuacgagccccagaucaucaccaccgacaacaccuucgugagcggcaacugcgacguggugaucggcaucgugaacaacaccguguacgauccccugcagcccgagcuggacagcuucaaggaggagcuggacaaguacuucaagaaucacaccagccccgacguggaccugggcgacaucagcggcaucaacgccagcguggugaacauccagaaggagaucgaucggcugaacgagguggccaagaaccugaacgagagccugaucgaccugcaggagcugggcaaguacgagcaguacaucaaguggcccugguacaucuggcugggcuucaucgccggccugaucgccaucgugauggugaccaucaugcugugcugcaugaccagcugcugcagcugccugaagggcuguugcagcugcggcagcugcugcaaguucgacgaggacgacagcgagcccgugcugaagggcgugaagcugcacuacaccugaggacuagucccuguucccagagcccacuuuuuuuucuuuuuuugaaauaaaauagccugucuuucagaucuaaaaaaaaaaaaaaaaaaaaaaaaaaaaaaaaaaaaaaaaaaaaaaaaaaaaaaaaaaaaaaaaaaaaaaaaaaaaaaaaaaaaaaaaaaaaaaaaaaaa

SEQ ID NO: 24782 - RNA, 4070 nt, Artificial Sequence
  SARS-CoV-2/Wuhan/WIV05/2019__EPI_ISL_402128 spike protein mRNA gc (1-1273)(S13I_W152C_L452R_D614G)
aggagagucccgcagucggcguccagcggcucugcuuguucgugugugugucguugcaggccuuauucaagcuuaccauguucguguuccuggugcugcugccccuggugagcauccagugcgugaaccugaccacccggacccagcugccaccagccuacaccaacagcuucacccggggcgucuacuaccccgacaagguguuccggagcagcguccugcacagcacccaggaccuguuccugcccuucuucagcaacgugaccugguuccacgccauccacgugagcggcaccaacggcaccaagcgguucgacaaccccgugcugcccuucaacgacggcguguacuucgccagcaccgagaagagcaacaucauccggggcuggaucuucggcaccacccuggacagcaagacccagagccugcugaucgugaauaacgccaccaacguggugaucaaggugugcgaguuccaguucugcaacgaccccuuccugggcguguacuaccacaagaacaacaagagcugcauggagagcgaguuccggguguacagcagcgccaacaacugcaccuucgaguacgugagccagcccuuccugauggaccuggagggcaagcagggcaacuucaagaaccugcgggaguucguguucaagaacaucgacggcuacuucaagaucuacagcaagcacaccccaaucaaccuggugcgggaucugccccagggcuucucagcccuggagccccugguggaccugcccaucggcaucaacaucacccgguuccagacccugcuggcccugcaccggagcuaccugaccccaggcgacagcagcagcggguggacagcaggcgcggcugcuuacuacgugggcuaccugcagccccggaccuuccugcugaaguacaacgagaacggcaccaucaccgacgccguggacugcgcccuggacccucugagcgagaccaagugcacccugaagagcuucaccguggagaagggcaucuaccagaccagcaacuuccgggugcagcccaccgagagcaucgugcgguuccccaacaucaccaaccugugccccuucggcgagguguucaacgccacccgguucgccagcguguacgccuggaaccggaagcggaucagcaacugcguggccgacuacagcgugcuguacaacagcgccagcuucagcaccuucaagugcuacggcgugagccccaccaagcugaacgaccugugcuucaccaacguguacgccgacagcuucgugauccguggcgacgaggugcggcagaucgcacccggccagacaggcaagaucgccgacuacaacuacaagcugcccgacgacuucaccggcugcgugaucgccuggaacagcaacaaccucgacagcaaggugggcggcaacuacaacuaccgcuaccggcuguuccggaagagcaaccugaagcccuucgagcgggacaucagcaccgagaucuaccaagccggcuccaccccuugcaacggcguggagggcuucaacugcuacuucccucugcagagcuacggcuuccagcccaccaacggcgugggcuaccagcccuaccgggugguggugcugagcuucgagcugcugcacgccccagccaccguguguggccccaagaagagcaccaaccuggugaagaacaagugcgugaacuucaacuucaacggccuuaccggcaccggcgugcugaccgagagcaacaagaaauuccugcccuuucagcaguucggccgggacaucgccgacaccaccgacgcugugcgggauccccagacccuggagauccuggacaucaccccuugcagcuucggcggcgugagcgugaucaccccaggcaccaacaccagcaaccagguggccgugcuguaccagggcgugaacugcaccgaggugcccguggccauccacgccgaccagcugacacccaccuggcgggucuacagcaccggcagcaacguguuccagacccgggccgguugccugaucggcgccgagcacgugaacaacagcuacgagugcgacauccccaucggcgccggcaucugugccagcuaccagacccagaccaauucaccccggagggcaaggagcguggccagccagagcaucaucgccuacaccaugagccugggcgccgagaacagcguggccuacagcaacaacagcaucgccauccccaccaacuucaccaucagcgugaccaccgagauucugcccgugagcaugaccaagaccagcguggacugcaccauguacaucugcggcgacagcaccgagugcagcaaccugcugcugcaguacggcagcuucugcacccagcugaaccgggcccugaccggcaucgccguggagcaggacaagaacacccaggagguguucgcccaggugaagcagaucuacaagaccccucccaucaaggacuucggcggcuucaacuucagccagauccugcccgaccccagcaagcccagcaagcggagcuucaucgaggaccugcuguucaacaaggugacccuagccgacgccggcuucaucaagcaguacggcgacugccucggcgacauagccgcccgggaccugaucugcgcccagaaguucaacggccugaccgugcugccuccccugcugaccgacgagaugaucgcccaguacaccagcgcccuguuagccggaaccaucaccagcggcuggacuuucggcgcuggagccgcucugcagauccccuucgccaugcagauggccuaccgguucaacggcaucggcgugacccagaacgugcuguacgagaaccagaagcugaucgccaaccaguucaacagcgccaucggcaagauccaggacagccugagcagcaccgcuagcgcccugggcaagcugcaggacguggugaaccagaacgcccaggcccugaacacccuggugaagcagcugagcagcaacuucggcgccaucagcagcgugcugaacgacauccugagccggcuggacaaggucgaggccgaggugcagaucgaccggcugaucacuggccggcugcagagccugcagaccuacgugacccagcagcugauccgggccgccgagauucgggccagcgccaaccuggccgccaccaagaugagcgagugcgugcugggccagagcaagcggguggacuucugcggcaagggcuaccaccugaugagcuuuccccagagcgcaccccacggagugguguuccugcacgugaccuacgugcccgcccaggagaagaacuucaccaccgccccagccaucugccacgacggcaaggcccacuuuccccgggagggcguguucgugagcaacggcacccacugguucgugacccagcggaacuucuacgagccccagaucaucaccaccgacaacaccuucgugagcggcaacugcgacguggugaucggcaucgugaacaacaccguguacgauccccugcagcccgagcuggacagcuucaaggaggagcuggacaaguacuucaagaaucacaccagccccgacguggaccugggcgacaucagcggcaucaacgccagcguggugaacauccagaaggagaucgaucggcugaacgagguggccaagaaccugaacgagagccugaucgaccugcaggagcugggcaaguacgagcaguacaucaaguggcccugguacaucuggcugggcuucaucgccggccugaucgccaucgugauggugaccaucaugcugugcugcaugaccagcugcugcagcugccugaagggcuguugcagcugcggcagcugcugcaaguucgacgaggacgacagcgagcccgugcugaagggcgugaagcugcacuacaccugaggacuagucccuguucccagagcccacuuuuuuuucuuuuuuugaaauaaaauagccugucuuucagaucuaaaaaaaaaaaaaaaaaaaaaaaaaaaaaaaaaaaaaaaaaaaaaaaaaaaaaaaaaaaaaaaaaaaaaaaaaaaaaaaaaaaaaaaaaaaaaaaaaaaa

SEQ ID NO: 24783 - RNA, 4070 nt, Artificial Sequence
  SARS-CoV-2/Wuhan/WIV05/2019__EPI_ISL_402128 spike protein mRNA gc (1-1273)
aggagagucccgcagucggcguccagcggcucugcuuguucgugugugugucguugcaggccuuauucaagcuuaccauguucguguuccuggugcugcugccccuggugagcagccagugcgugaaccugaccacccggacccagcugcccccugccuacaccaacagcuucacccggggcguguacuaccccgacaagguguuccggagcagcgugcugcacagcacccaggaccuguuccugcccuucuucagcaacgugaccugguuccacgccauccacgugagcggcaccaacggcaccaagcgguucgacaacccagugcugcccuucaacgacggcguguacuucgccagcaccgagaagucaaacaucauccggggcuggaucuucggcaccacccuggacagcaagacacagagccugcugaucgugaacaacgccaccaacguggugaucaaggugugcgaguuucaguucugcaacgaccccuuccugggcguguacuaccacaagaacaacaagagcuggauggagagcgaguuccgggucuacagcagcgcuaacaauugcaccuucgaguacgugagccagcccuuccugauggaccucgagggcaagcagggcaacuucaagaaccugcgggaguucguguucaagaacaucgauggcuacuucaagaucuacagcaagcacacccccaucaaccuggugcgggaccugccccagggauucagcgcccuggagccucugguggaccugcccaucggcaucaacaucaccagguuccagacccugcuggcccugcaccggagcuaccugacccccggcgacagcagcagcggcuggaccgccggcgccgccgcauacuacgugggcuaccugcagccacggaccuuccugcugaaguacaacgagaacggcaccaucaccgacgccguggacugcgcccuggacccccugagcgagaccaagugcacccuaaagagcuucaccguggagaagggcaucuaccagaccagcaacuuccgggugcagcccacugagagcaucgugcgguuccccaacauuaccaaccugugucccuucggcgagguguucaacgccacccgguucgccagcguguacgccuggaaccggaagcggaucagcaacugcguggccgacuacagcgugcuguacaacagcgccagcuucagcaccuucaagugcuacggcgugagcccuaccaagcugaacgaccugugcuucaccaacguguacgcugacagcuucgugauccggggcgacgaggugcggcagaucgcccccggccagaccggcaagaucgccgacuacaacuacaagcugcccgacgacuucaccggcugcgugaucgccuggaacagcaacaaccuggacagcaaggugggcggcaacuacaacuaccuguaccggcuguuccguaagagcaaccugaagccauucgagcgggacaucagcaccgagaucuaccaggccggcagcacccccugcaacgguguggagggcuuuaacugcuacuucccccugcagagcuacggcuuccagcccaccaacggcgugggcuaccagcccuaccgggugguggugcugagcuucgagcugcugcacgcccccgccaccgugugcggcccuaaaaagagcaccaaccuggugaagaacaagugcgugaacuucaauuucaacggccugaccggcaccggcgugcugaccgagagcaacaagaaguuccugcccuuccagcaguucggccgggauaucgccgacaccaccgacgcagugcgggacccccagacccuggagauccuggacaucaccccaugcagcuucggcggcgugagcgucaucacccccggcacaaacaccagcaaccagguggccgugcuguaccaggacgugaacugcaccgaggugcccguggccauccacgccgaccagcugacccccaccuggcggguguacagcaccggaagcaacguguuccagacccgggccggcugccugaucggcgccgagcacgugaacaacuccuacgagugcgacauccccaucggcgcuggcaucugcgccagcuaccagacccagaccaacagcccccggcgggcccggagcguggccagccagagcaucaucgccuacaccaugagcuuaggcgccgagaacagcguggccuacagcaacaacagcaucgcgaucccuaccaacuucaccaucagcgugaccaccgagauacugcccgugagcaugaccaagaccagcguggacuguaccauguacaucugcggcgacagcaccgagugcagcaaccugcugcugcaguacggcagcuucugcacccagcugaaccgggcccugaccggcaucgccguggagcaggacaagaacacccaagagguguucgcccaggugaagcagaucuacaagacucccccaaucaaggacuucggcggcuucaacuucagccagauccugcccgaccccagcaagcccagcaagcggagcuucaucgaggaccugcuguucaacaaggugacccuggccgacgccggcuucaucaagcaguacggcgauugccugggcgacaucgccgcucgggaccugaucugcgcccagaaguucaacgggcugaccgugcugcccccucugcugaccgacgagaugaucgcccaguacaccagcgcccugcuugccggcaccaucaccagcggcuggaccuucggcgccggcgcagcccugcagauccccuucgccaugcagauggccuaccgguucaacggcaucggcgugacccagaacgugcuguacgagaaccagaagcugaucgccaaccaguucaacagcgccaucggcaagauccaggacagccugagcagcaccgccagcgcccugggcaagcugcaggacguggugaaccagaacgcucaggcccugaacacccuggugaagcagcugagcagcaacuucggcgccaucagcucagugcugaaugacauccugagcaggcuggacaagguggaggccgaggugcagaucgaccggcugaucaccggccggcugcagagccugcagaccuacgugacccagcagcugauccgggccgccgagauccgggccagcgccaaccuggcagccaccaagaugagcgagugcgugcugggccagagcaagcggguggacuuuugcggcaagggcuaccaccugaugagcuucccccagagcgccccacacggcgugguguuccuccacgucacauacgugcccgcccaggagaagaacuucaccaccgcccccgccauuugccacgacggcaaggcucacuucccccgggagggcguguucgugagcaacggaacccacugguucgugacccagcggaacuucuacgagccccagaucaucaccaccgacaacaccuucgugagcggcaacugcgacguggugaucggcaucgugaacaacaccguguacgacccccugcagccugagcuggacagcuucaaggaggagcuggacaaguacuucaagaaccacaccagccccgauguggaccugggcgacaucagcggcaucaacgccagcguggugaacauccagaaggagaucgaccggcugaacgagguggccaagaaccugaacgagagccugaucgaccugcaggagcugggcaaguacgagcaguacaucaaguggcccugguacaucuggcugggcuucaucgccggccugaucgccaucgugauggugaccaucaugcugugcugcaugaccagcugcuguagcugccugaagggcugcugcagcugcggcagcugcugcaaguucgacgaggacgacagcgagccagugcugaagggcgugaagcugcacuacaccugaggacuagucccuguucccagagcccacuuuuuuuucuuuuuuugaaauaaaauagccugucuuucagaucuaaaaaaaaaaaaaaaaaaaaaaaaaaaaaaaaaaaaaaaaaaaaaaaaaaaaaaaaaaaaaaaaaaaaaaaaaaaaaaaaaaaaaaaaaaaaaaaaaaaa

SEQ ID NO: 24784 - RNA, 4070 nt, Artificial Sequence
  SARS-CoV-2/Wuhan/WIV05/2019__EPI_ISL_402128 spike protein mRNA gc (1-1273)(D614G)
aggagagucccgcagucggcguccagcggcucugcuuguucgugugugugucguugcaggccuuauucaagcuuaccauguucguguuccuggugcugcugccccuggugagcagccagugcgugaaccugaccacccggacccagcugcccccugccuacaccaacagcuucacccggggcguguacuaccccgacaagguguuccggagcagcgugcugcacagcacccaggaccuguuccugcccuucuucagcaacgugaccugguuccacgccauccacgugagcggcaccaacggcaccaagcgguucgacaacccagugcugcccuucaacgacggcguguacuucgccagcaccgagaagucaaacaucauccggggcuggaucuucggcaccacccuggacagcaagacacagagccugcugaucgugaacaacgccaccaacguggugaucaaggugugcgaguuucaguucugcaacgaccccuuccugggcguguacuaccacaagaacaacaagagcuggauggagagcgaguuccgggucuacagcagcgcuaacaauugcaccuucgaguacgugagccagcccuuccugauggaccucgagggcaagcagggcaacuucaagaaccugcgggaguucguguucaagaacaucgauggcuacuucaagaucuacagcaagcacacccccaucaaccuggugcgggaccugccccagggauucagcgcccuggagccucugguggaccugcccaucggcaucaacaucaccagguuccagacccugcuggcccugcaccggagcuaccugacccccggcgacagcagcagcggcuggaccgccggcgccgccgcauacuacgugggcuaccugcagccacggaccuuccugcugaaguacaacgagaacggcaccaucaccgacgccguggacugcgcccuggacccccugagcgagaccaagugcacccuaaagagcuucaccguggagaagggcaucuaccagaccagcaacuuccgggugcagcccacugagagcaucgugcgguuccccaacauuaccaaccugugucccuucggcgagguguucaacgccacccgguucgccagcguguacgccuggaaccggaagcggaucagcaacugcguggccgacuacagcgugcuguacaacagcgccagcuucagcaccuucaagugcuacggcgugagcccuaccaagcugaacgaccugugcuucaccaacguguacgcugacagcuucgugauccggggcgacgaggugcggcagaucgcccccggccagaccggcaagaucgccgacuacaacuacaagcugcccgacgacuucaccggcugcgugaucgccuggaacagcaacaaccuggacagcaaggugggcggcaacuacaacuaccuguaccggcuguuccguaagagcaaccugaagccauucgagcgggacaucagcaccgagaucuaccaggccggcagcacccccugcaacgguguggagggcuuuaacugcuacuucccccugcagagcuacggcuuccagcccaccaacggcgugggcuaccagcccuaccgggugguggugcugagcuucgagcugcugcacgcccccgccaccgugugcggcccuaaaaagagcaccaaccuggugaagaacaagugcgugaacuucaauuucaacggccugaccggcaccggcgugcugaccgagagcaacaagaaguuccugcccuuccagcaguucggccgggauaucgccgacaccaccgacgcagugcgggacccccagacccuggagauccuggacaucaccccaugcagcuucggcggcgugagcgucaucacccccggcacaaacaccagcaaccagguggccgugcuguaccagggagugaacugcaccgaggugcccguggccauccacgccgaccagcugacccccaccuggcggguguacagcaccggcagcaacguguuccagacccgggccggcugccugaucggcgccgagcacgugaacaacuccuacgagugcgacauccccaucggcgcuggcaucugcgccagcuaccagacccagaccaacagcccccggcgggcccggagcguggccagccagagcaucaucgccuacaccaugagcuuaggcgccgagaacagcguggccuacagcaacaacagcaucgcgaucccuaccaacuucaccaucagcgugaccaccgagauacugcccgugagcaugaccaagaccagcguggacuguaccauguacaucugcggcgacagcaccgagugcagcaaccugcugcugcaguacggcagcuucugcacccagcugaaccgggcccugaccggcaucgccguggagcaggacaagaacacccaagagguguucgcccaggugaagcagaucuacaagacucccccaaucaaggacuucggcggcuucaacuucagccagauccugcccgaccccagcaagcccagcaagcggagcuucaucgaggaccugcuguucaacaaggugacccuggccgacgccggcuucaucaagcaguacggcgacugccugggggauaucgccgcucgggaccugaucugcgcccagaaguucaacggccugaccgugcugcccccucugcugaccgacgagaugaucgcccaguacaccagcgcccugcuugccggcaccaucaccagcggcuggaccuucggcgccggcgcagcccugcagauccccuucgccaugcagauggccuaccgguucaacggcaucggcgugacccagaacgugcuguacgagaaccagaagcugaucgccaaccaguucaacagcgccaucggcaagauccaggacagccugagcagcaccgccagcgcccugggcaagcugcaggacguggugaaccagaacgcucaggcccugaacacccuggugaagcagcugagcagcaacuucggcgccaucagcucagugcugaaugacauccugagcaggcuggacaagguggaggccgaggugcagaucgaccggcugaucaccggccggcugcagagccugcagaccuacgugacccagcagcugauccgggccgccgagauccgggccagcgccaaccuggcagccaccaagaugagcgagugcgugcugggccagagcaagcggguggacuuuugcggcaagggcuaccaccugaugagcuucccccagagcgccccacacggcgugguguuccuccacgucacauacgugcccgcccaggagaagaacuucaccaccgcccccgccauuugccacgacggcaaggcucacuucccccgggagggaguguucgugagcaacggcacccacugguucgugacccagcggaacuucuacgagccccagaucaucaccaccgacaacaccuucgugagcggcaacugcgacguggugaucggcaucgugaacaacaccguguacgacccccugcagccugagcuggacagcuucaaggaggagcuggacaaguacuucaagaaccacaccagccccgacguggaucugggcgacaucagcggcaucaacgccagcguggugaacauccagaaggagaucgaccggcugaacgagguggccaagaaccugaacgagagccugaucgaccugcaggagcugggcaaguacgagcaguacaucaaguggcccugguacaucuggcugggcuucaucgccggccugaucgccaucgugauggugaccaucaugcugugcugcaugaccagcugcuguagcugccugaagggcugcugcagcugcggcagcugcugcaaguucgacgaggacgacagcgagccagugcugaagggcgugaagcugcacuacaccugaggacuagucccuguucccagagcccacuuuuuuuucuuuuuuugaaauaaaauagccugucuuucagaucuaaaaaaaaaaaaaaaaaaaaaaaaaaaaaaaaaaaaaaaaaaaaaaaaaaaaaaaaaaaaaaaaaaaaaaaaaaaaaaaaaaaaaaaaaaaaaaaaaaaa

SEQ ID NO: 24785 - RNA, 4070 nt, Artificial Sequence
  SARS-CoV-2/Wuhan/WIV05/2019__EPI_ISL_402128 spike protein mRNA gc (1-1273)(A222V_D614G)
aggagagucccgcagucggcguccagcggcucugcuuguucgugugugugucguugcaggccuuauucaagcuuaccauguucguguuccuggugcugcugccccuggugagcagccagugcgugaaccugaccacccggacccagcugcccccugccuacaccaacagcuucacccggggcguguacuaccccgacaagguguuccggagcagcgugcugcacagcacccaggaccuguuccugcccuucuucagcaacgugaccugguuccacgccauccacgugagcggcaccaacggcaccaagcgguucgacaacccagugcugcccuucaacgacggcguguacuucgccagcaccgagaagucaaacaucauccggggcuggaucuucggcaccacccuggacagcaagacacagagccugcugaucgugaacaacgccaccaacguggugaucaaggugugcgaguuucaguucugcaacgaccccuuccugggcguguacuaccacaagaacaacaagagcuggauggagagcgaguuccgggucuacagcagcgcuaacaauugcaccuucgaguacgugagccagcccuuccugauggaccucgagggcaagcagggcaacuucaagaaccugcgggaguucguguucaagaacaucgauggcuacuucaagaucuacagcaagcacacccccaucaaccuggugcgggaccugccccagggauucagcgugcuggagccucugguggaccugcccaucggcaucaacaucaccagguuccagacccugcuggcccugcaccggagcuaccugacccccggcgacagcagcagcggcuggaccgccggcgccgccgccuacuacgugggcuaccugcagccacggaccuuccugcugaaguacaacgagaacggcaccaucaccgacgcaguggacugcgcccuggacccccugagcgagaccaagugcacccuaaagagcuucaccguggagaagggcaucuaccagaccagcaacuuccgggugcagcccacugagagcaucgugcgguuccccaacauuaccaaccugugucccuucggcgagguguucaacgccacccgguucgccagcguguacgccuggaaccggaagcggaucagcaacugcguggccgacuacagcgugcuguacaacagcgccagcuucagcaccuucaagugcuacggcgugagcccuaccaagcugaacgaccugugcuucaccaacguguacgccgacagcuucgugauccggggcgacgaggugcggcagaucgcucccggccagaccggcaagaucgccgacuacaacuacaagcugcccgacgacuucaccggcugcgugaucgccuggaacagcaacaaccuggacagcaaggugggcggcaacuacaacuaccuguaccggcuguuccguaagagcaaccugaagccauucgagcgggacaucagcaccgagaucuaccaggccggcagcacccccugcaacgguguggagggcuuuaacugcuacuucccccugcagagcuacggcuuccagcccaccaacggcgugggcuaccagcccuaccgggugguggugcugagcuucgagcugcugcacgcccccgccaccgugugcggcccuaaaaagagcaccaaccuggugaagaacaagugcgugaacuucaauuucaacggccugaccggcaccggcgugcugaccgagagcaacaagaaguuccugcccuuccagcaguucggccgggauaucgccgacaccaccgacgccgugcgggacccccagacccuggagauccuggacaucaccccaugcagcuucggcggcgucagcgugaucacccccggcacaaacaccagcaaccagguggcagugcuguaccagggagugaacugcaccgaggugcccguggccauccacgccgaccagcugacccccaccuggcggguguacagcaccggcagcaacguguuccagacccgggccggcugccugaucggcgccgagcacgugaacaacuccuacgagugcgacauccccaucggcgccggcaucugcgcuagcuaccagacccagaccaacagcccccggcgggcccggagcguggccagccagagcaucaucgccuacaccaugagcuuaggcgccgagaacagcguggccuacagcaacaacagcaucgccaucccuaccaacuucaccaucagcgugaccaccgagauacugcccgugagcaugaccaagaccagcguggacuguaccauguacaucugcggcgacagcaccgagugcagcaaccugcugcugcaguacggcagcuucugcacccagcugaaccgggcgcugaccggcaucgccguggagcaggacaagaacacccaagagguguucgcccaggugaagcagaucuacaagacucccccaaucaaggacuucggcggcuucaacuucagccagauccugcccgaccccagcaagcccagcaagcggagcuucaucgaggaccugcuguucaacaaggugacccuggccgacgccggcuucaucaagcaguacggcgacugccugggggauaucgccgcccgggaccugaucugcgcucagaaguucaacggccugaccgugcugcccccucugcugaccgacgagaugaucgcccaguacaccagcgcccugcuugccggcaccaucaccagcggcuggaccuucggcgccggcgccgcacugcagauccccuucgccaugcagauggccuaccgguucaacggcaucggcgugacccagaacgugcuguacgagaaccagaagcugaucgccaaccaguucaacagcgccaucggcaagauccaggacagccugagcagcaccgccagcgcccugggcaagcugcaggacguggugaaccagaacgcccaggcucugaacacccuggugaagcagcugagcagcaacuucggcgccaucagcucagugcugaaugacauccugagcaggcuggacaagguggaggccgaggugcagaucgaccggcugaucaccggccggcugcagagccugcagaccuacgugacccagcagcugauccgggccgccgagauccgggccagcgccaaccuggccgcaaccaagaugagcgagugcgugcugggccagagcaagcggguggacuuuugcggcaagggcuaccaccugaugagcuucccccagagcgccccacacggcguggucuuccuccacgugacauacgugcccgcccaggagaagaacuucaccaccgcccccgccauuugccacgacggcaaggcccacuucccccgggagggaguguucgugagcaacggcacccacugguucgugacccagcggaacuucuacgagccccagaucaucaccaccgacaacaccuucgugagcggcaacugcgacguggugaucggcaucgugaacaacaccguguacgacccccugcagccugagcuggacagcuucaaggaggagcuggacaaguacuucaagaaccacaccagccccgacguggaucugggcgacaucagcggcaucaacgcuagcguggugaacauccagaaggagaucgaccggcugaacgagguggccaagaaccugaacgagagccugaucgaccugcaggagcugggcaaguacgagcaguacaucaaguggcccugguacaucuggcugggcuucaucgccggccugaucgccaucgugauggugaccaucaugcugugcugcaugaccagcugcuguagcugccugaagggcugcugcagcugcggcagcugcugcaaguucgacgaggacgacagcgagccagugcugaagggcgugaagcugcacuacaccugaggacuagucccuguucccagagcccacuuuuuuuucuuuuuuugaaauaaaauagccugucuuucagaucuaaaaaaaaaaaaaaaaaaaaaaaaaaaaaaaaaaaaaaaaaaaaaaaaaaaaaaaaaaaaaaaaaaaaaaaaaaaaaaaaaaaaaaaaaaaaaaaaaaaa

SEQ ID NO: 24786 - RNA, 4070 nt, Artificial Sequence
  SARS-CoV-2/Wuhan/WIV05/2019__EPI_ISL_402128 spike protein mRNA gc (1-1273)(N439K_D614G)
aggagagucccgcagucggcguccagcggcucugcuuguucgugugugugucguugcaggccuuauucaagcuuaccauguucguguuccuggugcugcugccccuggugagcagccagugcgugaaccugaccacccggacccagcugcccccugccuacaccaacagcuucacccggggcguguacuaccccgacaagguguuccggagcagcgugcugcacagcacccaggaccuguuccugcccuucuucagcaacgugaccugguuccacgccauccacgugagcggcaccaacggcaccaagcgguucgacaacccagugcugcccuucaacgacggcguguacuucgccagcaccgagaagucaaacaucauccggggcuggaucuucggcaccacccuggacagcaagacacagagccugcugaucgugaacaacgccaccaacguggugaucaaggugugcgaguuucaguucugcaacgaccccuuccugggcguguacuaccacaagaacaacaagagcuggauggagagcgaguuccgggucuacagcagcgcuaacaauugcaccuucgaguacgugagccagcccuuccugauggaccucgagggcaagcagggcaacuucaagaaccugcgggaguucguguucaagaacaucgauggcuacuucaagaucuacagcaagcacacccccaucaaccuggugcgggaccugccccagggauucagcgcccuggagccucugguggaccugcccaucggcaucaacaucaccagguuccagacccugcuggcccugcaccggagcuaccugacccccggcgacagcagcagcggcuggaccgccggcgccgccgcauacuacgugggcuaccugcagccacggaccuuccugcugaaguacaacgagaacggcaccaucaccgacgccguggacugcgcccuggacccccugagcgagaccaagugcacccuaaagagcuucaccguggagaagggcaucuaccagaccagcaacuuccgggugcagcccacugagagcaucgugcgguuccccaacauuaccaaccugugucccuucggcgagguguucaacgccacccgguucgccagcguguacgccuggaaccggaagcggaucagcaacugcguggccgacuacagcgugcuguacaacagcgccagcuucagcaccuucaagugcuacggcgugagcccuaccaagcugaacgaccugugcuucaccaacguguacgcugacagcuucgugauccggggcgacgaggugcggcagaucgcccccggccagaccggcaagaucgccgacuacaacuacaagcugcccgacgacuucaccggcugcgugaucgccuggaacagcaagaaccuggacagcaaggugggcggcaacuacaacuaccuguaccggcuguuccguaagagcaaccugaagccauucgagcgggacaucagcaccgagaucuaccaggccggcagcacccccugcaacgguguggagggcuuuaacugcuacuucccccugcagagcuacggcuuccagcccaccaacggcgugggcuaccagcccuaccgggugguggugcugagcuucgagcugcugcacgcccccgccaccgugugcggcccuaaaaagagcaccaaccuggugaagaacaagugcgugaacuucaacuucaauggccugaccggcaccggcgugcugaccgagagcaacaagaaguuccugcccuuccagcaguucggccgggauaucgccgacaccaccgacgcagugcgggacccccagacccuggagauccuggacaucaccccaugcagcuucggcggcgugagcgucaucacccccggcacaaacaccagcaaccagguggccgugcuguaccagggagugaacugcaccgaggugcccguggccauccacgccgaccagcugacccccaccuggcggguguacagcaccggcagcaacguguuccagacccgggccggcugccugaucggcgccgagcacgugaacaacuccuacgagugcgacauccccaucggcgcuggcaucugcgccagcuaccagacccagaccaacagcccccggcgggcccggagcguggccagccagagcaucaucgccuacaccaugagcuuaggcgccgagaacagcguggccuacagcaacaacagcaucgcgaucccuaccaacuucaccaucagcgugaccaccgagauacugcccgugagcaugaccaagaccagcguggacuguaccauguacaucugcggcgacagcaccgagugcagcaaccugcugcugcaguacggcagcuucugcacccagcugaaccgggcccugaccggcaucgccguggagcaggacaagaacacccaagagguguucgcccaggugaagcagaucuacaagacucccccaaucaaggacuucggcggcuucaacuucagccagauccugcccgaccccagcaagcccagcaagcggagcuucaucgaggaccugcuguucaacaaggugacccuggccgacgccggcuucaucaagcaguacggcgacugccugggggauaucgccgcucgggaccugaucugcgcccagaaguucaacggccugaccgugcugcccccucugcugaccgacgagaugaucgcccaguacaccagcgcccugcuugccggcaccaucaccagcggcuggaccuucggcgccggcgcagcccugcagauccccuucgccaugcagauggccuaccgguucaacggcaucggcgugacccagaacgugcuguacgagaaccagaagcugaucgccaaccaguucaacagcgccaucggcaagauccaggacagccugagcagcaccgccagcgcccugggcaagcugcaggacguggugaaccagaacgcucaggcccugaacacccuggugaagcagcugagcagcaacuucggcgccaucagcucagugcugaacgacauccugagcaggcuggacaagguggaggccgaggugcagaucgaccggcugaucaccggccggcugcagagccugcagaccuacgugacccagcagcugauccgggccgccgagauccgggccagcgccaaucuggcagccaccaagaugagcgagugcgugcugggccagagcaagcggguggacuuuugcggcaagggcuaccaccugaugagcuucccccagagcgccccacacggcgugguguuccuccacgucacauacgugcccgcccaggagaagaacuucaccaccgcccccgccauuugccacgacggcaaggcucacuucccccgggagggaguguucgugagcaacggcacccacugguucgugacccagcggaacuucuacgagccccagaucaucaccaccgacaacaccuucgugagcggcaacugcgacguggugaucggcaucgugaacaacaccguguacgacccccugcagccugagcuggacagcuucaaggaggagcuggacaaguacuucaagaaccacaccagccccgacguggaucugggcgacaucagcggcaucaacgccagcguggugaacauccagaaggagaucgaccggcugaacgagguggccaagaaccugaacgagagccugaucgaccugcaggagcugggcaaguacgagcaguacaucaaguggcccugguacaucuggcugggcuucaucgccggccugaucgccaucgugauggugaccaucaugcugugcugcaugaccagcugcuguagcugccugaagggcugcugcagcugcggcagcugcugcaaguucgacgaggacgacagcgagccagugcugaagggcgugaagcugcacuacaccugaggacuagucccuguucccagagcccacuuuuuuuucuuuuuuugaaauaaaauagccugucuuucagaucuaaaaaaaaaaaaaaaaaaaaaaaaaaaaaaaaaaaaaaaaaaaaaaaaaaaaaaaaaaaaaaaaaaaaaaaaaaaaaaaaaaaaaaaaaaaaaaaaaaaa

SEQ ID NO: 24787 - RNA, 4070 nt, Artificial Sequence
  SARS-CoV-2/Wuhan/WIV05/2019__EPI_ISL_402128 spike protein mRNA gc (1-1273)(S477N_D614G)
aggagagucccgcagucggcguccagcggcucugcuuguucgugugugugucguugcaggccuuauucaagcuuaccauguucguguuccuggugcugcugccccuggugagcagccagugcgugaaccugaccacccggacccagcugcccccugccuacaccaacagcuucacccggggcguguacuaccccgacaagguguuccggagcagcgugcugcacagcacccaggaccuguuccugcccuucuucagcaacgugaccugguuccacgccauccacgugagcggcaccaacggcaccaagcgguucgacaacccagugcugcccuucaacgacggcguguacuucgccagcaccgagaagucaaacaucauccggggcuggaucuucggcaccacccuggacagcaagacacagagccugcugaucgugaacaacgccaccaacguggugaucaaggugugcgaguuucaguucugcaacgaccccuuccugggcguguacuaccacaagaacaacaagagcuggauggagagcgaguuccgggucuacagcagcgcuaacaauugcaccuucgaguacgugagccagcccuuccugauggaccucgagggcaagcagggcaacuucaagaaccugcgggaguucguguucaagaacaucgauggcuacuucaagaucuacagcaagcacacccccaucaaccuggugcgggaccugccccagggauucagcgcccuggagccucugguggaccugcccaucggcaucaacaucaccagguuccagacccugcuggcccugcaccggagcuaccugacccccggcgacagcagcagcggcuggaccgccggcgccgccgcauacuacgugggcuaccugcagccacggaccuuccugcugaaguacaacgagaacggcaccaucaccgacgccguggacugcgcccuggacccccugagcgagaccaagugcacccuaaagagcuucaccguggagaagggcaucuaccagaccagcaacuuccgggugcagcccacugagagcaucgugcgguuccccaacauuaccaaccugugucccuucggcgagguguucaacgccacccgguucgccagcguguacgccuggaaccggaagcggaucagcaacugcguggccgacuacagcgugcuguacaacagcgccagcuucagcaccuucaagugcuacggcgugagcccuaccaagcugaacgaccugugcuucaccaacguguacgcugacagcuucgugauccggggcgacgaggugcggcagaucgcccccggccagaccggcaagaucgccgacuacaacuacaagcugcccgacgacuucaccggcugcgugaucgccuggaacagcaacaaccuggacagcaaggugggcggcaacuacaacuaccuguaccggcuguuccguaagagcaaccugaagccauucgagcgggacaucagcaccgagaucuaccaggccggcaacacccccugcaacgguguggagggcuuuaacugcuacuucccccugcagagcuacggcuuccagcccaccaacggcgugggcuaccagcccuaccgggugguggugcugagcuucgagcugcugcacgcccccgccaccgugugcggcccuaaaaagagcaccaaccuggugaagaacaagugcgugaauuucaacuucaacggccugaccggcaccggcgugcugaccgagagcaacaagaaguuccugcccuuccagcaguucggccgggauaucgccgacaccaccgacgcagugcgggacccccagacccuggagauccuggacaucaccccaugcagcuucggcggcgugagcgucaucacccccggcacaaacaccagcaaccagguggccgugcuguaccagggagugaacugcaccgaggugcccguggccauccacgccgaccagcugacccccaccuggcggguguacagcaccggcagcaacguguuccagacccgggccggcugccugaucggcgccgagcacgugaacaacagcuacgagugcgacauccccaucggcgcuggcaucugcgccuccuaccagacccagaccaacagcccccggcgggcccggagcguggccagccagagcaucaucgccuacaccaugagcuuaggcgccgagaacagcguggccuacagcaacaacagcaucgcgaucccuaccaacuucaccaucagcgugaccaccgagauacugcccgugagcaugaccaagaccagcguggacuguaccauguacaucugcggcgacagcaccgagugcagcaaccugcugcugcaguacggcagcuucugcacccagcugaaccgggcccugaccggcaucgccguggagcaggacaagaacacccaagagguguucgcccaggugaagcagaucuacaagacucccccaaucaaggacuucggcggcuucaacuucagccagauccugcccgaccccagcaagcccagcaagcggagcuucaucgaggaccugcuguucaacaaggugacccuggccgacgccggcuucaucaagcaguacggcgacugccugggggauaucgccgcucgggaccugaucugcgcccagaaguucaacggccugaccgugcugcccccucugcugaccgacgagaugaucgcccaguacaccagcgcccugcuugccggcaccaucaccagcggcuggaccuucggcgccggcgcagcccugcagauccccuucgccaugcagauggccuaccgguucaacggcaucggcgugacccagaacgugcuguacgagaaccagaagcugaucgccaaccaguucaacagcgccaucggcaagauccaggacagccugagcagcaccgccagcgcccugggcaagcugcaggacguggugaaccagaacgcucaggcccugaacacccuggugaagcagcugagcagcaauuucggcgccaucagcagcgugcugaacgacauccugucaaggcuggacaagguggaggccgaggugcagaucgaccggcugaucaccggccggcugcagagccugcagaccuacgugacccagcagcugauccgggccgccgagauccgggccagcgccaaccuggcagccaccaagaugagcgagugcgugcugggccagagcaagcggguggacuuuugcggcaagggcuaccaccugaugagcuucccccagagcgccccacacggcgugguguuccuccacgucacauacgugcccgcccaggagaagaacuucaccaccgcccccgccauuugccacgacggcaaggcucacuucccccgggagggaguguucgugagcaacggcacccacugguucgugacccagcggaacuucuacgagccccagaucaucaccaccgacaacaccuucgugagcggcaacugcgacguggugaucggcaucgugaacaacaccguguacgacccccugcagccugagcuggacagcuucaaggaggagcuggacaaguacuucaagaaccacaccagccccgacguggaucugggcgacaucagcggcaucaacgccagcguggugaacauccagaaggagaucgaccggcugaacgagguggccaagaaccugaacgagagccugaucgaccugcaggagcugggcaaguacgagcaguacaucaaguggcccugguacaucuggcugggcuucaucgccggccugaucgccaucgugauggugaccaucaugcugugcugcaugaccagcugcuguagcugccugaagggcugcugcagcugcggcagcugcugcaaguucgacgaggacgacagcgagccagugcugaagggcgugaagcugcacuacaccugaggacuagucccuguucccagagcccacuuuuuuuucuuuuuuugaaauaaaauagccugucuuucagaucuaaaaaaaaaaaaaaaaaaaaaaaaaaaaaaaaaaaaaaaaaaaaaaaaaaaaaaaaaaaaaaaaaaaaaaaaaaaaaaaaaaaaaaaaaaaaaaaaaaaa

SEQ ID NO: 24788 - RNA, 4070 nt, Artificial Sequence
  SARS-CoV-2/Wuhan/WIV05/2019__EPI_ISL_402128 spike protein mRNA gc (1-1273)(N501Y_D614G)
aggagagucccgcagucggcguccagcggcucugcuuguucgugugugugucguugcaggccuuauucaagcuuaccauguucguguuccuggugcugcugccccuggugagcagccagugcgugaaccugaccacccggacccagcugcccccugccuacaccaacagcuucacccggggcguguacuaccccgacaagguguuccggagcagcgugcugcacagcacccaggaccuguuccugcccuucuucagcaacgugaccugguuccacgccauccacgugagcggcaccaacggcaccaagcgguucgacaacccagugcugcccuucaacgacggcguguacuucgccagcaccgagaagucaaacaucauccggggcuggaucuucggcaccacccuggacagcaagacacagagccugcugaucgugaacaacgccaccaacguggugaucaaggugugcgaguuucaguucugcaacgaccccuuccugggcguguacuaccacaagaacaacaagagcuggauggagagcgaguuccgggucuacagcagcgcuaacaauugcaccuucgaguacgugagccagcccuuccugauggaccucgagggcaagcagggcaacuucaagaaccugcgggaguucguguucaagaacaucgauggcuacuucaagaucuacagcaagcacacccccaucaaccuggugcgggaccugccccagggauucagcgcccuggagccucugguggaccugcccaucggcaucaacaucaccagguuccagacccugcuggcccugcaccggagcuaccugacccccggcgacagcagcagcggcuggaccgccggcgccgccgcauacuacgugggcuaccugcagccacggaccuuccugcugaaguacaacgagaacggcaccaucaccgacgccguggacugcgcccuggacccccugagcgagaccaagugcacccuaaagagcuucaccguggagaagggcaucuaccagaccagcaacuuccgggugcagcccacugagagcaucgugcgguuccccaacauuaccaaccugugucccuucggcgagguguucaacgccacccgguucgccagcguguacgccuggaaccggaagcggaucagcaacugcguggccgacuacagcgugcuguacaacagcgccagcuucagcaccuucaagugcuacggcgugagcccuaccaagcugaacgaccugugcuucaccaacguguacgcugacagcuucgugauccggggcgacgaggugcggcagaucgcccccggccagaccggcaagaucgccgacuacaacuacaagcugcccgacgacuucaccggcugcgugaucgccuggaacagcaacaaccuggacagcaaggugggcggcaacuacaacuaccuguaccggcuguuccguaagagcaaccugaagccauucgagcgggacaucagcaccgagaucuaccaggccggcagcacccccugcaacgguguggagggcuuuaacugcuacuucccccugcagagcuacggcuuccagcccaccuacggcgugggcuaccagcccuaccgggugguggugcugagcuucgagcugcugcacgcccccgccaccgugugcggcccuaaaaagagcaccaaccuggugaagaacaagugcgugaacuucaacuucaauggccugaccggcaccggcgugcugaccgagagcaacaagaaguuccugcccuuccagcaguucggccgggauaucgccgacaccaccgacgcagugcgggacccccagacccuggagauccuggacaucaccccaugcagcuucggcggcgugagcgucaucacccccggcacaaacaccagcaaccagguggccgugcuguaccagggagugaacugcaccgaggugcccguggccauccacgccgaccagcugacccccaccuggcggguguacagcaccggcagcaacguguuccagacccgggccggcugccugaucggcgccgagcacgugaacaacuccuacgagugcgacauccccaucggcgcuggcaucugcgccagcuaccagacccagaccaacagcccccggcgggcccggagcguggccagccagagcaucaucgccuacaccaugagcuuaggcgccgagaacagcguggccuacagcaacaacagcaucgcgaucccuaccaacuucaccaucagcgugaccaccgagauacugcccgugagcaugaccaagaccagcguggacuguaccauguacaucugcggcgacagcaccgagugcagcaaccugcugcugcaguacggcagcuucugcacccagcugaaccgggcccugaccggcaucgccguggagcaggacaagaacacccaagagguguucgcccaggugaagcagaucuacaagacucccccaaucaaggacuucggcggcuucaacuucagccagauccugcccgaccccagcaagcccagcaagcggagcuucaucgaggaccugcuguucaacaaggugacccuggccgacgccggcuucaucaagcaguacggcgacugccugggggauaucgccgcucgggaccugaucugcgcccagaaguucaacggccugaccgugcugcccccucugcugaccgacgagaugaucgcccaguacaccagcgcccugcuugccggcaccaucaccagcggcuggaccuucggcgccggcgcagcccugcagauccccuucgccaugcagauggccuaccgguucaacggcaucggcgugacccagaacgugcuguacgagaaccagaagcugaucgccaaccaguucaacagcgccaucggcaagauccaggacagccugagcagcaccgccagcgcccugggcaagcugcaggacguggugaaccagaacgcucaggcccugaacacccuggugaagcagcugagcagcaacuucggcgccaucagcucagugcugaacgacauccugagcaggcuggacaagguggaggccgaggugcagaucgaccggcugaucaccggccggcugcagagccugcagaccuacgugacccagcagcugauccgggccgccgagauccgggccagcgccaaucuggcagccaccaagaugagcgagugcgugcugggccagagcaagcggguggacuuuugcggcaagggcuaccaccugaugagcuucccccagagcgccccacacggcgugguguuccuccacgucacauacgugcccgcccaggagaagaacuucaccaccgcccccgccauuugccacgacggcaaggcucacuucccccgggagggaguguucgugagcaacggcacccacugguucgugacccagcggaacuucuacgagccccagaucaucaccaccgacaacaccuucgugagcggcaacugcgacguggugaucggcaucgugaacaacaccguguacgacccccugcagccugagcuggacagcuucaaggaggagcuggacaaguacuucaagaaccacaccagccccgacguggaucugggcgacaucagcggcaucaacgccagcguggugaacauccagaaggagaucgaccggcugaacgagguggccaagaaccugaacgagagccugaucgaccugcaggagcugggcaaguacgagcaguacaucaaguggcccugguacaucuggcugggcuucaucgccggccugaucgccaucgugauggugaccaucaugcugugcugcaugaccagcugcuguagcugccugaagggcugcugcagcugcggcagcugcugcaaguucgacgaggacgacagcgagccagugcugaagggcgugaagcugcacuacaccugaggacuagucccuguucccagagcccacuuuuuuuucuuuuuuugaaauaaaauagccugucuuucagaucuaaaaaaaaaaaaaaaaaaaaaaaaaaaaaaaaaaaaaaaaaaaaaaaaaaaaaaaaaaaaaaaaaaaaaaaaaaaaaaaaaaaaaaaaaaaaaaaaaaaa

SEQ ID NO: 24789 - RNA, 4064 nt, Artificial Sequence
  SARS-CoV-2/Wuhan/WIV05/2019__EPI_ISL_402128 spike protein mRNA gc (1-1273)(H69del_V70del_D614G)
aggagagucccgcagucggcguccagcggcucugcuuguucgugugugugucguugcaggccuuauucaagcuuaccauguucguguuccuggugcugcugccccuggugagcagccagugcgugaaccugaccacccggacccagcugcccccugccuacaccaacagcuucacccggggcguguacuaccccgacaagguguuccggagcagcgugcugcacagcacccaggaccuguuccugcccuucuucagcaacgugaccugguuccacgccaucagcggcaccaacggcaccaagcgguucgacaacccagugcugcccuucaacgacggcguguacuucgccagcaccgagaagucaaacaucauccggggcuggaucuucggcaccacccuggacagcaagacacagagccugcugaucgugaacaacgccaccaacguggugaucaaggugugcgaguuucaguucugcaacgaccccuuccugggcguguacuaccacaagaacaacaagagcuggauggagagcgaguuccggguguacagcagcgcuaacaauugcaccuucgaguacgucagccagcccuuccugauggaccucgagggcaagcagggcaacuucaagaaccugcgggaguucguguucaagaacaucgauggcuacuucaagaucuacagcaagcacacccccaucaaccuggugcgggaccugccccagggauucagcgcccuggagccucugguggaccugcccaucggcaucaacaucaccagguuccagacccugcuggcccugcaccggagcuaccugacccccggcgacagcagcagcggcuggaccgccggcgccgccgcauacuacgugggcuaccugcagccacggaccuuccugcugaaguacaacgagaacggcaccaucaccgacgccguggacugcgcccuggacccccugagcgagaccaagugcacccuaaagagcuucaccguggagaagggcaucuaccagaccagcaacuuccgggugcagcccacugagagcaucgugcgguuccccaacauuaccaaccugugucccuucggcgagguguucaacgccacccgguucgccagcguguacgccuggaaccggaagcggaucagcaacugcguggccgacuacagcgugcuguacaacagcgccagcuucagcaccuucaagugcuacggcgugagcccuaccaagcugaacgaccugugcuucaccaacguguacgcugacagcuucgugauccggggcgacgaggugcggcagaucgcccccggccagaccggcaagaucgccgacuacaacuacaagcugcccgacgacuucaccggcugcgugaucgccuggaacagcaacaaccuggacagcaaggugggcggcaacuacaacuaccuguaccggcuguuccguaagagcaaccugaagccauucgagcgggacaucagcaccgagaucuaccaggccggcagcacccccugcaacgguguggagggcuuuaacugcuacuucccccugcagagcuacggcuuccagcccaccaacggcgugggcuaccagcccuaccgggugguggugcugagcuucgagcugcugcacgcccccgccaccgugugcggcccuaaaaagagcaccaaccuggugaagaacaagugcgugaacuucaauuucaacggccugaccggcaccggcgugcugaccgagagcaacaagaaguuccugcccuuccagcaguucggccgggauaucgccgacaccaccgacgcagugcgggacccccagacccuggagauccuggacaucaccccaugcagcuucggcggcgugagcgugaucacccccggcacaaacaccagcaaccaggucgccgugcuguaccagggagugaacugcaccgaggugcccguggccauccacgccgaccagcugacccccaccuggcggguguacagcaccggcagcaacguguuccagacccgggccggcugccugaucggcgccgagcacgugaacaacuccuacgagugcgacauccccaucggcgcuggcaucugcgccagcuaccagacccagaccaacagcccccggcgggcccggagcguggccagccagagcaucaucgccuacaccaugagcuuaggcgccgagaacagcguggccuacagcaacaacagcaucgcgaucccuaccaacuucaccaucagcgugaccaccgagauacugcccgugagcaugaccaagaccagcguggacuguaccauguacaucugcggcgacagcaccgagugcagcaaccugcugcugcaguacggcagcuucugcacccagcugaaccgggcccugaccggcaucgccguggagcaggacaagaacacccaagagguguucgcccaggugaagcagaucuacaagacucccccaaucaaggacuucggcggcuucaacuucagccagauccugcccgaccccagcaagcccagcaagcggagcuucaucgaggaccugcuguucaacaaggugacccuggccgacgccggcuucaucaagcaguacggcgacugccugggggauaucgccgcucgggaccugaucugcgcccagaaguucaacggccugaccgugcugcccccucugcugaccgacgagaugaucgcccaguacaccagcgcccugcuugccggcaccaucaccagcggcuggaccuucggcgccggcgcagcccugcagauccccuucgccaugcagauggccuaccgguucaacggcaucggcgugacccagaacgugcuguacgagaaccagaagcugaucgccaaccaguucaacagcgccaucggcaagauccaggacagccugagcagcaccgccagcgcccugggcaagcugcaggacguggugaaccagaacgcucaggcccugaacacccuggugaagcagcugagcagcaacuucggcgccaucagcucagugcugaaugacauccugagcaggcuggacaagguggaggccgaggugcagaucgaccggcugaucaccggccggcugcagagccugcagaccuacgugacccagcagcugauccgggccgccgagauccgggccagcgccaaccuggcagccaccaagaugagcgagugcgugcugggccagagcaagcggguggacuuuugcggcaagggcuaccaccugaugagcuucccccagagcgccccacacggcgugguguuccuccacgugacauacguccccgcccaggagaagaacuucaccaccgcccccgccauuugccacgacggcaaggcucacuucccccgggagggaguguucgugagcaacggcacccacugguucgugacccagcggaacuucuacgagccccagaucaucaccaccgacaacaccuucgugagcggcaacugcgacguggugaucggcaucgugaacaacaccguguacgacccccugcagccugagcuggacagcuucaaggaggagcuggacaaguacuucaagaaccacaccagccccgacguggaucugggcgacaucagcggcaucaacgccagcguggugaacauccagaaggagaucgaccggcugaacgagguggccaagaaccugaacgagagccugaucgaccugcaggagcugggcaaguacgagcaguacaucaaguggcccugguacaucuggcugggcuucaucgccggccugaucgccaucgugauggugaccaucaugcugugcugcaugaccagcugcuguagcugccugaagggcugcugcagcugcggcagcugcugcaaguucgacgaggacgacagcgagccagugcugaagggcgugaagcugcacuacaccugaggacuagucccuguucccagagcccacuuuuuuuucuuuuuuugaaauaaaauagccugucuuucagaucuaaaaaaaaaaaaaaaaaaaaaaaaaaaaaaaaaaaaaaaaaaaaaaaaaaaaaaaaaaaaaaaaaaaaaaaaaaaaaaaaaaaaaaaaaaaaaaaaaaaa

SEQ ID NO: 24790 - RNA, 4070 nt, Artificial Sequence
  SARS-CoV-2/Wuhan/WIV05/2019__EPI_ISL_402128 spike protein mRNA gc (1-1273)(Y453F_D614G)
aggagagucccgcagucggcguccagcggcucugcuuguucgugugugugucguugcaggccuuauucaagcuuaccauguucguguuccuggugcugcugccccuggugagcagccagugcgugaaccugaccacccggacccagcugcccccugccuacaccaacagcuucacccggggcguguacuaccccgacaagguguuccggagcagcgugcugcacagcacccaggaccuguuccugcccuucuucagcaacgugaccugguuccacgccauccacgugagcggcaccaacggcaccaagcgguucgacaacccagugcugcccuucaacgacggcguguacuucgccagcaccgagaagucaaacaucauccggggcuggaucuucggcaccacccuggacagcaagacacagagccugcugaucgugaacaacgccaccaacguggugaucaaggugugcgaguuucaguucugcaacgaccccuuccugggcguguacuaccacaagaacaacaagagcuggauggagagcgaguuccgggucuacagcagcgcuaacaauugcaccuucgaguacgugagccagcccuuccugauggaccucgagggcaagcagggcaacuucaagaaccugcgggaguucguguucaagaacaucgauggcuacuucaagaucuacagcaagcacacccccaucaaccuggugcgggaccugccccagggauucagcgcccuggagccucugguggaccugcccaucggcaucaacaucaccagguuccagacccugcuggcccugcaccggagcuaccugacccccggcgacagcagcagcggcuggaccgccggcgccgccgcauacuacgugggcuaccugcagccacggaccuuccugcugaaguacaacgagaacggcaccaucaccgacgccguggacugcgcccuggacccccugagcgagaccaagugcacccuaaagagcuucaccguggagaagggcaucuaccagaccagcaacuuccgggugcagcccacugagagcaucgugcgguuccccaacauuaccaaccugugucccuucggcgagguguucaacgccacccgguucgccagcguguacgccuggaaccggaagcggaucagcaacugcguggccgacuacagcgugcuguacaacagcgccagcuucagcaccuucaagugcuacggcgugagcccuaccaagcugaacgaccugugcuucaccaacguguacgcugacagcuucgugauccggggcgacgaggugcggcagaucgcccccggccagaccggcaagaucgccgacuacaacuacaagcugcccgacgacuucaccggcugcgugaucgccuggaacagcaacaaccuggacagcaaggugggcggcaacuacaacuaccuguuccggcuguuccguaagagcaaccugaagccauuugagcgggacaucagcaccgagaucuaccaggccggcagcacccccugcaacgguguggagggcuucaacugcuacuucccccugcagagcuacggcuuccagcccaccaacggcgugggcuaccagcccuaccgggugguggugcugagcuucgagcugcugcacgcccccgccaccgugugcggcccuaaaaagagcaccaaccuggugaagaacaagugcgugaacuucaauuucaacggccugaccggcaccggcgugcugaccgagagcaacaagaaguuccugcccuuccagcaguucggccgggauaucgccgacaccaccgacgcagugcgggacccccagacccuggagauccuggacaucaccccaugcagcuucggcggcgugagcgucaucacccccggcacaaacaccagcaaccagguggccgugcuguaccagggagugaacugcaccgaggugcccguggccauccacgccgaccagcugacccccaccuggcggguguacagcaccggcagcaacguguuccagacccgggccggcugccugaucggcgccgagcacgugaacaacuccuacgagugcgacauccccaucggcgcuggcaucugcgccagcuaccagacccagaccaacagcccccggcgggcccggagcguggccagccagagcaucaucgccuacaccaugagcuuaggcgccgagaacagcguggccuacagcaacaacagcaucgcgaucccuaccaacuucaccaucagcgugaccaccgagauacugcccgugagcaugaccaagaccagcguggacuguaccauguacaucugcggcgacagcaccgagugcagcaaccugcugcugcaguacggcagcuucugcacccagcugaaccgggcccugaccggcaucgccguggagcaggacaagaacacccaagagguguucgcccaggugaagcagaucuacaagacucccccaaucaaggacuucggcggcuucaacuucagccagauccugcccgaccccagcaagcccagcaagcggagcuucaucgaggaccugcuguucaacaaggugacccuggccgacgccggcuucaucaagcaguacggcgacugccugggggauaucgccgcucgggaccugaucugcgcccagaaguucaacggccugaccgugcugcccccucugcugaccgacgagaugaucgcccaguacaccagcgcccugcuugccggcaccaucaccagcggcuggaccuucggcgccggcgcagcccugcagauccccuucgccaugcagauggccuaccgguucaacggcaucggcgugacccagaacgugcuguacgagaaccagaagcugaucgccaaccaguucaacagcgccaucggcaagauccaggacagccugagcagcaccgccagcgcccugggcaagcugcaggacguggugaaccagaacgcucaggcccugaacacccuggugaagcagcugagcagcaacuuuggcgccaucagcucagugcugaaugacauccugagcaggcuggacaagguggaggccgaggugcagaucgaccggcugaucaccggccggcugcagagccugcagaccuacgugacccagcagcugauccgggccgccgagauccgggccagcgccaaccuggcagccaccaagaugagcgagugcgugcugggccagagcaagcggguggacuucugcggcaagggcuaccaccugaugagcuucccccagagcgccccacacggcgugguguuccuccacgucacauacgugcccgcccaggagaagaacuucaccaccgcccccgccauuugccacgacggcaaggcucacuucccccgggagggaguguucgugagcaacggcacccacugguucgugacccagcggaacuucuacgagccccagaucaucaccaccgacaacaccuucgugagcggcaacugcgacguggugaucggcaucgugaacaacaccguguacgacccccugcagccugagcuggacagcuucaaggaggagcuggacaaguacuucaagaaccacaccagccccgacguggaucugggcgacaucagcggcaucaacgccagcguggugaacauccagaaggagaucgaccggcugaacgagguggccaagaaccugaacgagagccugaucgaccugcaggagcugggcaaguacgagcaguacaucaaguggcccugguacaucuggcugggcuucaucgccggccugaucgccaucgugauggugaccaucaugcugugcugcaugaccagcugcuguagcugccugaagggcugcugcagcugcggcagcugcugcaaguucgacgaggacgacagcgagccagugcugaagggcgugaagcugcacuacaccugaggacuagucccuguucccagagcccacuuuuuuuucuuuuuuugaaauaaaauagccugucuuucagaucuaaaaaaaaaaaaaaaaaaaaaaaaaaaaaaaaaaaaaaaaaaaaaaaaaaaaaaaaaaaaaaaaaaaaaaaaaaaaaaaaaaaaaaaaaaaaaaaaaaaa

SEQ ID NO: 24791 - RNA, 4070 nt, Artificial Sequence
  SARS-CoV-2/Wuhan/WIV05/2019__EPI_ISL_402128 spike protein mRNA gc (1-1273)(D614G_I692V)
aggagagucccgcagucggcguccagcggcucugcuuguucgugugugugucguugcaggccuuauucaagcuuaccauguucguguuccuggugcugcugccccuggugagcagccagugcgugaaccugaccacccggacccagcugcccccugccuacaccaacagcuucacccggggcguguacuaccccgacaagguguuccggagcagcgugcugcacagcacccaggaccuguuccugcccuucuucagcaacgugaccugguuccacgccauccacgugagcggcaccaacggcaccaagcgguucgacaacccagugcugcccuucaacgacggcguguacuucgccagcaccgagaagucaaacaucauccggggcuggaucuucggcaccacccuggacagcaagacacagagccugcugaucgugaacaacgccaccaacguggugaucaaggugugcgaguuucaguucugcaacgaccccuuccugggcguguacuaccacaagaacaacaagagcuggauggagagcgaguuccgggucuacagcagcgcuaacaauugcaccuucgaguacgugagccagcccuuccugauggaccucgagggcaagcagggcaacuucaagaaccugcgggaguucguguucaagaacaucgauggcuacuucaagaucuacagcaagcacacccccaucaaccuggugcgggaccugccccagggauucagcgcccuggagccucugguggaccugcccaucggcaucaacaucaccagguuccagacccugcuggcccugcaccggagcuaccugacccccggcgacagcagcagcggcuggaccgccggcgccgccgcauacuacgugggcuaccugcagccacggaccuuccugcugaaguacaacgagaacggcaccaucaccgacgccguggacugcgcccuggacccccugagcgagaccaagugcacccuaaagagcuucaccguggagaagggcaucuaccagaccagcaacuuccgggugcagcccacugagagcaucgugcgguuccccaacauuaccaaccugugucccuucggcgagguguucaacgccacccgguucgccagcguguacgccuggaaccggaagcggaucagcaacugcguggccgacuacagcgugcuguacaacagcgccagcuucagcaccuucaagugcuacggcgugagcccuaccaagcugaacgaccugugcuucaccaacguguacgcugacagcuucgugauccggggcgacgaggugcggcagaucgcccccggccagaccggcaagaucgccgacuacaacuacaagcugcccgacgacuucaccggcugcgugaucgccuggaacagcaacaaccuggacagcaaggugggcggcaacuacaacuaccuguaccggcuguuccguaagagcaaccugaagccauucgagcgggacaucagcaccgagaucuaccaggccggcagcacccccugcaacgguguggagggcuuuaacugcuacuucccccugcagagcuacggcuuccagcccaccaacggcgugggcuaccagcccuaccgggugguggugcugagcuucgagcugcugcacgcccccgccaccgugugcggcccuaaaaagagcaccaaccuggugaagaacaagugcgugaacuucaauuucaacggccugaccggcaccggcgugcugaccgagagcaacaagaaguuccugcccuuccagcaguucggccgggauaucgccgacaccaccgacgcagugcgggacccccagacccuggagauccuggacaucaccccaugcagcuucggcggcgugagcgucaucacccccggcacaaacaccagcaaccagguggccgugcuguaccagggagugaacugcaccgaggugcccguggccauccacgccgaccagcugacccccaccuggcggguguacagcaccggcagcaacguguuccagacccgggccggcugccugaucggcgccgagcacgugaacaacuccuacgagugcgacauccccaucggcgcuggcaucugcgccagcuaccagacccagaccaacagcccccggcgggcccggagcguggccagccagagcgugaucgccuacaccaugagcuuaggcgccgagaacagcguggccuacagcaacaacagcaucgcgaucccuaccaacuucaccaucagcgugaccaccgagauccugcccgugagcaugaccaagaccagcguggacuguaccauguacauaugcggcgacagcaccgagugcagcaaccugcugcugcaguacggcagcuucugcacccagcugaaccgggcccugaccggcaucgccguggagcaggacaagaacacccaagagguguucgcccaggugaagcagaucuacaagacucccccaaucaaggacuucggcggcuucaacuucagccagauccugcccgaccccagcaagcccagcaagcggagcuucaucgaggaccugcuguucaacaaggugacccuggccgacgccggcuucaucaagcaguacggcgacugccugggggauaucgccgcucgggaccugaucugcgcccagaaguucaacggccugaccgugcugcccccucugcugaccgacgagaugaucgcccaguacaccagcgcccugcuugccggcaccaucaccagcggcuggaccuucggcgccggcgcagcccugcagauccccuucgccaugcagauggccuaccgguucaacggcaucggcgugacccagaacgugcuguacgagaaccagaagcugaucgccaaccaguucaacagcgccaucggcaagauccaggacagccugagcagcaccgccagcgcccugggcaagcugcaggacguggugaaccagaacgcucaggcccugaacacccuggugaagcagcugagcagcaacuucggcgccaucagcucagugcugaaugacauccugagcaggcuggacaagguggaggccgaggugcagaucgaccggcugaucaccggccggcugcagagccugcagaccuacgugacccagcagcugauccgggccgccgagauccgggccagcgccaaccuggcagccaccaagaugagcgagugcgugcugggccagagcaagcggguggacuuuugcggcaagggcuaccaccugaugagcuucccccagagcgccccacacggcguggucuuccuccacgugacauacgugcccgcccaggagaagaacuucaccaccgcccccgccaucugccacgacggcaaggcucacuucccccgggagggaguguucgugagcaacggcacccacugguucgugacccagcggaacuucuacgagccccagauuaucaccaccgacaacaccuucgugagcggcaacugcgacguggugaucggcaucgugaacaacaccguguacgacccccugcagccugagcuggacagcuucaaggaggagcuggacaaguacuucaagaaccacaccagccccgacguggaucugggcgacaucagcggcaucaacgccagcguggugaacauccagaaggagaucgaccggcugaacgagguggccaagaaccugaacgagagccugaucgaccugcaggagcugggcaaguacgagcaguacaucaaguggcccugguacaucuggcugggcuucaucgccggccugaucgccaucgugauggugaccaucaugcugugcugcaugaccagcugcuguagcugccugaagggcugcugcagcugcggcagcugcugcaaguucgacgaggacgacagcgagccagugcugaagggcgugaagcugcacuacaccugaggacuagucccuguucccagagcccacuuuuuuuucuuuuuuugaaauaaaauagccugucuuucagaucuaaaaaaaaaaaaaaaaaaaaaaaaaaaaaaaaaaaaaaaaaaaaaaaaaaaaaaaaaaaaaaaaaaaaaaaaaaaaaaaaaaaaaaaaaaaaaaaaaaaa

SEQ ID NO: 24792 - RNA, 4070 nt, Artificial Sequence
  SARS-CoV-2/Wuhan/WIV05/2019__EPI_ISL_402128 spike protein mRNA gc (1-1273)(D614G_M1229I)
aggagagucccgcagucggcguccagcggcucugcuuguucgugugugugucguugcaggccuuauucaagcuuaccauguucguguuccuggugcugcugccccuggugagcagccagugcgugaaccugaccacccggacccagcugcccccugccuacaccaacagcuucacccggggcguguacuaccccgacaagguguuccggagcagcgugcugcacagcacccaggaccuguuccugcccuucuucagcaacgugaccugguuccacgccauccacgugagcggcaccaacggcaccaagcgguucgacaacccagugcugcccuucaacgacggcguguacuucgccagcaccgagaagucaaacaucauccggggcuggaucuucggcaccacccuggacagcaagacacagagccugcugaucgugaacaacgccaccaacguggugaucaaggugugcgaguuucaguucugcaacgaccccuuccugggcguguacuaccacaagaacaacaagagcuggauggagagcgaguuccgggucuacagcagcgcuaacaauugcaccuucgaguacgugagccagcccuuccugauggaccucgagggcaagcagggcaacuucaagaaccugcgggaguucguguucaagaacaucgauggcuacuucaagaucuacagcaagcacacccccaucaaccuggugcgggaccugccccagggauucagcgcccuggagccucugguggaccugcccaucggcaucaacaucaccagguuccagacccugcuggcccugcaccggagcuaccugacccccggcgacagcagcagcggcuggaccgccggcgccgccgcauacuacgugggcuaccugcagccacggaccuuccugcugaaguacaacgagaacggcaccaucaccgacgccguggacugcgcccuggacccccugagcgagaccaagugcacccuaaagagcuucaccguggagaagggcaucuaccagaccagcaacuuccgggugcagcccacugagagcaucgugcgguuccccaacauuaccaaccugugucccuucggcgagguguucaacgccacccgguucgccagcguguacgccuggaaccggaagcggaucagcaacugcguggccgacuacagcgugcuguacaacagcgccagcuucagcaccuucaagugcuacggcgugagcccuaccaagcugaacgaccugugcuucaccaacguguacgcugacagcuucgugauccggggcgacgaggugcggcagaucgcccccggccagaccggcaagaucgccgacuacaacuacaagcugcccgacgacuucaccggcugcgugaucgccuggaacagcaacaaccuggacagcaaggugggcggcaacuacaacuaccuguaccggcuguuccguaagagcaaccugaagccauucgagcgggacaucagcaccgagaucuaccaggccggcagcacccccugcaacgguguggagggcuuuaacugcuacuucccccugcagagcuacggcuuccagcccaccaacggcgugggcuaccagcccuaccgggugguggugcugagcuucgagcugcugcacgcccccgccaccgugugcggcccuaaaaagagcaccaaccuggugaagaacaagugcgugaacuucaauuucaacggccugaccggcaccggcgugcugaccgagagcaacaagaaguuccugcccuuccagcaguucggccgggauaucgccgacaccaccgacgcagugcgggacccccagacccuggagauccuggacaucaccccaugcagcuucggcggcgugagcgucaucacccccggcacaaacaccagcaaccagguggccgugcuguaccagggagugaacugcaccgaggugcccguggccauccacgccgaccagcugacccccaccuggcggguguacagcaccggcagcaacguguuccagacccgggccggcugccugaucggcgccgagcacgugaacaacuccuacgagugcgacauccccaucggcgcuggcaucugcgccagcuaccagacccagaccaacagcccccggcgggcccggagcguggccagccagagcaucaucgccuacaccaugagcuuaggcgccgagaacagcguggccuacagcaacaacagcaucgcgaucccuaccaacuucaccaucagcgugaccaccgagauacugcccgugagcaugaccaagaccagcguggacuguaccauguacaucugcggcgacagcaccgagugcagcaaccugcugcugcaguacggcagcuucugcacccagcugaaccgggcccugaccggcaucgccguggagcaggacaagaacacccaagagguguucgcccaggugaagcagaucuacaagacucccccaaucaaggacuucggcggcuucaacuucagccagauccugcccgaccccagcaagcccagcaagcggagcuucaucgaggaccugcuguucaacaaggugacccuggccgacgccggcuucaucaagcaguacggcgacugccugggggauaucgccgcucgggaccugaucugcgcccagaaguucaacggccugaccgugcugcccccucugcugaccgacgagaugaucgcccaguacaccagcgcccugcuugccggcaccaucaccagcggcuggaccuucggcgccggcgcagcccugcagauccccuucgccaugcagauggccuaccgguucaacggcaucggcgugacccagaacgugcuguacgagaaccagaagcugaucgccaaccaguucaacagcgccaucggcaagauccaggacagccugagcagcaccgccagcgcccugggcaagcugcaggacguggugaaccagaacgcucaggcccugaacacccuggugaagcagcugagcagcaacuucggcgccaucagcucagugcugaaugacauccugagcaggcuggacaagguggaggccgaggugcagaucgaccggcugaucaccggccggcugcagagccugcagaccuacgugacccagcagcugauccgggccgccgagauccgggccagcgccaaccuggcagccaccaagaugagcgagugcgugcugggccagagcaagcggguggacuuuugcggcaagggcuaccaccugaugagcuucccccagagcgccccacacggcgugguguuccuccacgucacauacgugcccgcccaggagaagaacuucaccaccgcccccgccauuugccacgacggcaaggcucacuucccccgggagggaguguucgugagcaacggcacccacugguucgugacccagcggaacuucuacgagccccagaucaucaccaccgacaacaccuucgugagcggcaacugcgacguggugaucggcaucgugaacaacaccguguacgacccccugcagccugagcuggacagcuucaaggaggagcuggacaaguacuucaagaaccacaccagccccgacguggaucugggcgacaucagcggcaucaacgccagcguggugaacauccagaaggagaucgaccggcugaacgagguggccaagaaccugaacgagagccugaucgaccugcaggagcugggcaaguacgagcaguacaucaaguggcccugguacaucuggcugggcuucaucgccggccugaucgccaucgugaucgugaccaucaugcugugcugcaugaccagcugcuguagcugccugaagggcugcugcagcugcggcagcugcugcaaguucgacgaggacgacagcgagccagugcugaagggcgugaagcugcacuacaccugaggacuagucccuguucccagagcccacuuuuuuuucuuuuuuugaaauaaaauagccugucuuucagaucuaaaaaaaaaaaaaaaaaaaaaaaaaaaaaaaaaaaaaaaaaaaaaaaaaaaaaaaaaaaaaaaaaaaaaaaaaaaaaaaaaaaaaaaaaaaaaaaaaaaa

SEQ ID NO: 24793 - RNA, 4064 nt, Artificial Sequence
  SARS-CoV-2/Wuhan/WIV05/2019__EPI_ISL_402128 spike protein mRNA gc (1-1273)(H69del_V70del_A222V_Y453F_S477N_D614G_I692V)
aggagagucccgcagucggcguccagcggcucugcuuguucgugugugugucguugcaggccuuauucaagcuuaccauguucguguuccuggugcugcugccccuggugagcagccagugcgugaaccugaccacccggacccagcugcccccugccuacaccaacagcuucacccggggcguguacuaccccgacaagguguuccggagcagcgugcugcacagcacccaggaccuguuccugcccuucuucagcaacgugaccugguuccacgccaucagcggcaccaacggcaccaagcgguucgacaacccagugcugcccuucaacgacggcguguacuucgccagcaccgagaagucaaacaucauccggggcuggaucuucggcaccacccuggacagcaagacacagagccugcugaucgugaacaacgccaccaacguggugaucaaggugugcgaguuucaguucugcaacgaccccuuccugggcguguacuaccacaagaacaacaagagcuggauggagagcgaguuccggguguacagcagcgcuaacaauugcaccuucgaguacgucagccagcccuuccugauggaccucgagggcaagcagggcaacuucaagaaccugcgggaguucguguucaagaacaucgauggcuacuucaagaucuacagcaagcacacccccaucaaccuggugcgggaccugccccagggauucagcgugcuggagccucugguggaccugcccaucggcaucaacaucaccagguuccagacccugcuggcccugcaccggagcuaccugacccccggcgacagcagcagcggcuggaccgccggcgccgccgccuacuacgugggcuaccugcagccacggaccuuccugcugaaguacaacgagaacggcaccaucaccgacgcaguggacugcgcccuggacccccugagcgagaccaagugcacccuaaagagcuucaccguggagaagggcaucuaccagaccagcaacuuccgggugcagcccacugagagcaucgugcgguuccccaacauuaccaaccugugucccuucggcgagguguucaacgccacccgguucgccagcguguacgccuggaaccggaagcggaucagcaacugcguggccgacuacagcgugcuguacaacagcgccagcuucagcaccuucaagugcuacggcgugagcccuaccaagcugaacgaccugugcuucaccaacguguacgccgacagcuucgugauccggggcgacgaggugcggcagaucgcucccggccagaccggcaagaucgccgacuacaacuacaagcugcccgacgacuucaccggcugcgugaucgccuggaacagcaacaaccuggacagcaaggugggcggcaacuacaacuaccuguuccggcuguuccguaagagcaaccugaagccauuugagcgggacaucagcaccgagaucuaccaggccggcaacacccccugcaacgguguggagggcuucaacugcuacuucccccugcagagcuacggcuuccagcccaccaacggcgugggcuaccagcccuaccgggugguggugcugagcuucgagcugcugcacgcccccgccaccgugugcggcccuaaaaagagcaccaaccuggugaagaacaagugcgugaauuucaacuucaacggccugaccggcaccggcgugcugaccgagagcaacaagaaguuccugcccuuccagcaguucggccgggauaucgccgacaccaccgacgccgugcgggacccccagacccuggagauccuggacaucaccccaugcagcuucggcggcgugagcgucaucacccccggcacaaacaccagcaaccagguggcagugcuguaccagggagugaacugcaccgaggugcccguggccauccacgccgaccagcugacccccaccuggcggguguacagcaccggcagcaacguguuccagacccgggccggcugccugaucggcgccgagcacgugaacaacagcuacgagugcgacauccccaucggcgccggcaucugcgcuuccuaccagacccagaccaacagcccccggcgggcccggagcguggccagccagagcgugaucgccuacaccaugagcuuaggcgccgagaacagcguggccuacagcaacaacagcaucgccaucccuaccaacuucaccaucagcgugaccaccgagauccugcccgugagcaugaccaagaccagcguggacuguaccauguacauaugcggcgacagcaccgagugcagcaaccugcugcugcaguacggcagcuucugcacccagcugaaccgggcgcugaccggcaucgccguggagcaggacaagaacacccaagagguguucgcccaggugaagcagaucuacaagacucccccaaucaaggacuucggcggcuucaacuucagccagauccugcccgaccccagcaagcccagcaagcggagcuucaucgaggaccugcuguucaacaaggugacccuggccgacgccggcuucaucaagcaguacggcgacugccugggggauaucgccgcccgggaccugaucugcgcucagaaguucaacggccugaccgugcugcccccucugcugaccgacgagaugaucgcccaguacaccagcgcccugcuugccggcaccaucaccagcggcuggaccuucggcgccggcgccgcacugcagauccccuucgccaugcagauggccuaccgguucaacggcaucggcgugacccagaacgugcuguacgagaaccagaagcugaucgccaaccaguucaacagcgccaucggcaagauccaggacagccugagcagcaccgccagcgcccugggcaagcugcaggacguggugaaccagaacgcccaggcucugaacacccuggugaagcagcugagcagcaauuuuggcgccaucagcagcgugcugaacgacauccugucaaggcuggacaagguggaggccgaggugcagaucgaccggcugaucaccggccggcugcagagccugcagaccuacgugacccagcagcugauccgggccgccgagauccgggccagcgccaaccuggccgcaaccaagaugagcgagugcgugcugggccagagcaagcggguggacuucugcggcaagggcuaccaccugaugagcuucccccagagcgccccacacggcguggucuuccuccacgugacauacgugcccgcccaggagaagaacuucaccaccgcccccgccaucugccacgacggcaaggcccacuucccccgggagggaguguucgugagcaacggcacccacugguucgugacccagcggaacuucuacgagccccagauuaucaccaccgacaacaccuucgugagcggcaacugcgacguggugaucggcaucgugaacaacaccguguacgacccccugcagccugagcuggacagcuucaaggaggagcuggacaaguacuucaagaaccacaccagccccgacguggaucugggcgacaucagcggcaucaacgcuagcguggugaacauccagaaggagaucgaccggcugaacgagguggccaagaaccugaacgagagccugaucgaccugcaggagcugggcaaguacgagcaguacaucaaguggcccugguacaucuggcugggcuucaucgccggccugaucgccaucgugauggugaccaucaugcugugcugcaugaccagcugcuguagcugccugaagggcugcugcagcugcggcagcugcugcaaguucgacgaggacgacagcgagccagugcugaagggcgugaagcugcacuacaccugaggacuagucccuguucccagagcccacuuuuuuuucuuuuuuugaaauaaaauagccugucuuucagaucuaaaaaaaaaaaaaaaaaaaaaaaaaaaaaaaaaaaaaaaaaaaaaaaaaaaaaaaaaaaaaaaaaaaaaaaaaaaaaaaaaaaaaaaaaaaaaaaaaaaa

SEQ ID NO: 24794 - RNA, 4064 nt, Artificial Sequence
  SARS-CoV-2/Wuhan/WIV05/2019__EPI_ISL_402128 spike protein mRNA gc (1-1273)(H69del_V70del_Y453F_D614G_I692V_M1229I)
aggagagucccgcagucggcguccagcggcucugcuuguucgugugugugucguugcaggccuuauucaagcuuaccauguucguguuccuggugcugcugccccuggugagcagccagugcgugaaccugaccacccggacccagcugcccccugccuacaccaacagcuucacccggggcguguacuaccccgacaagguguuccggagcagcgugcugcacagcacccaggaccuguuccugcccuucuucagcaacgugaccugguuccacgccaucagcggcaccaacggcaccaagcgguucgacaacccagugcugcccuucaacgacggcguguacuucgccagcaccgagaagucaaacaucauccggggcuggaucuucggcaccacccuggacagcaagacacagagccugcugaucgugaacaacgccaccaacguggugaucaaggugugcgaguuucaguucugcaacgaccccuuccugggcguguacuaccacaagaacaacaagagcuggauggagagcgaguuccggguguacagcagcgcuaacaauugcaccuucgaguacgucagccagcccuuccugauggaccucgagggcaagcagggcaacuucaagaaccugcgggaguucguguucaagaacaucgauggcuacuucaagaucuacagcaagcacacccccaucaaccuggugcgggaccugccccagggauucagcgcccuggagccucugguggaccugcccaucggcaucaacaucaccagguuccagacccugcuggcccugcaccggagcuaccugacccccggcgacagcagcagcggcuggaccgccggcgccgccgcauacuacgugggcuaccugcagccacggaccuuccugcugaaguacaacgagaacggcaccaucaccgacgccguggacugcgcccuggacccccugagcgagaccaagugcacccuaaagagcuucaccguggagaagggcaucuaccagaccagcaacuuccgggugcagcccacugagagcaucgugcgguuccccaacauuaccaaccugugucccuucggcgagguguucaacgccacccgguucgccagcguguacgccuggaaccggaagcggaucagcaacugcguggccgacuacagcgugcuguacaacagcgccagcuucagcaccuucaagugcuacggcgugagcccuaccaagcugaacgaccugugcuucaccaacguguacgcugacagcuucgugauccggggcgacgaggugcggcagaucgcccccggccagaccggcaagaucgccgacuacaacuacaagcugcccgacgacuucaccggcugcgugaucgccuggaacagcaacaaccuggacagcaaggugggcggcaacuacaacuaccuguuccggcuguuccguaagagcaaccugaagccauuugagcgggacaucagcaccgagaucuaccaggccggcagcacccccugcaacgguguggagggcuucaacugcuacuucccccugcagagcuacggcuuccagcccaccaacggcgugggcuaccagcccuaccgggugguggugcugagcuucgagcugcugcacgcccccgccaccgugugcggcccuaaaaagagcaccaaccuggugaagaacaagugcgugaacuucaauuucaacggccugaccggcaccggcgugcugaccgagagcaacaagaaguuccugcccuuccagcaguucggccgggauaucgccgacaccaccgacgcagugcgggacccccagacccuggagauccuggacaucaccccaugcagcuucggcggcgugagcgugaucacccccggcacaaacaccagcaaccaggucgccgugcuguaccagggagugaacugcaccgaggugcccguggccauccacgccgaccagcugacccccaccuggcggguguacagcaccggcagcaacguguuccagacccgggccggcugccugaucggcgccgagcacgugaacaacuccuacgagugcgacauccccaucggcgcuggcaucugcgccagcuaccagacccagaccaacagcccccggcgggcccggagcguggccagccagagcgugaucgccuacaccaugagcuuaggcgccgagaacagcguggccuacagcaacaacagcaucgcgaucccuaccaacuucaccaucagcgugaccaccgagauccugcccgugagcaugaccaagaccagcguggacuguaccauguacauaugcggcgacagcaccgagugcagcaaccugcugcugcaguacggcagcuucugcacccagcugaaccgggcccugaccggcaucgccguggagcaggacaagaacacccaagagguguucgcccaggugaagcagaucuacaagacucccccaaucaaggacuucggcggcuucaacuucagccagauccugcccgaccccagcaagcccagcaagcggagcuucaucgaggaccugcuguucaacaaggugacccuggccgacgccggcuucaucaagcaguacggcgacugccugggggauaucgccgcucgggaccugaucugcgcccagaaguucaacggccugaccgugcugcccccucugcugaccgacgagaugaucgcccaguacaccagcgcccugcuugccggcaccaucaccagcggcuggaccuucggcgccggcgcagcccugcagauccccuucgccaugcagauggccuaccgguucaacggcaucggcgugacccagaacgugcuguacgagaaccagaagcugaucgccaaccaguucaacagcgccaucggcaagauccaggacagccugagcagcaccgccagcgcccugggcaagcugcaggacguggugaaccagaacgcucaggcccugaacacccuggugaagcagcugagcagcaacuuuggcgccaucagcucagugcugaaugacauccugagcaggcuggacaagguggaggccgaggugcagaucgaccggcugaucaccggccggcugcagagccugcagaccuacgugacccagcagcugauccgggccgccgagauccgggccagcgccaaccuggcagccaccaagaugagcgagugcgugcugggccagagcaagcggguggacuucugcggcaagggcuaccaccugaugagcuucccccagagcgccccacacggcgugguguuccuccacgucacauacgugcccgcccaggagaagaacuucaccaccgcccccgccaucugccacgacggcaaggcucacuucccccgggagggaguguucgugagcaacggcacccacugguucgugacccagcggaacuucuacgagccccagauuaucaccaccgacaacaccuucgugagcggcaacugcgacguggugaucggcaucgugaacaacaccguguacgacccccugcagccugagcuggacagcuucaaggaggagcuggacaaguacuucaagaaccacaccagccccgacguggaucugggcgacaucagcggcaucaacgccagcguggugaacauccagaaggagaucgaccggcugaacgagguggccaagaaccugaacgagagccugaucgaccugcaggagcugggcaaguacgagcaguacaucaaguggcccugguacaucuggcugggcuucaucgccggccugaucgccaucgugaucgugaccaucaugcugugcugcaugaccagcugcuguagcugccugaagggcugcugcagcugcggcagcugcugcaaguucgacgaggacgacagcgagccagugcugaagggcgugaagcugcacuacaccugaggacuagucccuguucccagagcccacuuuuuuuucuuuuuuugaaauaaaauagccugucuuucagaucuaaaaaaaaaaaaaaaaaaaaaaaaaaaaaaaaaaaaaaaaaaaaaaaaaaaaaaaaaaaaaaaaaaaaaaaaaaaaaaaaaaaaaaaaaaaaaaaaaaaa

SEQ ID NO: 24795 - RNA, 4061 nt, Artificial Sequence
  SARS-CoV-2/Wuhan/WIV05/2019__EPI_ISL_402128 spike protein mRNA gc (1-1273)(H69del_V70del_Y144del_N501Y_A570D_D614G_P681H_T716I_S982 A_D1118H)
aggagagucccgcagucggcguccagcggcucugcuuguucgugugugugucguugcaggccuuauucaagcuuaccauguucguguuccuggugcugcugccccuggugagcagccagugcgugaaccugaccacccggacccagcugcccccugccuacaccaacagcuucacccggggcguguacuaccccgacaagguguuccggagcagcgugcugcacagcacccaggaccuguuccugcccuucuucagcaacgugaccugguuccacgccaucagcggcaccaacggcaccaagcgguucgacaacccagugcugcccuucaacgacggcguguacuucgccagcaccgagaagucaaacaucauccggggcuggaucuucggcaccacccuggacagcaagacacagagccugcugaucgugaacaacgccaccaacguggugaucaaggugugcgaguuucaguucugcaacgaccccuuccugggcguguaccacaagaacaacaagagcuggauggagagcgaguuccggguguacagcagcgcuaacaauugcaccuucgaguacgucagccagcccuuccugauggaccucgagggcaagcagggcaacuucaagaaccugcgggaguucguguucaagaacaucgauggcuacuucaagaucuacagcaagcacacccccaucaaccuggugcgggaccugccccagggauucagcgcccuggagccucugguggaccugcccaucggcaucaacaucaccagguuccagacccugcuggcccugcaccggagcuaccugacccccggcgacagcagcagcggcuggaccgccggcgccgccgcauacuacgugggcuaccugcagccacggaccuuccugcugaaguacaacgagaacggcaccaucaccgacgccguggacugcgcccuggacccccugagcgagaccaagugcacccuaaagagcuucaccguggagaagggcaucuaccagaccagcaacuuccgggugcagcccacugagagcaucgugcgguuccccaacauuaccaaccugugucccuucggcgagguguucaacgccacccgguucgccagcguguacgccuggaaccggaagcggaucagcaacugcguggccgacuacagcgugcuguacaacagcgccagcuucagcaccuucaagugcuacggcgugagcccuaccaagcugaacgaccugugcuucaccaacguguacgcugacagcuucgugauccggggcgacgaggugcggcagaucgcccccggccagaccggcaagaucgccgacuacaacuacaagcugcccgacgacuucaccggcugcgugaucgccuggaacagcaacaaccuggacagcaaggugggcggcaacuacaacuaccuguaccggcuguuccguaagagcaaccugaagccauucgagcgggacaucagcaccgagaucuaccaggccggcagcacccccugcaacgguguggagggcuuuaacugcuacuucccccugcagagcuacggcuuccagcccaccuacggcgugggcuaccagcccuaccgggugguggugcugagcuucgagcugcugcacgcccccgccaccgugugcggcccuaaaaagagcaccaaccuggugaagaacaagugcgugaacuucaacuucaauggccugaccggcaccggcgugcugaccgagagcaacaagaaguuccugcccuuccagcaguucggccgggauaucgacgacaccaccgacgccgugcgggacccccagacccuggagauccuggacaucaccccaugcagcuucggcggcgugagcgugaucacccccggcacaaacaccagcaaccaggucgcagugcuguaccagggagugaacugcaccgaggugcccguggccauccacgccgaccagcugacccccaccuggcggguguacagcaccggcagcaacguguuccagacccgggccggcugccugaucggcgccgagcacgugaacaacuccuacgagugcgacauccccaucggcgccggcaucugcgcuagcuaccagacccagaccaacagccaccggcgggcccggagcguggccagccagagcaucaucgccuacaccaugagcuuaggcgccgagaacagcguggccuacagcaacaacagcaucgccauccccaucaacuucaccauaagcgugaccaccgagauccugccugugagcaugaccaagaccagcguggacuguaccauguacaucugcggcgacagcaccgagugcagcaaccugcugcugcaguacggcagcuucugcacccagcugaaccgggcgcugaccggcaucgccguggagcaggacaagaacacccaagagguguucgcccaggugaagcagaucuacaagaccccacccaucaaggacuucggcggcuucaacuucagccagauccugcccgaccccagcaagcccagcaagcggagcuucaucgaggaccugcuguucaacaaggugacucuggccgacgccggcuucaucaagcaguacggcgauugccugggggacaucgccgcccgggaccugaucugcgcucagaaguucaacggccugaccgugcugccuccccugcugaccgacgagaugaucgcccaguacaccagcgcccugcuugccggcaccaucaccagcggcuggaccuucggcgccggcgccgcacugcagauccccuucgccaugcagauggccuaccgguucaacggcaucggcgugacccagaacgugcuguacgagaaccagaagcugaucgccaaccaguucaacagcgccaucggcaagauccaggacagccugagcagcaccgccagcgcccugggcaagcugcaggacguggugaaccagaacgcccaggcucugaacacccuggugaagcagcugagcagcaacuucggcgccaucagcucagugcugaacgacauccuggccaggcuggacaagguggaggccgaggugcagaucgaccggcugaucaccggccggcugcagagccugcagaccuacgugacccagcagcugauccgggccgccgagauucgggccagcgccaaucuggcagccaccaagaugagcgagugcgugcugggccagagcaagcggguggacuuuugcggcaagggcuaccaccugaugagcuucccccagagcgcuccccacggcgugguguuccuccacgugaccuacgucccagcccaggagaagaacuucacaaccgcccccgccaucugccacgacggcaaggcccacuucccccgggagggaguguucgugagcaacggcacccacugguucgugacccagcggaacuucuacgagccccagaucaucaccacccacaacaccuucgugagcggcaacugcgacguggugaucggcaucgugaacaacaccguguacgacccccugcagcccgagcuggacagcuucaaggaggagcuggacaaguacuucaagaaccacaccagcccugacguggaucugggcgacaucagcggcaucaacgccagcguggugaacauccagaaggagaucgaccggcugaacgagguggccaagaaccugaacgagagccugaucgaccugcaggagcugggcaaguacgagcaguacaucaaguggcccugguacaucuggcugggcuucaucgccggccugaucgccaucgugauggugaccaucaugcugugcugcaugaccagcugcuguagcugccugaagggcugcugcagcugcggcagcugcugcaaguucgacgaggacgacagcgagcccgugcugaagggcgugaagcugcacuacaccugaggacuagucccuguucccagagcccacuuuuuuuucuuuuuuugaaauaaaauagccugucuuucagaucuaaaaaaaaaaaaaaaaaaaaaaaaaaaaaaaaaaaaaaaaaaaaaaaaaaaaaaaaaaaaaaaaaaaaaaaaaaaaaaaaaaaaaaaaaaaaaaaaaaaa
